United States Patent Application Publication US 2024/0301379 A1 - sequence listing, part 6

SEQ ID NO: 7895 - protein, 1212 aa, unidentified
  REGION 1..1212: note = Description of Unknown: Cas Enzyme sequence
MEKYLGIDLGTNSLGWAVVEKNSEGKRLTDYGVMVFPAGVNDIDGNNEPTSQVRSESRMTRRRTNRRRLRKIALLAILSREHLCPVLTAEELSIWRYKKKAPLSPEFLRWQATDDKSGKNPYFSRHECLTRQLDLQKQEDRYLLGNALYHICQRRGFLSNRKNGESKEDGKVKGDIMELSQKMEEAGVKYLGEYFYGMYGTGERIRNHYTARKEHYEAEFDEICQKQSIPEPLKNELWRAIFWQRPLKSQKGTIGRCPFEKQKARCSISHPYFEEFRVLSFLNNVRLSYMGGDWRPLTNEEREAILSDKKLFWRKTNFTFKEIARKLVGKAPWGTKADSKEYVWRFNYDADFPVSGSPVTASILHALGISDVNTWKEALCSQYVKSGNKTQDDIIDDVWHALFSFDDEQKLSAWLCDNLQLREEDALALAKCKISQDYASLSLKAIRLILPFLRKGFRYDEAVMLAGVHAALPAACRNDLNRMREIEENVLIELRNNSMERLDGRKQSQKAAYVAVRDYLFGISPHFHPEKLYHHSIIESFPEALPDKEGRIRLGPPRTPSFKNPVVTRSLFSLRKVINSLLDEGVVDTSTRINIEFARDLNDRNSRIATHRYQQARMKERQDYAERLREYLGREANEREILKYQLWEEQGHQCLYTGNQIGLSEFLGDAPKYDIEHTIPVSRGGDSSQMNMTLCQLEFNRSVKGPKLPAELACHQDILLRISSWNERVSDLKKRIYGINNGIKGASTKDVKDTLIQRRHFVKAELAYWQGKVNRFSMTEVPDGFALRQGVDIGIIGKYGLQYLKTVFTNTFVVKGETTSDFRKYWGIQDAYERKSRDNHAHHCMDAVTIACIGKEEYDAWKHFKEREDRYLRGAGEKPGLSKPWKTFSEDTIGIMDRLLVVHMTPDNVSAPAIKRVRKRGRICRTVEGKVLYAKGDVARGSISKATFYGQIDTGKEKRFVVRKDLSSLGEKEVEQIVDPVVRKKVKDAVLEKGNLSKAVAETIWMNQEKKVPIKKVRVFIPSSLSPVPLKRHRILSKHDYKQDFYSVNEENYCMGIYRGTKNGFKLVSLKEAAAFYNGKTKEKTLVPEVDENGNRLSCLLKIGTMVLFYESSPEELLEASQEELAKRLYKITGLSKMTVQRKYHYGTITLRFQQEARMAKELKGKNGNWKEGEEIRPVIGINHNQCSFWVEGKDFILTPTGRVQFISKSDD

SEQ ID NO: 7896 - protein, 1157 aa, unidentified
  REGION 1..1157: note = Description of Unknown: Cas Enzyme sequence
  MOD_RES 808: note = Any amino acid
VKRVLGLDIGVGSIGFSLMDYTVKKENIIINPIATNSIIFKSPELAVDRRNGRASRRLNNRKKRRKKQIRRVFCEYDIADIDFIKNPTNCLNSLSLSEDVYVIRKKALTQNVSKDEFLKATYSIITRRGYHNLFEPVALDEKDKEENSKINGSINKNIRTINENGYVLPSELLLERKKDIESQGFQNIAVRNKQGDYSNSLNRELHAQELKLVILSQSENKDIFKTVEDCEKFYNKVKELMLFQRELKSFEHMVGYCSFFNKYNETPKKKMPKSSIYNIELTLRQVLSNYKTITKDGEIVTLTKEQVDEVISKWILSPTSEKITFKNVYAKTILQGCVLDDAGSSEDILNIKGYREISAVFKEVGIDFFGKHREAFEDTLLILSYYKTKAKRISEISEIIPVELLESHKELLDKLSIISSVDGFASFSKVFAKMVLEKMQTMSFHESLESLGYYEQYLDVPQYDYLPPLNPTKKDIEWLQENIEYFDKKHLFYKDNTSKTVERIVSILRKLINEIIAKHGKIDEIIIEGNKELNTKRESERIQKSQKLDKKINDEAKKTLKSNGVEDFTNKKKINKTKMFLEQDKKCLYSGETITLFEALDEEKCEVEHFIPRSHFWIDSQKNKILVLKKYNQNKIDASPIEYLKQSGRWDKFKEIVLNSSMKPNKKEWLTDEAKISEIMSKDSDDFQSNFLNDTMSATKTIKNYLEHYLFPKQNKFGKGEEVKVRLVSSKAIHELKHIWGLGKLLQFEKDGKKDRTTNYHHSIDALAVSLCNPSSMFALHNYFKKNENKFKTKALMQKLSINMPRVXNGESLCSYASNLIKKYENNELYVCPIEKRKILKKGFKDGNVKLISVVDSKGVKALQELTSISVLPYAILQTKKGSMIIDRSDEEVKDYIDEIADRLDETKQKNIKDALAKYSRFLLEKRSTLNEEKKKLKDLVFKQKANKNKEDLDLKEEIDEQKHQVLLVQNSLSSSNCYFKTKNGTKQIVKKIKVLSNKKTSASTILAKRGNQTEMEVLTVDTFNRFKQDRKDFVCKLNDYTVSVDIYKSVAHQIIGLKYFRSIRNQNIKPSFNKKFEDIDKEYDFSLYKGEVMAVYKNGVFKHLATLNGGGEISGSSHRILLDTINTKSKMFKETINKITEIKKAKIDFFGNFKEI

SEQ ID NO: 7897 - protein, 987 aa, unidentified
  REGION 1..987: note = Description of Unknown: Cas Enzyme sequence
TARKEHYLKEFKAICRKQEIDADLEEKLEKAIFDQRPLKSQKGQVGTCTFEKGKARCPSSHPLYEDFRMYSFLNNIKMKIHTLYENTERGLTEEEKLKVIPLFKRKLKKTFPFEDIAKKLAGKNNYCYYKSDVDKPYRFNYQMDTQVSGSVVNAQLEELFGEDWLSGVCEVYTLAKDKTRFQIMNDIWHALFFFDDDEKLKEFAVNRLQLNDEDAEKFSKISMPNDYSSLSLKAIRKMLPYMRDYGMMYSQAVFVANLCEVLPHYIWGIKETREVAIENVINVINSYDSNRIDGKTMEACIKDFLREQYQIDENNLKKLYHPSMLELYPRQCPNDEGIYQLGSPRISSVKNPMAMHSLFRLRKVVNLLLKEQIITPETKIHIEFSRDLNDANRRWAIQTWQRDNEKERMKCRKEIEKYISNPTDSDIMKYQLWEEQNHKCLYTGEEIRITDFLGSNPRYDIEHTIPRSAGGDSTKMNLTLCSNRFNRDVKRTNLPSQLTNHEDILERIAAWKEKYEELAKQIRKTNTRGAASKEEKDKIIKRRHYLSLQYDYWRGKYQRFVMTEVPEGFSRRQGTDISVISRYARMYLKSVFKQVYIVKGIATSDFRKMWGIQDEYTKKERINHVHHCIDAITIACIDKNEYDKLAQFYHQSDEYKLGRGEKPVFGKPWPTFVSDIKQIQDELLIAHYSKDNMPKQAKRYVRDSKGRKNLTQGDTARASLHKDTYYGAIKKGDKIMYVGRKSLSQLTTDDVEKIVDEVVREKIKEAITIHGDLKNAVAAKIWMNKEKGIEIKKVRCFVKQVKPIEIKQHRDISKHEYKRHYLAWNDGNYMVAIYIGKDKKGKEKREFEEIRMLDAANYYKRSNERSVTKNPIFPQFSESGYPLAYKLAIDKMVILYDNSPEEVWEFDKYTIQKRLYKITRMSLSDGRMVLVHHQEARPATKLIAESGAYNFDGVLKPMLRISFNQFKALVQGVDFEINDLGEIKRLL

SEQ ID NO: 7898 - protein, 1222 aa, unidentified
  REGION 1..1222: note = Description of Unknown: Cas Enzyme sequence
MKKVLGLDLGVGSIGWCLIEKDDNNIPQRIIRMGSRIVPISSDEESGYTKGNAISKNADRTAKRTARKCYDRYQLRRQALVDLLKRLGMEPSKKLIFKQNPLELWQKRADAASKEISLEELGRVLLHINQKRGYKHSRLTNSDSKETAYVQEVNSRYDDLKAEGLTIGQHFAAKLKENEQTSADGKKYYNYRIKEQVYPRHAYEEEVEKILEVQRRFHADILTSDVCKEIKNIIFYQRDLKSCKNLVSLCEFESYTINKDGKEITIGPKVAPRTSPLAQLSSILETANNITIRNRKNDELYISPEQRKSIADFLDNHEVMKLTDLYKILNIGRKDGWWAGKAIGKGLKGNTTKCQIREALSNLPKEQIESLTAFKLEYDEYVDEETGEVRKRINNTLAEQQPLYKLWHMVYSIKDVDELSGALHHLGIEDEESIQKLCNLDFRTAGYVNKSAKAIGRILPYLMDGMMYSDACEQAGFDHSRRINPDRALLTSLPQIQKNELRQPVVEKILNQLVNIVNALLEKEGTIDEIRVELARELKQSKEERNEAFKRNNQNERQNKVYAERIKEFGLTPTRNRIMKMKMWEESEYTCMYCGQPVNVTEFLQGADVEREHIIPRGLLFDNSFTNQVCACRRCNSQKGMRTAYDFIADDKGQEGLDSYIDRINDLFNRKKISRNKLNRLLTSHKAYLSRKAQGKETEEDKDLWENFIDRQLRQSQYIAKKSVEMLQQVCKNVYTTSGSVTDFVRHQWGYDELLHDLNFERFKKAGLTAMVTQLHSGKEVEVERIKDWTKRLDNRHHAVDALAIACTTQGMIQRLNTLNASREEIIEELNSKDRPIIDPERSMLEKWIYSQPHISYAQAKDEINKVIISQRPNTRITVPGKRYVIKNGKRTLAQTGIVVPRGALHAEFVYGRIMKQEADGVTLTPQYVRKYKLGIGAQGFLFNGKEFYKEELKKDSKTGLSSIVVTDKIKEVLDKVVDGGIRRRILERLNRGFKEGADYRANVPQALANLKNLDEDPIFSDDAKTRPIRTVRKYVSSSTMEAVRKDNNGRSISFVEPDDNHHVAFYKYEDGDINECVVTKWQAVQRKMNHIPVIIDCPSQTWNDVMVRNDVSDELLLSLPIDNSTFLLSLQKGEAIIMGMEESTFQRAIRNKDVQTLSKHLYFVQSASSHDYRFRRHVESKYDTNDINKEDLRFLRIRTIQGLFENHPHKVKVTVLGDIVE

SEQ ID NO: 7899 - protein, 1075 aa, unidentified
  REGION 1..1075: note = Description of Unknown: Cas Enzyme sequence
MRLGLDIGTNSIGWWLYKTEKNVITEVLDGGVRIFSDGRHPKSKESLAVERRIARGQRRRRDRYLRRKAALMKRMAEAGLMPIDPAEAKKLELFDPYALRAKGLTEKLPLVHLGRVLFHLNQRRGFKSNRKTDRGDNESGKIKDATARLDQAMMASGARTYGEFLHMRRSNSPTQNHVPTVRTRLSLGRRNGEDKEESGYDFYPDRRHLNEEFEALWKAQSAYNSAILTDELRDEISKIIFHQRPLKTPEVGLCLFTDERRVPSAHPLNQRRILLETVNNLRVVTPGKPAHSISFEDREKIVHALDNKAHTKSLSGMSLKLKALGKIIKLREDQSFTLETINRDSIACDPVRASMSHPDRFGSGWSKLNAEAHWEVIQRVRTVQSDAEYSDLVDWLVTDQGLSQDNAEASANAPLPEGYGRLGLTATQRIVKALEAKVITYSTAVASCGWHHSDGRTGEILNDLPYYGKILERHVIPGSYDDKDDDITRYGRITNPTVHIGLNQLRRLVNRIISVHGKPDQIVLEIARDLKLSEDQKRDVQRNIKKNTDAAIARGAKLEELGVHNTGANRAQYRLWEELGAAIGPRCCPYTGKPISASMIFDGSCDVDHILPFSRTLDDSFANRTLCLKEANRQKTNKTPWEVWGDTPQWDAITANLKKLSANKAWRFAPDAMERFEGENDFSARALKDTQYLSRIARTYLETLYDGQDGISHVWVVPGRLTEMLRRHWGLNGIAELTDSDKETVKSKNRSDHRHHAIDAAVVAATDRSLIKRISDIAQKDELEGAEQIARSVAPPWDNFRQDIAAQLQKVIVSHRADHGRIDVNARKLGQDGTAGKLHNAGAYGLTNDDTVVSRSPLLSVTGKDIEITSRGKNIRDKYLQKHLARLTQGLEGKAFEQALSNFSNARKLPDHSDNPYFGIRRVRLEESLQQSARVEISNGNDKPFKAYKGDSNHCYEIWRLPNGEMKGQVVTTFEAHKLAHGKKPHPAAKRVLRVFKRDMVMLEKGGDQIVGYVQKLDSVNGLFIAPHTEANADARHRNKTFKFIQMAASSLIKANIRRVYVDEMGRIRNPATSK

SEQ ID NO: 7900 - protein, 1140 aa, unidentified
  REGION 1..1140: note = Description of Unknown: Cas Enzyme sequence
VEGNNKNLTFGFDIGIASVGWAVLAPDRIVALGVRAFDKAETAKEGESLNLARRSARLTRRRLYRRAWRQTKVARLLKREGLIADAQLFHDQRPAPISPWQLRVDGLDRLLAPEEWARVIYHLCKHRGFHWISRAEEKKAGEDARGEGGKVKQGLAATSKMMREKGYRTAAEMVLAEFPDAQRNKQGDYGKALARALLAEEVGILFEHQRALGNPHTGTAFQSAILGNGDRKSGLFWLQKPALSGADLLKMLGRCTFEKAEYRAPKASFTAERHVWLTQLNNLRIVVDGMTRPLNGQERQIALPLPYNQAGDLTHKQLRAALTKAGVLDASFRFAKFPYAQSADGKAKDPESAVLVKLPAWQEQHKLLKDKGLETEWQGMAGAALDGNPDQLDQIAWVLSVYKDDTEVEHELGKLNLPGGQAMIDALSDIRFDKFSALSLKALRKIVPQMETGLRYDEACEAAGFHHSQLFKLGKGEERYLPPFYSGRDKDGRMVFNDDMDIPRNPVVLRALNQARKVMNALIREYGSPASVHIEMARDLSRPMDERKKIGKLQDEYRERNDKLKATFAAEFGIPAKGREFEKFQLYSEQQGKCAYSIEPLDLARVLHDIGYAEVDHALPYSRSYDDSKSNKVLVLARENRNKGNATPYEYLDGANDSERWRRFVAWVEGNKTYRLAKRTRLLRKNFGAEEAEGFRERNLTDTRYICKFFKNYVERYLELANDSESKRCVVLSGQLTAFLRARWGLAKIRSDSDRHHALDAVVVAACSHGMVKRLSDYSRRRELETVRDGFVNLETGEIVNPAVFDQLERHFPTPWNEFRHELETKLFTDDPVQLRAGIERMDTHSPDALDALKPLFVSRAPQRRNGGAAHKDTIYAQPERLKAQGGVTQKVSLASLTLADFGEPGNEDKPCKLIDPHRNEKLYAAIHERLEAHGGKGDKAFPANNPLRKPDRDGNPTGPVVRGVTKLIDKQSGIPIRGGLAKNDTMLRVDVFTKGGKFHLVPVYVHHRVKGLPDRAIVAFKDEAEWTLIDESFAFCFSLHSNDFIKVTQRSGEKIYGYYRSCHSGTAAINIALHDRYSFGEKTTSLSFSRKSPGRPIPNDKLGLIEGVGVKLAANIEKFHVDVLGNLYPAPPEKRRDLA

SEQ ID NO: 7901 - protein, 1054 aa, unidentified
  REGION 1..1054: note = Description of Unknown: Cas Enzyme sequence
MSTPSNVPYVLGLDLGVASIGWAVLDTDAKGRPTSIRAAGSHLFEAGVGGGSQSTPEMAMARGKEESKAAPRREARAMRRQTMRRARRKKKLLGALIRHGLLPEGDIRTPAAIDAYVKALDAALRATWCPPGSSHVEYQNMAYRLRAEAAQRPLDAHAVGRALYHLAQRRGFESNRKTPKRDDEDTSDFQNKLDDLGDAIRSHTTQTLGAYLASLDPDEKRLRGRWTHRSMYEQEFETIWDAQAGALGLDGGAKQDIHHAIFYQRPLKDQSHLVGRCSLVPGKKRAPIAMRIAQDFRVLERVNHLRIVHDDHSERPLSKDERDNLLAALRREEKLTMHQAKKAAGLPTKHVKFSIEAGGETKLVGHRTDAKLCKIFGDRWDEMSEQEKDTVVEDVRCVRLPDTLRRIGEVRWGLSREKAQELADVQLEEGHSAHCLRALRKLVARMDADGLAYSTARKDEYPASFQSVEPMDLLPPVDAWEKDLRNPAVSRALTELRKLVNAIIDRHGKPVRIHLELARDLKQSRKKRKTASDRMRTREKEREKAAQRIITQPGLGIQHPKRWQIEKVLLAEECNWRCPFTDRGFCMADLLGSTPQVDVEHIWPYSRSMDDSFLNKTLCYHEENRNRKRGHTPMEAYGPTPEQYEAILDRVRRFKGDHFAVREKLRRFTDALDEDFPLRHLQDTRYITTLARDFVSLLYGKDASAIVTPSGPLTAWLRRGWHLNSVLGFTDEKEREDHRHHAVDAIVIALATRSNIKRLSDAAERVEREGREKAFGTVDPPWDGFEHEVRSIIDGVVVSHRQSQRVRGPLHKDTIYSPKIDGKHRVRKELHKLTAKEVQSGKIVDTRALAAIQAKLAELAKTDPALADPAKAFKAPENAPLVPGPNGSKVRLRRVRIDTGDKPTRFGGAKGKGSARYAKNELNHHVAFYDQPLPGGGVERTAEVVPLHEAMRRHASGEPIVDRTPRGKKGEYAFAFSLAKNGYVWYRQKNSDEPVLCMVDGIADGDIELKRHTDGRGRPQRGKDRIRLRSKSIREGLFEKAHVTYLGEVRRAGG

SEQ ID NO: 7902 - protein, 1374 aa, unidentified
  REGION 1..1374: note = Description of Unknown: Cas Enzyme sequence
MKRILGLDLGTTSIGWAFVNEAENDKETSSIIRTGVRVIPLSTDEQQDFKKGNTITINADRTLKRGMRRNLQRFKQRRAAVIDILTKIGFIDEYTTLAEDKKGTHSAYELRAKAPLKKLTKVEFARVLLMINKKRGYKSSRKANNQEEGQLIDGMAVAKRLHNEKLTPGQLSYNLLEEGKKMLPDYYRSDLQNEFEEIWNFQKQFYPNSLTEKHKEALYGLNKKNTGQYFEKTIGTERAENKGKEKKLREYEWRVKALREQLPLEQIAYVLTEINNQINHSSGYLGAISDRSKELYFNNLTVGQFQFNQLKANPHALLKNQVFYRQDYIDEFDAIWKQQSKHYPELNETVRKELRDVSIFYQRRLKSQKGLINICEFEGLERSITIDGVVKKKFVGPRVAPKSSPVFQQAKVWQNINAIKLTNAKSKEVTVLDEDLRESLFEILNVSKGWTDKQFLSWLSKNSDLKGKDWKVNFNKLQGNRTQAALFLVYEKIAQQEGWDTLDFKNLDSSLVENLKICFRQMGIESDLFDINFELNGNDFSKQPIYSLWHLLYSYEDDSSVTGTESLIQKLQDNFGFKQEHALLLSKVTFQQDYGNLSVRALRKIYPFLEEGKMYDQACQLAGYNNSNSISSEENKNRKLQDRLEILKKNSLRNPVVEKILNQMINVINSILDDPEMGRPDEIRVELARELKKTAKQRKEMTQAIGKATSDHIAFREKIKKEFGLSYVSRKDLIKYKLYIELKSVGFKTLYSGTYIKPEELFTNKFDVEHIIPQSVLFDDSFSNKTLELRDVNLEKGNETAFDYCERKGWSEEFNLRVQDVFTQKGIRYGKLKNLLMPKNEIPEGFLNRDLGNSAYIAKKASVILQSITKKVSATSGSITAKLRSDWELINVLRELNWEKYNALGFMYYDYNKNGKALPRIKDWTKRNDHRHHAMDAITVAFTKPAFVQYLNNMNAKSEKGGEIYGIEKKYTYRNGEGGRKFVKPFENIREVAKNHLATILVSHKAKNKVVTLNKNKIKIKGKDNYKVKTELTPRGQLHKETIYGKSNSYEVKEEKINAKFDVKKIATVTKPAFRKALLERLEAFENDPKKAFSGKNSLAKNPIFIDGSEENVPDVVKTKTLQSQFTIRKEITPELKVDKIVDEGVKRILKERLKKFKGKPKEAFANLDDNPIWLNEKMGIKIKRATITAVSNAEPLHYAKDLNGNMLFDNEEKEIPVDYVSTGNNHHVAIYRDDKGNLQEEVVSFYEAVIRINSDQPVIKRNHEKGWKFQFTMKQNEMFVFPKDDFNPEEIDLLEIGNRGVISENLFRVQKISTKNYVFNHHLETEAVGADTFKEKKELAAITYQFIRTEKHLEGVVKVRLNHLGNIVHVGEY

SEQ ID NO: 7903 - protein, 1191 aa, unidentified
  REGION 1..1191: note = Description of Unknown: Cas Enzyme sequence
MKRILGLDIGVSSVGLAILNDDRGIKTIENLSVRIVPENPDFHGRFYSGNTASKNLARTEKRGIRRNNQRFKARRDKLHEILKENDMLPSEELFKLDAKELYGLRAKAVVERISMQELGRVLLLLNQRRGFLSNRKSISKEENSSEYKEKIATLEKDLNGKTIGQKLYEELCLTKNTFDVLLRERTYQRKTYIEEFDRVWDCQKQYYPNLTGGSNEDENKATLYDLIRNKTIYYQRPLKSQKGLVSECLFEKHHKSVSKSSPYFELFRIWQKINDLSWKTPDGEIHYPSKEQKEKLKNALWIGEGLNSNHKLTVTKIKSILGYSSRAKLYLNFTELDGSRTYSLLKKALVEAEIENPEHYLFFNLDSHDEKGGLFELWHITYSLPTEIEVVNTLTKRFHFKTEQATKIAKNVGYKSDYGNLSTRAIRKLLPHFEEGLAYSEACDIVGYDHSGYKTQVVLKEKLEPISKNSLRNPVVEQILNQVVNMVNLAMDKYGKFDEIRVELARELRNSAKTRQNISSANKRNKANNHKIRKELKEVHGFKLVNGRDVKRYILWEETNQNCLYCNNPISGTDMLTGNADLEHILPKSRSFTNAMSNFIISHRECNTEKGQQTAYDFIKSKGEDSFQQYVEKVNALYADGKGSITKSKFDNLMCKGEDIPSDFVERMKKDSQYISKEAVKMLKSVCPNVYTTTGQVTNFLREEWKLKHVLQELGFEKYKSLGQTVKKQIKQGEGNIKEIEIIEDWSKRDDHRHHAVDALICALTDQKIIFKLNNLNKIYQYERNALDSNELKNIEEYLEGKFSFKEFSDQRGNVFESPIQSLRKQTKKYLEDILISFKKENSKVLTKNINRARNSMTQITWVPRSKLHEDTVMGKARRIAEKKLKLNGKFSLNLIENIVNPNIKKRVEEHLEKYDNNPMLAFASKTLKKDPIDYEDSELKEVTVFEWINTKRVNLNENITSAQISKIADKAVKEVIEKRILQSGGKIKEAFKNLSETPIKLKNGMSVKTVTVYDDSKVRKVRDGYVKTGGNHHALIYKDSEGKYYNKVISFWDAVGIGLTNVDINGKPYPIIERKDDAELGAFQFSMQINDLFVFDLKHADPPQEENEIDFFNRKNRKLLSDKLFRLQKMSKSGSGRFLVDFRHHLETTVNRSDLALKNITWITISKNSDLGRLTKIRIDHLGEIIKVGE

SEQ ID NO: 7904 - protein, 1459 aa, unidentified
  REGION 1..1459: note = Description of Unknown: Cas Enzyme sequence
MKTQLGLDIGTNSIGWALVKTDFEKKTGELLATGSRIIPMDQRKSNDFGKGNPVSNTSQRTAYRGTRRLYQRKNLRRERLLRVLQILDYLPTHFSDSIDFVKRKGQFKPGHEVKISHVLNPDQNRYDFYFKSSFDEMIKCFEDKGHHDQVPADWTLYYLRTKALTQKVSKHELSWILLSFNQKRGYYQSRDEDLDAETKGKEFCELSVDKLIDTGEEVKGNPLYKVLFTNGWEYEKSIVKKSNWLGQTKEFIVTTKLLKDGTLKRSFKEVDSEADWAAIKAKKEDDLKNSNKTVGQYIFDRLLENPKQKIRGRYLQTIGRAFYKDELEQILSKQASFYPELCEKGGDLFINSCNELYPKNIAHQKNLANKNLKYLLIEDILFYQRPLKSKKGTIAGCQFERRKYKVEDPKTGVVKEVLSKVKVVSKSNPLFQEYRLWQFINNLKIYRKEQVINGRIQYDVDVTDLVLPTEQERVRVFDFLISKKDIDEKQLLNFLSKEGLIDKNEKTNKEWNYFWNYIGEKKKYPAGETRYNILSRLKKVKNVNAELFLTSDQLYKIWHILYSVKDPHEFNKALKSYAVKNELNIDEFVESFKKHPPYSADYGSLSYKALKKIVPLMRLGKYWSLDNISDGLKNRIEKILNAEEDPSIPVRVREKLTNYSSIDQFKGLPIFLCNYLIYGRHAEAELITKWDMPQDIENYLSEFKQHSLRNPIVETVILESLRVVKDIWIEYGMGKPNFFDEIHVELAREVKNSAEKRKKISSRNQENENTNHRIRLILKELQENDSTGTIRAYSPSQQEKLKLYEEGVFQNPDTNYTNLNETEVVKFRRNNDPTRSEIQKYRLWLEQGYISPYTGSVISLNKLFSNEYEIEHIIPRSRFYNNSLSNKVICESVVNKDKGNYTAYEYINKNGGSTVGGFKLLSLVDYESHCKKVFANNRAKINNLLSDGIPDDFISRQLNDTRYITKKVLNLMSNIVRKKDEKEFNSSNVLSFNGSIISDLRNSWGLNDVWNDLISPRFERMNQRSKSQDYYYWDEKINTYRCDVPDDLKKGFSKKRIDHRHHALDAIVIACADIRHRQYLTSLDDKGTKQLLRPKICYQDNNGRYTQNYIHPWKGFTVDVLNKLHKTLISFKKDTRVINKTNNKTWQWVQDDSRGSLKKKLVKQTQGDSWAVRKPLHIETVYGKVTRLSDDKKTVTSNRVFLSEIKKMTGLNKVLDQGTRKILLNHIKNYINAKGEPDFEKAFDENGVIKLNENIKELNGGKNHKPIYKVKQKETGSKFALGLSGNNSKKFVEAAKGTNLYFAVYVGNQKRAYETIPFYKLVEYQKQVANVKKSDRYPIPVNTELGEFLFFLSPNDLVFVPTDEEMDMPSIVDFSNLSKSQVYRIYVVVSFTRGELLCRPTHFSKVISKKEFNSNNKDERVQSIISDDIPDSKGKQVLIKSRCWKLNVNRIGKITSVEK

SEQ ID NO: 7905 - protein, 1452 aa, unidentified
  REGION 1..1452: note = Description of Unknown: Cas Enzyme sequence
MKKTLGLDLGTNSIGWALVESDFNKKEGSILGAGSRIIPMGQDVLGKFDAGVGISRTADRTHYRGVRRLYQRDNLRRDRLHRMLNLIGFLPEHYAAQIDFEKRLGQFKKEVKLNYKPSENGYQFIFMDSFHEMARAFKEKGYSGPIPFDWTIYYLRTKALRAKVSEQELAWIILNFNQKRGYYQLRGEEPDDTKNKQFVQLKVKELIDSGEEVKGNKLYDVLFENGWKYDRQITKTEDWINRTKEFIVTIKQLASGETKYSYKAVDSEKDWPAIKAKTEQDIENSEKTVGEFIYNTLLADPSSKIRGKLVKTIERKYYKSELEKILSNQSKYHSVLTSSEIHKRVVEHLYPKNIAHKNNISNKDLIYLIQEDIIFYQRPLKSKKSSISNCQFEKRYYKKKDDDGNIKSITEPIKAIPKSHPLYQEFRLWQFVRNLRIIDSEKEVTIKNKNAGDVTAEFLNTEDDYIAVFDFLNKRGAVEEKHIFDYLVKLGYITKEDKKLEKYKWNYIRDKKYPCNTTRNDIIKRLSKVKGVEVDLFLTKEKELALWHIIYSVRDKKDFEKAILTFAKKNRLDPDSFAEAFKKMPPYSNDYGTLSQKAISKLLELMRMGSYWSKEEISTKTLDRIHKIIDGEYDENIRKRVREKAMHLRSIEDFKGLPLWLSSYIVYDRHSEVGEVAKWKNPEDIEAFIESFRQHSLRNPIVEQVVLETLRVVKDIWRNYGDGKEGYFTNINLELGRELKNSADKRERISKRNQENENTNARIRELLSELLNSTTVEGDIRPYSPSHQEILKIYEEGIYQNPNVDYSKVSEDEIDKIRKKRSPSRSEVTRYKLWLEQGYISPYTGTMIPLSKLFTTDYEIEHIIPQSRYFDNSLSNKIICEADVNQDKGNMTSFEYLMKKGGDLVDGHQLLELDVYENHCQKYFKKNRTKLANLLSEDIPEGFINRQMNDSRYIAKYVKGLLSNIVRNEGEQEPTSKHLLPVSGAITAKLKQDWGLNDKWNELVAPRFKRLNDLTKSTDYGYYDKKIGAFRTTVPDELRRGFSKKRIDHRHHALDAIVLACTTREHINYLNSLNSEKENYALRSKLLKLNKNGDLTKYFKSPWKGFAPDVLKVLLRIVVSFKQNTRVINKTNNKTWQWVKEDGNLKKKLVKQTKGDNWAIRKSLHKETVSGQIEHTAAGKNKIATATRVPLESIANQKHIDKISDIGIQKILNRHLANYIDDKGKPQFDVAFSAEGIEDMNKNIVSLNGGKPHMPIKKVRQYEIGTKFAVGSSGNNSKKFVEAAKGTNLFFAVYWDKKKEKRVYQTVPLNEVIEHQKQVAGLPKEDRLAIQPNPLKGDFLFTLSPNDLVFVPTEVEVTNPRLFDFQNPTVEQVARIYKMVSCTGGECHFIPISTAKEIQKNENGTNSKSERIQTELMKSPIHDDKGKGVMIKERCWKLKLSRVGEITKAYLI

SEQ ID NO: 7906 - protein, 1018 aa, unidentified
  REGION 1..1018: note = Description of Unknown: Cas Enzyme sequence
MKKTLGLDLGTNSIGWALVQSGIEGQEGSILGAGSRIIPMGQDVLGKFDAGVGISRTADRTRYRSMRRLYQRNNLRRDRLHRVLNLIGYLPEHYANQIDFEKNLGQFKQEVKLNYKHTEEGHQFIFMDAFHEMVQDFQTQGRVDAIPFDWTIYYLRAKALREQIGKEELAWIILNFNQKRGYYQLRGEDLEEGKTKEFVQLKVRELVDTGEEVKGNKLYDVYFENGWKYDRQVTKTEDWTGRTKEFIVSKKVLASGDTKYSYKAVDSEKDWPAIKAKTEQDIERAGKTVGQYIYDALLKDSTTKVRGKLIKTIERKFYKDELRQILDSQALYHNSLTDAALYRDALEHLYPKNEAHRSNIKGKDLKYLLMEDIIFYQRPLKSKKSTIGTCQFETRSFEQKDKQGNKVVVKEPIKAIPHIIDHLVKLDKISKDEKKAKKYKWNYVSDKKYPCNTTRAEIVKRLLKVEKVDVQSYLTAEKELAIWHIVYSVTDKKEFEKALATFAKKNGLDVVSFVEAFKKIPPYGSDYGTLSSKAISKLLQLMRMGQYWDENKISQATKARIQKIIDGEYDENIRNRVRDKAMHLNALDQFRGLPLWLSSYIVYDRHSEVGHIAEWKTPEDIEVFLHNFKQHSLRNPIVEQVVLETLRVVKDIWLHYGNGKQGYFDKVHLELGRELKNSADKRERISKRNQQNENTNVRIRELLSELMNDTNVAGDVRPHSPSHQEILKIYEEGVYDNPNVNYSIVTEDEVDKIRKKKSPSKNDIVRYKLWLEQGYISPYTGAIIPLSKLFTTDYEIEHIIPQSRYFDNSLSNKVICEADVNQDKGSMTAYEYILRKAGGMVDGHQLLTVSTYEAHCQKYFKKNRTKLANLMSEEIPEGFINRQMNDSRYIAKYVKGLLSNIVREEGEQEPTSKNLLPVSGAITSKLRQDWGLNDKWNQLVAPRFKRLNELTDSQNFGYFDKSINTFRCTVPDELRRGFSKKRIDHRHHALDAIVLACTSREHVNYLNSLNSQRQNHSL

SEQ ID NO: 7907 - protein, 1378 aa, unidentified
  REGION 1..1378: note = Description of Unknown: Cas Enzyme sequence
MKKILGLDLGTASIGWALVNEAQNEKETSEIIKLGVRVNPLSVDERTDFEKGRPLSVNADRTLKRGARRNLQRFKLRRKNLIEILLRENLIKKQTLLTETGSASTFETLRFRAKAAKEKVELEAFARVLLAINKKRGYKSSRKAKNEEEGSLIDGMAVAKELYDRKMTPGQFVLELLEKGKKFIPDFYRSDLKDEFDTIWKYQEQFYPEVFTDEFYKTLEGQGQQNSRKRFLAIHGIYTAENKGKREAVKLQHYKWRVRALSSKLELSEVAYVLVEINNNLNNSSGYLGAISDRSKELFFNKETVGENLYNQIQKNPHTSLKNQVFYRQDYLDEFEKIWEVQSSFYPQLTKELKDEIRDVIIFYQRKLKSQKHLISACEFEYQHKVLPKSSPLFQEFKIWQVLNNVQFKNKETKELKILSHEDKEFLFEELNLKGNLKTDEVLKLMKLSKKLWSLNYKEGLEGNSTNKSLYNVYQTIAENEGYGFDWTKKPAKDIKDELKNIFPILGIKSDVLDFDSAIDGNKFDKQISYQLWHLLYATEDDIKFKEEDVLLYGNANTSLKKNLFNKYGFKKEYGAMLAGVSFSQDYGSLSAKAVKKILPYLKEGHEFSEACNLAGYRHSHHFTKEEAATRSLKDVLSLLPKNSLRNPVVEKILNQMINVINQIVETYGKPDEIRIELARELKKSAKERAETTTYVNAGKRLHEDIRKILNKDFGIKNASRNDIIRYKLYEELSANGYKTLYTDTYLPKELLFSSQIEIEHIIPKAKLFDDSFSNKTLAFSKPNKDKGDSTAFDFIENNYASDLENYKARVKALYADKGIGRAKYNKLLMKESELPDGFIERDLRNSQYIAKKAKQLLLEAFRTVNTTTGSITNKLREDWDLINVMKELSLPKYKALGLTEVQERKNGKKIEQIIDWTKRNDHRHHAMDALTVAFTTYNHVNYLNHLNASRNEKNNELFAVRNKITKMYGREEGRKKRRFVPPLPNFREEAKKHIESILISFKAKNKVVTKNKNKIKTKNGHKTFVQLTPRGQLHKETVYAGRKTVVVKIEKISVKFTLDKINQVTKPLYKDALLKRLKENNGDPKKAFGGKNSIVKNPILLNNGKALPKEVKTQYLETIYTIRKPINPDNFKDLKSLQKVQDLKVREILENRLNAFDGKAKEAFSDLDKKPIWLNEDAGIQIKRVAISGVSNVETLHHKKDHFGDDILKHNNKQIPADFVSTGNNHHVAIYIDKNGKLHDNVVSFYKAVARVNVGLPIINKNLNESLGWQFLFTMKQNEMFVFPNEDFNPKEIDLFDFENRLRISQNLFRVQKFSKVEYGNSAVRDYVFRHHLETKIEDNKALKNTTYIVCKSLPLFNDIVKIRLNHLGHIVHVGEY

SEQ ID NO: 7908 - protein, 1386 aa, unidentified
  REGION 1..1386: note = Description of Unknown: Cas Enzyme sequence
MKRILGLDLGTTSIGWAYVKEAENSQEQSEIIRLGVRVNPLTTDEKSNFEEGKSITTTADRTLKRHARRNLDRYQLRRDALKLLFQKEGWTTVNSRLYENGTSDLHETYALRAKGVDEKLSLEEFARVLMMINKKRGYKSSRKATNEDEGGELIDEMDIALHLEDNKITPGQYASQLLSGGKKKLPSFYKSDLEAEFDTIWGVHSKTYPDYLSDDFYSQIKGKSKTVTTKIFLAKYQIYTAKHTAKNKKAEAYEWRAAAATEVKDIDVLAFVLAEVNGNIYNSSGYLGAISDRSKVLITKKLTVGQYQYQQLLANKHNSLRNQIFYRKDYVDEFETLWKTQAKYHKLSDNLKKEIRDRIIFFQRPLKSQKGLISFCEFESKVVEIDSDGKKKKKTIGSRVAPRSSPLFQEFKIWQQLANVQLKTDQNEVLLLSSSDKRKIFELLCVNESMTGTEVLNHLFGDESNTYEINYAKLDGNKTNSALLSAYCQMVELATNDKKFGKLCRTEKKNKVRNFFKQEGISDDILDFDSSLKSHALVRQPSYQLWHLLYSYEGDNTRSGVDSLYNALKTKFGFERAFATFLINVALIQDYGQLSTKAIRKLLPFIKEDIYSDACDKAGYNHSNSLSKEENDKRVLLKELEILPKNALRNPVVEKILNQMIHVVNAVIASPAMGPPDEIRIELARELKQNAKERDKTTRAIADATKKHERIVKILQSEFDLKNPTRNDIIKYKLYEELSHNGYHTLYTNTYIKPHELYSRNVDIEHIIPKALNFDDSFSNKTLAIRKVNADKDKMTAIDFMTNTREEKEVEAYRQRVQAAYDGNHIKKAKYEKLLRPQTELKNGFIQRDLRETQYIARKAAQILTAVTRDVLATSGKVTDRLRDDWNLINVMKELNLPKYEALGLTYKEERKNNQFVTKIKDWTKRNDHRHHAMDALAIAFTTRSHIQYLNNLNAKSDKSGSIYGIEKKITIIDSKGKRRFLSPLENFREEAKKHLKAILVSRKAKNKVVTKNINKTKSKGKIHKQTTLTPRGQLHEETIYGSSFIYFTNQEKISAKFNRQKIETVANQLWKEAMIKRLNEFNNDPKLAFTGKNSLVKYPIKTNTGKSVPPIVKTVTLKQRFTKRVDIQNFFTDSQRSNGAKKKAIESINDRKIRNFLNNRLLAYENNFKLAFSNLEHNPIWVNKRRGIRLRRVTIQGVSNALPIHLKHDHKGEVLTGLEGKSIPSNFISTGNNHHVAIYQDSNGKLQEVVVSFLEAVTRGNLKQPIINRTFYSENGWKYLLNMKQNEYFIFPSLEFDPSEIDLLNPENSEVISPNLFRVQSLSCLKYGNSIIRDYVFRHHLDTSTTKNLLLKDLTYKPIKSLEPLSDIIKVRLNHIGEIVAVGDY

SEQ ID NO: 7909 - protein, 1073 aa, unidentified
  REGION 1..1073: note = Description of Unknown: Cas Enzyme sequence
MKRYILGLDMNANAIGWCAVKIDARNNPIGVIDAGVRILSPNEEAGRDPTTKASLAATRREARMQRRMQKRRKRRRNRLMHELVSSGLMPVDITERKNLEKLDPYWLRREALYSQLKKYEVGRALFHLGQRRGFKSNRIADGVSEGKGDNKEKGAIASGTEKLEKELEHSGFRTLGEYLAERHNTDKQGNNKQGKPIRFRPTVSGSTLQYDLYPTRKMVEDELNHIWNEQKKHYPQILTEELFEKIKKIIIDQRPLKPQFVGNCSIYPDEPRAPKAHPYFQRFRIMDDVSKLRLIIPGFGERHLDDIEFLNAVKLFMSNSSRVITFEKIRKALSINENFRFNFEREDRKGFETDNTARILGSKKAFGRQWRNLDIERQGEIIERLINEEDNDKLLVWLQTEFGLNEDTSKYVSRVRLPQGYASFSIKILKELIVVMENKRIKTKDPKTDRVFSRPLTYNEALNQLGHHHSNWSPNKLMDKLPYYGEVLQRHVIKKADAPNGSQESIGRVSNPTVHIAMNQLRLVINHLITEYGKPEIIAVELGRELKMNKKSKDALKQQQMKNKEQRDKNKKTLEELGIPETKDNLEKLRLYNEMPPDSRMCVYSGKPINISKLFTGEVEIDHILPRSKTLDNSFMNLVLCLRSENQYKANRPPEETWFDDDITQICSRAQNLFPKKAWRFQPGAMNRFDEQGGFLARHLKDTQYTSRLTATYLNFICPSIQTSPGRLTALVRKHWGLNSILSNNSTKNRNDHRHHALDAFVVACIDKRLVEGISKAASSSEERKLERFFCENDFPKLNSKVKSELEHILDSLIVSHRPDHGLSFKGHLPPKVTTGKLLDSLPYGKCNATIDDKEYNLQKRISLSELSDKMISRIKDKHIREMLLNDVGNLPSKEKKKIKNLLIEFGKRTGIRRVRVLDVLETKENVWTKNHTDSSQKTFSASYRKTDNHSIEIFQTLEGKWVGRGITVFDANLPDYKPQNTHPKYPNSRLVMRIHRGDLIECSFGGKLGVWKVIRLEPSANRIRLAMHNEAGSLDKRHNDEDDHFRFLIKSYSKLQEANAKYIRINPIGKHI

SEQ ID NO: 7910 - protein, 1022 aa, unidentified
  REGION 1..1022: note = Description of Unknown: Cas Enzyme sequence
  MOD_RES 1006: note = Any amino acid
MLRLGLDLGTNSIGWVLYQLDRNDPPEPCGFVDGGVLIFSDGRNPKNRQSNAAERRTKRGPRRNRDRMLRRRARVARLLHEANLLPSDDVQAASLRNLDPLRLRAESLDRPLEPYELGRVLLSFADRRGFKSNRKTDGGEDGKIRQEVRELRRRILQSGARTLGEYLWKRHKKGKTTRARLGNGLYPDRAMIQDELEAIQKAQSSNHPNLKRHDWDQIIDALMFQRALRPVDRGNCTLLPDEKRAHKAYPVFQHFRIWQDVLNIKVASPSEDGTRSLNENERNRIVEKLLTCKERTFDQLVADANLEEGTRINLESTAREKLEGDSTAVKLRSLKCFGKEWSRLTLERQQVVLERLLEEDDYVELESWLRDEFSLSEKAAEAVAGLNFVQGTSHLSKKAINKLLPHMKTGFRYDEAVVRAQLGHHSDHRGDGRSDSLPYYGSVLERHVVGRRQEGRNDAEKYGRVANPTVHIALGQVRRLFNAITEQHGKPDQVIVELARDLKQSLAERSSSEKRQKLGLERNERLRDLARQANVPEPSSGDLRKLRLWDEQGKVNARICPFTGQSLSVELVLSAATEIEHLLPFSRSLDDSMNNKVVVMRDANREKGNRTPFEAWGHDPVRWEKIRSNVKHLPIAKQWRFDEDAMEKWEGKVDFLDRQLTDNRYLSRMVKEYLEYAVNPNNIWVTPGRMTSMVRHRLGLNNILNDENEGTKNRADHRHHLIDAAVIGITSRSQLQKVARAMGKGEDGQRIIEKFDPPWDGYRSDLEALVERCVVWHRPDHFKFRAGYTTGSLHNETAYGIIEGPDTKGIMTLVETKTLDAINLKRLDDVRDLNLRERLKGLYAEIGDANSGAGNVWKVFVSEAERRLGVRRVRVLVRLGSGSLAFIFDKAGQPYKAYKTDGNAFMDIWLLPNGKTKGETISRFVAHKPNARSEVKANYPTARKLMRLHINDMVAIGNGEERRIYRVQKLAGSTVVAVDHVAAGKASELLPLRKSAGQILQSGLRXVSVDVLGRVKDGGPFH

SEQ ID NO: 7911 - protein, 1364 aa, unidentified
  REGION 1..1364: note = Description of Unknown: Cas Enzyme sequence
MSKEKKAYYLGLDIGTDSVGYAVTNESYDLMKFRGEPVWGTTTFEGASTAEVRRMSRGARRRNERRKQRTQLLAEIFAPEICAIDPNFFIRRKESALFAEDSRHGVKIFDGGMSDKEYHKRYPTIHHLIFDLMNTEEPRDIRLVFMACSWLLENRGHFLFDSSMEEKQDFAVAYKEFEEHLFQEYSCGLPWSEDISADIIAEIMQSEAGVTRKQSMFTEKVFGGKKPAKKADEEFPLSRDAMVKLLSGGKAAPKDIFPNETYADVESVSLGIDQDNFERILEELGDDAALLNLMRDMYDCALLRAILKGFDSISEAKIAVYKQHAKDLKWLKYFIRKYKKSEYNKVFRKAEAENYVAYSYNTKNCKDEDVKKLKQKADKEVFSKFLKKIVENIQVEESDEEKYNNMLERLDSFTFLPKQKDSDNRVIPQQLYRRELAEILKHAKAYMPMLEEKDEDGISNEAKILSIFDFKIPYFVGPLNPQSPFAWLERKAGKIYPWNFEKMVDFDKSEQQFIRRMTNTCTYLPGEDVLPACSLLYSRFAVLNELNNLKINQNSIPVEVKQEIYNNLIKPAQGKISKKKIENYLQSRGYMNQGDEISGIDITMTSSLKSYKSFERLISSGVLTEEQVEDIINHAAYSEDKNRMARWLKLNFPSLSENERKYILRLKLKGFGRLSKKFLTDIMGCEKSGTGEALSIIEALWETNENHNQLLSEKYRFKEQIEAFASEYYSNPENKKTLSERLSDMYISNAVKRPIMRALDITSDVVKAMGCAPQKIFVEMARGATPDQKGKRSVSRQNQIIELYKKIKDEEVAQLKKELEAMGEKADNRLQSDSLFLYYMQLGKCMYTGEPLKLSELSSKIYDIDHIYPQSKVKDDSILNNKVLVLSTANSAKKDIYPIEESIRKKMFGFWKHLKDNSLITDEKFRRLTRSSGFSEDELRGFINRQLVETRQSTKAVAQLLKEKYPESELVYVKAGMVSEFRSEFDMLKCRSLNDLHHAKDAYLTIPVGNVYHEMFTKRWFDVRSKYNVSVKSVFGNVQEPRGKLVWRGKTDIAKAKKTMAKNAVHLTRYSFCKSSGQNGGLFDQQAIKAKAGLVPKKKGLPSEKYGGYDNPTASFYLMVSYTMGKKKDIIFAPVELRFRDRVLNDREYAVEYLTEVISEINGGKKITDVNILLNGRIIKINTVLSLDGMLVTIRGKSNRGANVIVSANLPLTMSLEDERYIKRLEAFSEKKKNKKFNIVLNEEYDHINKEENLRLFGIFKDKLKNSVFAKCPGNIFAALEAGEERFASLDTEEQISCLMNIVAWFNGAPSCDLVSIGGKKGAGGKIINSRLSGLKKRYNDIRIVDMSASGLFVSRSENLLNLL

SEQ ID NO: 7912 - protein, 1377 aa, unidentified
  REGION 1..1377: note = Description of Unknown: Cas Enzyme sequence
MKNQYGDYYLGLDIGTDSLGWAVTDENYTPLKFNRKTMMGIHLFESGKTALERRTFRSARRRKGRKDYRLLLLREIFRKEIEKVDSDFFERLSESIYHREDSKLLKGKHPKKKKYSLFDDDDFNDVDYHNTYKTIYHLRYALIKESGPFDVRLVYLALNHILKHRGHFLFEGDFGSGDILSFEDLFCEMIKSLEFCGISFPEFDESDKLKIEEILKNQSINLREKNSVLVKILKATIPQQKEAIKLLVGSKAKLNALFDREEEFSSEINSLSLKEDLEEKESLLKVELYDFELEAFTAIKSLYDWSILQNILRDSEYLSEAKVAVYEEHKRDLALLRRLVNTYQRKNYKKFFEEDNVEHNYVNYIGRYKGKNNKSVCSQEDFCKFLRKNLSELIEKDDLLYLSESETELLNKINNNTALPKQKSGDNSKIPNQLHKKELDKILENASKYLPFLKEKDSDGYTATEKIKSLMTYRVPYYVGPLNRHSEFSWFERVKGAEEEKIYPWSFDEVVDKKKSAAKFIENLVSSCTYLPAAKVLPKESLLYSKFDILNKLNVLKINGMLLEPEAKKEFFEHFYLSDGRSSKNKVTEREIKQYLISKGDFVKPNEISVSGIDKEIVGQMKAYHDFKRIFDGKLPDDEIVEDIIERITVYGKSKDLLRDSLAESYSFLSDEQIKEITRLNYTGYGRLSKEFLTEIFHIDKETGEALSIIDALESRQDNLQQLLSYAYNFAESIEKFNSEAASDKKGFSYDDIKELYISPAVKRAVWRTVVLVKEIVKITGKAPKKIFVETARDSTGLQRGVRTRSRKEQLEELYKNAKADSLELNETIKDFQKSLKETDNNRLNKRTLFLYYLQMGRCIYTGEPINLSDLYSEKTKRYDIDHIIPRSKVKDDSLDNLVLSKSSFNQDTKKDLYPIPKDAVTQKARDLWQVLKANKMMSQEKYDRLTRSRPLSEDELAGFINRQLVETRQSSKAVIEVFKKIYPDSRVVYSKAGNVAEFRQKFNITKNRIVNDFHHAKDAYLNIVVGNVYDTKFTSNPLNFIKNINKSGNSYSMNKIFDFDVSRGGYTAWEASDGKSISKVKEVLSKNDIRFTRYATTETGEFFDQNPLKKEDKPKEESSLVPIKTKDERFHDTSRYGGYNKPGVAYYFLCEHKQGKKLKRSFNAVTRLNISKVEKPGGLKAYAESILGLKEPRIIIPKIKINSLLSIDGFRGHISGRTGNNFTIKKAVPLIISDDYYNYAKKIENAVGAKEDSDEILKEYYKITSEENLNFYDELSRKLRVTIYRKKLSDQLKTLEEGREIFINLSLREQCSTLNNILILFACRVSMSDLKAIGGKGQVGRLTVSWNIDNADSVELIHQSITGLFEQVIDLKDPKL

SEQ ID NO: 7913 - protein, 1339 aa, unidentified
  REGION 1..1339: note = Description of Unknown: Cas Enzyme sequence
VLKPRFVWEPSGATTYCAQSISPCRITVFLAQNPGPRLQPRRLDRYLKFVEAKAMIRPVTIWAFDLGKGSIGEAVRDVQTNQFLHTAALLLPPDLAQRGPASQSGTPASRYRAWKVRHAHRERERWLDTVWQAAGLEVLQTRQTALVCALPPKRDDTGQPLFDQGHWALVGRADYRLEREFAPALGEKTKDGAPSDAAGANLCYTSCLLRIKLLRWKPGDPPLEEWQVYKALRSAMQKRGYGRVPWAVKEARAQGKTPEELEAEEQKQLEQADPRYREAAGKWPEFKRAVSAEFHFPCYYDAFHMGLWSPDQPDQLRLRPDHRASSTRNVRFDRADVRKELIALGNNAAAMLPQLQQAFERWQRAGWTFRHPVTGEALTKPVHARTFGEFLCDGPAGQPDETSFEAFLNQRRQAGIRIGTFEEWMAALGQKTPRFDNRILAPCVLIPRYHACKVDARLEKDRNGRLTGKLVPDSLLASEVTFLLKLKNLLVADPVKGQRKLTVQEVRDIFAFAQRRLKTLPLFTPEGEPAKEWPRKVANCFAINPSDWPKIAAEAECLKGLARLTVSDNGAPRPRTREEAEALLHAVAGGRRAAQTALPAHLLPLVKRAAAAWKQAKQQAGEIMLRPLPGHEEVKAPRTSGRSAYSRVALRILKELILSGDAPSAFHARLVRREPDLLQRLGPAPGQPLAIFDDSTASNEAQRKQHDAENRKRGLLVSELNFLLQMRKDDGSPDSWENLFIPAQTLEALQQRHTEDGRLDADAAVRELLGTIKDPVVRHRLGIFDERLRKLRFGDAREGLPGFGVPEAIVLEFVREDFMGEQAKRELQTFQKRREQARAEAEAEAAKLGLGSRSRALRYELFKAQGGICLYTGRPLSETQLDQYEIDHIVPRSLGGPDAMVNYVLTFPEVNSAKEKGKLTPYALLHGTNGWDAYIERVKARAATLRNKKVQLLTREDAPELVERYTALAETAWISRLAQTIVNLRFGWRNGVDYSGPQPVKRVIVVSGGLTARVRRKYGLDKLLYGKDISPQVLAKKVKNRDDDRHHALDAMVMTFIPNWARDPHKEGFFRFPAAFRDANGHEDYQQIQSLFARQLEKIVPRHLAYEPCALADTIYGRRLDKGEPVIVQRAPVRDLAYKQEQQRPVFNLTYAKDQIAHVRDPRLRRVLEAFVATGPDQAAWDNFCQSLAAGTCPELPGRKVLKVTLNRDEEPEEFKDLSKDGCGAFRTRKGEHRGQFVYLDARGRVRVRPVRPFESLVAVKAEVERLAAGGRVVGFFQSMCLVELDQPVTHGNFVLQPGTYRLNTIKKDGRAQVTRPSGEESPQINLAKLLAAGFRRKA

SEQ ID NO: 7914 - protein, 960 aa, unidentified
  REGION 1..960: note = Description of Unknown: Cas Enzyme sequence
  MOD_RES 792: note = Any amino acid
  MOD_RES 798: note = Any amino acid
  MOD_RES 800: note = Any amino acid
  MOD_RES 807..808: note = Any amino acid
  MOD_RES 821: note = Any amino acid
  MOD_RES 839: note = Any amino acid
  MOD_RES 850: note = Any amino acid
  MOD_RES 855: note = Any amino acid
  MOD_RES 933: note = Any amino acid
  MOD_RES 935: note = Any amino acid
  MOD_RES 946: note = Any amino acid
MARIWGFDLGTSSVGFAVIDYDEGSSQGKLVRVGVRVFPEGVDEKKKEPRNAVRRAKRLARRQFRRRRWRKRHMRELLVDAGLLPASERKPRSHQGRDDFFLNSDGADPYRLRARAVNERIEPFEIGRVLFHLCKHRGFTGSRKFDTSRADDRSRASEERQIRQEIEDLRRQLAGRTLGEYLHGLPPTEAKRRRHIHRDMVQDEFRRIWDKQRTFYPDLLTDDLRERIWHTLFAQRPTFFSLKTIGKCELEPDERRCLKGDWHAQRFVMLQMLNNLRFLGDRQLSAEQRERLLNELEAKASLTFDQIRKKLGLGDERFNFESGGEKRIIGNATECELAKVFGRQWETLPARDRIRAEIAERLWHLEYRQVGDKRAEIRTAAQWQAERDAFVKSAMRDWSITAEQAESLSKLDLPAGYVMHSKRAILKMLPYLEQGLRYDEAKDRAYPKPPPARPPAEKLSEPDPNRVRNPTVIRTLGELQKVVNNLLRVDGRPDLIRIELARDLKLPRTRRLKLMAEQRQNEKRRKDARDELARRGLPVTHENVEKYLLANEQGWRCPYSGKQISCDGLFQSGLFEVDHILPRSRSFEDSFANKVVCHRDANKEKGNRTPFEAWGADPERWAAIEHILSDIQKHAGFPISKVDRIKRKEFPALGGEDFTNRQLVDSAYIARMAVDYLSELGVKVEPTNGRVTAHLRRLWGLETILSDAPEGKNRDDHRHHAVDAIAVALTTPAFVKRLSDYYGTDRTPDRERFRVPWDSLRADAERAVAEIVVSHRAQRKVSGALHDENPWXDTGEEXEXNGIRYRXXSQRKSSGQRAVEXIQQKLMRPVGPDRAAWVXTNSNHHILIYXDEAGXLRYETVSMFDAAMRISKRQPIVDRSRPQAAPFRSLCIGDMIERTVDGRKTYWTVKKLSANGQITIQPHNFARDLGRTXPXVTTLVREGARXVVVDPIGRVSYAND

SEQ ID NO: 7915 - protein, 1101 aa, unidentified
  REGION 1..1101: note = Description of Unknown: Cas Enzyme sequence
RYHGVDARGQYNTGPVPDKTFTAAVPSTPRVRQGGHEAGPLPKQARQEPVSLRYKCTGYTPEGEHDMSKTETVWAFDLGKGSMGEAVRQGNQFLHKASLLIPAEFAETRTARDRRRMWRTRQAHKARERWLDEVMTAAGIEVLKGRQVGKVDGKWVETAKGDPRLEREFAAPGDSTCYTSCLLRIKLLRGEKLEPWQIYKALHSAIQRRGYDPDIPWKTREQRQGKKSEDEEGKTLTRMQEFEKQLLAMSPDHPEYRWPCYFDAWKMGLWSPAKPDELKERLDFNAQTTRDQIVPRKVVEAEVRALVEAASQFYPSLKGKADYLLYGPPQRAYASYYVEQRKQHGLREGGVNDWQGVVGQKIPRFDNRIIGKCVLIPRLNVCKIRKGDDGKLHPQSRIVAETVFLMKLKNMRLQTAKGVTGLTAQQISKIFADPKRKKYGLTKTQWKQWCIKFGGMPLPGNQEEVEEPHFGGRSRFCRPALEIVKRLILSGDTPPMAYEKEVARLNGNTDPLKGLVKDDLKFLLQMGPTWEGIYIPNQKLDALTRSTEDANEAIRQLIGAQNDPIVRHRLTLFADRLNLLAEKHGTPDCVVLEFVREDFMGRKAKQEYLKFQRERAKERSEAREEAAKAGATEGAAGLKMELYKAQGGICLYTGEALSVTSLDEYVIDHIVPRAKGGPDSVMNYVLTTRRANDDKLDRTPYEWLSQTPGWDAYVERVKERAVTLRNKKVSLLTRPDADTLVDKYTALAETAWISKLAQTIISLRFGWPGGIANGERKIIVVSGGLTGRIRRKYKLNSLLNPDAKSEEEAEVKNRNDDRHHALDAMVISFIPNWARDAKKTGFFRFPDGIHRELFAKEIADVIPLNVCFEKPALAETIYGARNDHGAKVIVQRTALLSLAMKPTTPGKTTFDLKYAGKQAQSVRDPIIQKRLLEFIATNPDEATWRKFCAELHIKRKDGTAGPRVEYVTVTVGEPTEYKDMSKDGTGAYRKALKGHKGQFVFVDSKGKFKVRPVYAFESAQKVGQELTQKFGQNAIKGFFQSGCLVELTAPVPHSFTPLVPGQYKLNTIFTDGRAKLTDSTGKQSLPISLEKLFSAGFKRAR

SEQ ID NO: 7916 - protein, 1125 aa, unidentified
  REGION 1..1125: note = Description of Unknown: Cas Enzyme sequence
MSTTYTIGLDIGIASVGWCAFGETHILDLGVRAFDKAETAKEGESLNLARRSARLMRRRLFRRAWRLKKLARLLKSEGLIADAKQFKPERPFSTSLWQLRVDGLDRRLNDEEWARVIYHLCKRRGFHWISRAEARQADGDSTSEGGKVKQGLAGTAKLMADKGYRSAAEMVLSEFPEAQRNKQGEYRKALSRELLAKELALLFAKQREFGNSHSQCALETAILGNGDQKSGLLWQQKPALAGADLLKMLGTCTFEKTEYRAPKASFTAERHVWLTRLNNLRIVTDGITRPLTEQERQLALPLPYRQAGEFTYKQLGGALTKAGLLEPGSFKFTGLAYPTEAQKAEGKAKANDPESATLVKIPAWHELRQTLTKAGLTDEWEKISGTALCGQPELFDKIAWVLSVYKDDDEVRAELAKLPLPNPEALTDALLNIRFDKFHALSLKSLRALLPHMEKGLRYDEACVQAGYHHSQSHKVGEGEHKYLPPLYDGRDKNGRMIFAEDADIPRNPVVLRSLNQARKVVNAIIRRYGSPTAVHIEMARDLSRPFDERNKIKKDQDEYQSRNQRDREQFIELFGHSPKGLEFEKWRLYREQNGQCAYSQNPLAASGNVADIFLDGSTEIDHALPYSRSFDDSKNNKVLVLTRENRDKGNRTPYEYLGGVENSERWQHYVAFVEANKAYRLAKRTRLLRKDFSAKEAEEFRARNLNDTRYICKFFKNYVEQHLKLAEGSEAKRCVVLSGQLTNFLRARWGLLKVRSDSDRHHALDAAVVAACSHSMVQRLSNYSRTRELEQVRDGFVDIETGVIVNPAMHQQLREHFPDPWPYFRHELEARLKIDSPELLREEMARLGSYTEEELAALKPLFVSRAPQRRNGGAAHKDTIYGQSEKLKKNGSVTQKVVLANLSLSDLGEEDDERNPCKLVDENRNKKLYAAIRKRLKDHGGKGDKAFPATNPLRKPDKEGNPTGPIVRTVTKVIDKLSGIPVRGGIAKNDTMLRVDVFTKAGKFHLVPVYVHNRVTGLPNRAIVAFKDEDEWTLIDEGFDWCFSLYPNDLVQVNLKSEWYQGYYAGSDRATGAIGLWAHDRSANVGKDGLMRIGVKTALSVEKFHVDVLGNIYPATPEQRRGLA

SEQ ID NO: 7917 - protein, 1526 aa, unidentified
  REGION 1..1526: note = Description of Unknown: Cas Enzyme sequence
MKKILGLDLGTNSIGWALVDQDFEKYNGKILGMGSRIIPMTQDVLDKFGAGKPTKTQTAERTDYRSARRLHQRHLLRRERLHRVLNILGFLPEHYASQIDFEKRLGQFLEGTEPKLAYSNKDFIFKKSFEEMLVDFKQYQPELLNRKNKKGENAKIPYDWTIYYLRKKALSQKIEKEELAWLILNFNQKRGYYQLRGENGEDATKTAKTRKYFDRQIIKDITDTNEVYKGLKVLAVELKNGNKGKIFKKEIPKWIGLEKNIIATVDIDKERNDKYDENGLLSQRFSIPTDEEWESEWKLIKLKTEKDLKDSGKTVGTYIYDKLLQNPNQKIKGKFVRTIERKFYKEELKAILEKQIELQPELFSDDLYNDCVRELYRNNEAQQMALIKRDFVHLFLDDIIFYQRPLKSKKSSIGNCSLEFRPTKDKKGNLVVDKDGKAVLKPLKAISKSNPYYQEFRVWQWLYNLKIYKKEDDSDVTNEFINKVEDVESLFEFLMSQKEVDHKAVLKHLLATQGLKGKALNTEVAKYRWNYVYDSEKDKSKKYPMNETGYEIRRRLKKVEDVPSDFLTREIEQHLWHIIYSVTDKIEFEKALKSFANKYGLNENSFVENYKKFKPFDSDFGRYSEKAIKKLLPLMRIGKYWNWNSIDNKTQARIDKIITGEYDEEIKDRVREKAINLTEENHFQGLQLWLAQYIVYGRHSEANVAGKWNSVDDLEKYLNEFKQHSLRNPIVEQVVTETLRVVKDIWKQYGNGAKDYFDEIHIELGREMKNPKDERERLTKIVSENENTNLRIKTILTELLNDSKIENVRPYSLTQQEVLKIYEDGVLNSGIEVPGYVKETIKKFNESDPKKRPSLAEINRYKLWLDQKYRSPYTGEVIPLTKLFTSEYEIEHIIPKSRYFDDSFSNKVICEASVNKLKDNQLGMEFIRNHHGEKVECSQGKTVEIFSESAYKNFLQKHYSQGKSRSKRNKLLMEEIPDKMIKRQLNDTRYISKFISNILSNIVRADKDDDGINSKNIIPVNGKITGKLKQDWGLNDVWNSLVLPRFERMNQLTNSTDFTTKNTNGKTIPTVPLKLSKGFRKKRIDHRHHALDALIIACATRNHVQYLNSENAKSQKFHLQRKLARKLRRFVSVEISKMKKNDKGVWVKCEEKINKEVPKDFIKPWNTITEDARRQLEKVVVSFKQNLRVINKTTNKYESYKDENGNLRIGKDGKPKKDIISQTKGDSWAIRKPLHKETVYGNVELPRIKVPMDKILTATRQGNDLVSIFKNVTTKDKAESIIKKITDSGIQKILTNYLESNDDDPRLAFSPEGIEDMNKNISQYNGGKTHQPVYKVRIFKETSEQFQLGQTRNKRNKYVTTAQGTNLFFAIYQDENGKRSFETIPLNIVIERQKQGLSSVPETNERDETLLFYLSPNDLVYVPTEEEKINIDGIDFGNLRKEQINRIYKFTDGSGKIANFIPSNIAKVLFNLNKEKQKKIKINFPIQNEIGVGSRGSKNERAITGEQIKSVCIKLKVDRLGNISRA

SEQ ID NO: 7918 - protein, 1444 aa, unidentified
  REGION 1..1444: note = Description of Unknown: Cas Enzyme sequence
MTKKLGIDLGSSSLGWFIRENDQIINNGVVTFKTGMVKGQGGYSSPTRDRREARSKRRLIQARKYRKWELLKILIKYGYVPLKKDELEIWSKYRKGKSRKFPESETFLKWLACDFTYLEGGVKYKNPYELRVEAVDFKLSKHEIGRVLYHIVQRRGYKDIGESNKETETQKARREDTGFGKAMVENKIIAKAIKFEFLDKGERARNNYPFRAEYEDELLAICKAQGFDVTRNEKNEYRDDFVKQIRKAIIWQRPLRSQKGNIGKCTLEPTKNRCPASHPVFDIFRAWSYINTIKTVTYVDDKKYIKEPIPLDYKKLLLKEVFLKKDKNFKFDVIKKYLDKQFKEQKEYNYLNKSTGKYDSTVAGMPVCHGMVRLFGDVISNELDKIHTYTIGSKGHKVFKGYSIYDLWHIIYEFENDYLENFAINKLDIHNESKKTKKGINVFNPVVKFKQSSFSTSYADLSLKAMCKIIPFLQEGFLYNEAVLLAKIPDLYKDWENNKELIYETLENAKAKYAYQKQIVNISNNLIDKYKALEFEDQYAYKDYSYLLKKKNFQEINAACISYYGEKTWRDLERKNEIINDVTNNYQAFFRDSESRYIDIPTLTSILEKEFNDHNIDVRKLYHHSDRKNLYPQPVYSKKYAKDLLALPFIDSIKNPMFNKSMSILRKLINELIIKGDIDEYTEVIIEVARELNDNNKRAAIERYQNERKNIREQYRQFIMEFKERNNQFSNLNVEENIPVFELWAEQTFDKTFDEKGHIIDNIPLSEIRKEKDAIKRYELWSEQKGQCMYTGKMISISQLFTPEIEIEHTIPRSLLPDNTMANQTVCYSRYNSDIKNNRIPTACPNYEDNKEFGTAIKPRLEKWEKIRDNFKKLYEDNRTKPFGNENEEKKNRRIQEKHYFRMHYEYWKDKVGRFTATEIKDSWVRRQLTDTQMVSTYAREFLKTYFNKVVVQKGLTTAGFRKIYGFQSEDETKNRNRHTHHCIDAAVLTLIPTNSSKRLKLINELYKSQENNQKIKRKLPDNFPGFNAQKLIRFIDNNTLIINSFKDKITDQTYRNVRKRGKLQYLTKKGKYVLDKNGNKIQLKAKGVTIRGKLFKDTFLGKKRNIVFEENNKPLRKDDNSFVYKTGKEEFTFIKRVPIENAKIDDIVDPQIKELIIRQKQKGVGIREMKDFQGNTIRHIRVKTKAGKKVKNRINYKSRHDYKNAYYSEAGKIPYAIFLTHSDGEIVDRKMIPVAIHEVAQVYKDIHKFDVSYYLDKFHPKLKKYSDVKLLKLGQKVFVLKEDGEFGKRKDIDFQRKRMYVITKFKYDGSKIMLKYHLEALPDPKIDSRVKEIKSSILDEIEKKLNIAPISEDLSIENGNDRRKDYKKRKVDFNKRLEAIEEKTNKEIAKSYREKIEAYKTESSQIIKEGETPILGLSRKNWNFLFEDYDFEIDITGKVDWLV

SEQ ID NO: 7919 - protein, 1183 aa, unidentified
  REGION 1..1183: note = Description of Unknown: Cas Enzyme sequence
MSKNKDFKKVLGLDIGSNSIGFSLLELLEKNNEIIFNELTSNSIVFSEPNNATDRREARSSRRRNERKSARNKKTRNIFLKYNIASDDFITDTSNYLNSLKVTDKDVYNLREKAVLGTHLTKDEFIFCTYSILTNRGYSNMFSISNEDGIINEAVSKNRKEYETNNFLLPSNILTLQRKNLENQYQNIPIRNKRDNYSNSLDRDMHIEEFKKVVLSQRNNKKIFDSSLDCENFIEEITDESVVNTPFYQRALKSFESMVEYCSFYDEFNPKGSQKRVPLSNVKNIELTLRQSIDNYTCVDKNGETKLFTADEKEKIIDFWLNTPNADKINNKNIFKNAGFKEFKIHTKDDKELLIINIQAYRNIITILNDYEIDYINKHNDFYNQILLELHYFKNNSSRVVHIKSLIEKHNLNLDDEFVQKIALLNNMDGFASFSLKFINEVLDVMKKKGKTHHESLESLGYYGKYLNMPTYDYLPPLEPTKADIAWLQKNVPYFKTKHLFYQPMMSPKVKRVISILRKLINEIIARYGRIDEIRIETAKEMNSKTEKEQIDKNQSKDRAKNSEALKFLKVKNLVTSKKNIEVAKLWKEQGGKCLYSGGNITEDEAFNEEVTEVEHFIPRSVIWINSYKNKILVKKKYNQNKGSKHPVEYLKSVGEWENFKGRVNDAFIAPNKKNWLTKEEIISSVMKKEHWQDSYLNDTRSATRAIQKYLNHYLYPKDNMYGKSEKRAVFSVSGRAISELKYIWGISGIMPKNEEGKKDRDTNYHHTLDAFTVALCSSGATNALHNHFKKNENKFKTKALKDKLTANIPKSSEGINVVEHLKNLVQKYESNKLYVCPFNKRKTNMKGFKDGNLKLYVTKDAKDETKEILAEMEKVSIDTSILIKIVGGFPKPRSDDEVRKEIKAIQERLNTQKQKKIIRAIEIYADKLLEFRRKIKNIDDEINKLKKTMKNTKQYKEFNDVINKNIKPFNEKKKLLAKQQQELKCSFSIKQGKKQIVKSLKLYKRKIEESKADAIVYPHRKFNKIERLSVKNFQQALQRKEPFVTKMNESTLNVQLFLTKSRGQAVGLNYFSSLANAIATKSNERYKDEINIETNYMTLYKNELIKVVNLKDATTKYYIFNGGGNISGSNNKIVIKNININTFTKVNRKGVKSTIQEDSISPSKKIIVSKVKIDFFGNIIEV

SEQ ID NO: 7920 - protein, 1094 aa, unidentified
  REGION 1..1094: note = Description of Unknown: Cas Enzyme sequence
VSKKYILGLDVGVTSVGWGIIDENNNIINAGVRLFEEGKTKSNIDRRNFRGGRRIKARRKNRINDMKDLLVEYKIIPKNKYVSKINPYFARKKGLTSVLDNDELASALLHLAKRRGSSLETIDDEGKVLTLLKKHEEKLKEKYVVDLQIERLKEGKVRNNENIYKTKDYLKELEKIFSNQNLPNDFKEKATSIISRRRHFSQGPGSPKSPTPYGRWRVVDKELKESIIESFSNEEKKLYGKKSFEVKYDKVRYKVHQNKTITNKKPYNLIELMRGKCSVYPDEFRAPQKAFSATLHNLLNDLNNIRITNEENRRLTKEEKLKAINVIKTEGRFKPNGVRGLLKLYGYTEDDVTGLRIDSNQKPLITEFKEYRELLLLFSKYNKELPDKLADEIAEILTKTQVIEGREEDLIKIIDNENLIKELALLKDYSGYHSFSLKAIYALNKEMIEESLNQQEILSTTMKREEKQISKLRFDDTLILSSVARRAHREAIKVVNELINEFGNFKRIVIETTRSKNEDDEKNKIREKNKYFENQKKEAQKLLEEAGYSDYKNSNQVNLKLRLYKEQNCKCAYSGVTIDLHKLIKDPLAYEIDHILPRSVTQDNSLNNKVLVLKEVNQAKGNRTPFAYFQSGDVKPQYPINNYNLYKESVLGNVNYKKNAKKRGNLLFEEDITKFDMLKQFTNRNLVDTSYAARSLMSTLKNYFSSNNINTSVLTIRGKQTDLFRNRAKSLWYQEHRNKDESLNPFNKDRDIYYHHAVDALIIAGLSNQKTLNYLWNMKKDDENIFVYNKKTGEISAIDPTEDSKLIKFLKDIGNLSSDDFRYSWKIDTKINRKFSDRTIYSTRVIDNETYVINKHSNIYEMKSDYLKEWLTNPEKYEKLFIYHHDRKSFNKIVQAYEQYKHETYPLRKYMEEHGKIKKGPKGPEITSLRYRWKRQGMHIDISNKYNSKNKVILLEISSYRTDIYRNKNGLYKFVTIRYADFFKDSQGYYIDKELYKSKLQDKKIDKNYEFMFSLHRNEILSLKEKDKEKRYYRFTATNNDEKNVCEVKSIDRKDEKRQVFITIGQKTLLIEKFAVSPAGRISKIEKETLQLVR

SEQ ID NO: 7921 - protein, 1099 aa, unidentified
  REGION 1..1099: note = Description of Unknown: Cas Enzyme sequence
GKMKYIIGLDLGINNVGWSIINQETNEIEDYGVVRYQESSDAQERRRLRAARRLRNRRLHRVERLALLFKENGIPTQRTIEPELLLKRTKGLKEEIFVQDIINIIYYFAVHRGYIPFDDEKLDREVVNLEDGQFPCEYIFSEYKKNGKYRNSEKLIKCSDNIREIKKLLETQRKYHPKFTIELTDKIIEIITSKRKFYEGPGGARINQLTPYGLFRTVADLEQYKVNPNKFKYLYEKLIAKCKIALGETCAPRINYFAEEFNFFNDFINMRVKEVSLLPQIYSYKVDEKGKFIEETILEIRDYVLSNETIRLDKMFKQILGIGIDNIEGYRIDKNKKPEVSLYNFYKYVRKQFAQNGLNPIWLFDKEKVIYNKTMYVLTVVPSSVQIEEMLSERVSEYSFSPEEIKVLKEIKTKKLTNNTSLYHSLSVKVLKRALSDMKKTQYQLNYMQLMKKLDYEKEAKEFFEANYTNRTVAPYFIEKKYIDDLIANPQVKKTLRKAISVINAIIKRYKEYPTIIAIESTREMNSKAKKDAIVKEQAKLEKLRKDAITFLEENDIKVNEANILKTMCYKETNGHCMYCNNPIQASQLTTLEIEHILPISQSYDDSFDNLTVACLKCNKEKSKKTPYEFLTSINSYEPFKERVIELPISDKKKSNLLFEGDISKYELKFINRNLRDTAYGSMALVEELRKFNVFLERRANRYINLVTIPGQLTSRIRKKHELEEKDRTQLYHHAIDATIVASIANTPFGELLIKGQNDAKFWFENKEKRIELGGMLPKITLKNIENIRKINESNIKRSFEVRKSINQQISNQNPIKLVWLGNDYYKVQQINNIYEEKKNDNFIKLFDENDKKMILLCELEDPKLFKRLKEIFFSNLKANKNPFLEYCLFEHGIESTPNSFNYLIHGIKKSPKNPKSPIVKRLRYLEKRTSPYIIKKDYPNRKKNELGEFVTPKVKEKTIYGLDQLSQYCTEIYYNYETQKFIFLPIFMVSVDVNSKKINRDEHYFKETYERLIGNKKPKYIATLYNGSWCEITKKNNQTAEGRYIGYHKTNNLLTFGKDGEYSSSAPLYMSPNDKRIIIYGFNILGKKYKILDSNDII

SEQ ID NO: 7922 - protein, 1097 aa, unidentified
  REGION 1..1097: note = Description of Unknown: Cas Enzyme sequence
EDFMERKFVLGLDIGIASVGWGIIELSTGIVVDKGVRIFPERTAAENAKRRQLRGARRLIRRRRQRIDDLRKILVENNIINDSFRPLEHPYEIRCEGLKRTLSNEELATALLHIAKRRGSFLEFDRIDKKDVVSLDDYYKIAAKTDLSGGVVEDSEEKAKENLATKAILDANSKLLKMHNIHVCELQLMRLRENGKIRANQNNFKVIEYLRELLAIFEKQTISEELKVSIIDIIFRKREYYDGPGSKKSPTPYGRYILKNGKITEYDLIEKMRGKCTLFPDEPRAPKMSYTADLFNFLNDLNNLNINGKKITTEQKKEIVEKFINEKGEISPEKLCSYLEVDPALVSGFRVKNYETPILTTFEGYKKLSKVVKNKNNPLPKEIIENKDYVDAVIDILTRKKGKNERIEELKKIDSAIFNDFVAEKLAGISGITQYHSLSLKAIKMMLPDLWNTNDNQMQIITKMNLLAGRKEIYKGQKDIPFDDKLILSPVAKRAMNEAIKIINAVRDRYGELDSIVIEMARERNSDEEKKSIKKLNKFFAELKEKARETIKGYNVELNAKLVNKIRFYNEQDCKCLYTGKAIDLELLLKDPKAYEIDHIIPISISLDDSMQNKVLVCADANRDKENMTPFKYFASGKATGWNYEEYKEYVINLHKRKAISKKKLQNLLFEEDITKYDVQKKFIQRNLVDTRYASRAILNVLQSYFKANDIKTKVFTVRGSFTNMFRKKANLQKNRDFFYHHIVDALIVASIKKLNYMDHLLNIGISKDNTAYDKETGEVLTVMNEKKFFPPDFINFLNKLRGINDATDYIKVNISHKVDRKPNRQFTDQTIYGVRIINDDYWRIGKIKDIYGDEGKKLVEDIKKGKTDRYLMKQNDPETFALLEKIVETTPVDKNENPFLKYKSEHGFIRKRSKKGEGPIVKSLKYKFDVISNYVDITHKYDVKNDKVKVVLLSVTTYRIDIYKSRVSGLYNFVTIRNHNIKSNNEGFYIDECFYNSEKARKGITDEFEFQFSLHKNEVVELTKDEPALLRFVGVNSERINRLEFKPLHCDRLVINEKEKRIRIDINKNVLNICKYNVDVLGNLYQVSQEELKLKF

SEQ ID NO: 7923 - protein, 1380 aa, unidentified
  REGION 1..1380: note = Description of Unknown: Cas Enzyme sequence
  MOD_RES 969: note = Any amino acid
  MOD_RES 1072: note = Any amino acid
  MOD_RES 1091: note = Any amino acid
  MOD_RES 1128: note = Any amino acid
  MOD_RES 1179: note = Any amino acid
  MOD_RES 1299: note = Any amino acid
MEKVLGLDLGTNSIGWAIREINNSIENQIIDKGVETFDKGVAEDKSGEHPKVQKRTECRGKRRNYQAEKYRKWELLKCLITNSMCPLSIEELNEWRHYKKGVGRKYPQNQRFINWLRFDFDADGKPDFERLGLSKHENCYVFRALIADESKREIFKNEPHIIGRVLYQLVQRRGYNDGQNIDENEIAESSQTIMKGGGKADAADVNDISPYIKRHRTLGAALYYMQKEQNVRIRKRYNLRRHFEAEIKEICRIHDLQHLFQVLWGAIVWQRPLRGQKGLVGICTFEQNKRRCPLSHPLYEEYRTWVFINNLKIKPIADDNTLTEEKEHSRLLNELNDTVYPLFFKASADFKLSSIANALKKKGYEITAKFSEDTKVISFSFLYKMKEIFGEGWEMKTGWNDLLIGESKKQNYTIEDLWHILFDKKDNKKAAETAFDFLKRFGAEKLKLGTKAETFAKIRLQQGYATLSLSAIKKILPYLRQGFIYSEAVYLANLHKVINVKHISEDMARHFAEEFRKIAKQDRFEKKIIQVTNELISYQLNSENRFGMDPNYQLDEDDHKSIEQKLEGCFGKYSWGSLKEDEKQFAMTAVSKKYLAFLQKRIHSRNVFEKTERLHTKIFNWIRDTYNVPDSNIKYLWHPSEQETYLPAIEKDGKRYLRTPEPISKGFKNPMALKTLHKLKKLINYLISIGKIDEDTRVVIEIARELNDTNKRKAIESWQRNREKENDNFRKIIDEINKECNTSFNREDKDIIGKIRLWEEQKRTCVYTGKPIGLCDILNGVKYDYEHTFPASMSFDHELKNLTVADSYYNREIKKKRIPFECPNYTDEYKHNGVTYPPILSTLQTMFGKMIEVEKTVKGKTAKTKEFEKIAHLEKLYVEWKAKKSEDKEIKDNIIIRRHLIRMELDYWRYKLGAFTATEYKAGWRNSQLRDTQTITKYALPFLKTVFNKVDVQKGNITSDFRKIFKIQXRLEKKERKKHSHHAVDAAVLTLIPSAALRDKILLRYNEAIENNLSYHEKPQHWVNFHQQYIIGLEDDVLINYQADHRTLTPTYKTVRKRGKIQFVKEKKQGNXWQYKLDKDGNKIPLIAKGXSIRGQLHKESFYGAIKQEGTLCLVERYPIADFTKIEXCKNIVDKTVRELVKSTLEQRMANGDTFEKAKLKPVPFPSGKAVIKKVRCKXAAGRGYLTPEKSLEIKKHAFLSRHEYKHYVLAQNEENNICLYYEEKIENKVLRSFKIVGLFELAKLNLSKIQEIQNVPYFKTSEVGRGKQKVSITLNHIIKIGAKVLFYKENIDELKEMXKMELSMRLFRVYKFNEISSSEYIYLQNHIEARKNDELGDGDTEWNFEKYQPRLKLISNRFTVAIESKHFEIKPDGEIKWLQ

SEQ ID NO: 7924 - protein, 1614 aa, unidentified
  REGION 1..1614: note = Description of Unknown: Cas Enzyme sequence
  MOD_RES 1384: note = Any amino acid
  MOD_RES 1404: note = Any amino acid
MKILGLDVGVTSVGGGLITIPDTFEDWGKHGGINWLGSRIIPTDGDYLQKFESGVPAETKAAFRTAKRGSRRLKQRYILRRTRLIKVFKILGWASSEFPENFKEKIKKEEDFKFNISSYLPFEQTSIDEATKLLGVKNKKEKLACSEDWVIYYLRKKALSEKISLSELARIIYMFNQRRGFKSGRKDLKDVPEDSVEKKRVEILKIKEVIQLGDEKDKNGKYKFQIIPDNSVAKERVEPWEETRHKKPDWEEKEFTFLITVKNGKQLKPKTPDKDSDHDLLVTALDNKITDSGKTAGAYFFDELVNDKNYKIRQQIVKRIRYQEELKAIWNKQTEFYAELNDKTKLREISAALYPTQTKTEKSKLKEILSNDLYHVIANDIIYYQRELKSQKGLIQGCQYEKIEICKNNEKIKVGVKAAPRSSPDFQEFRIWQTIHNIKIYEKEQIIDGRTRIDVDVTKEYLGNNENGFKTKEKLFDFFDGHGGVEAKQVFKTINDSCSSKLSDKTHKINLFYKDGVTVKGNEIKEVFRKAFRKANYAEEGEQILNDAKRLNSLWHIFYSISSTDAEKSQKGIKTALGNPKLGFNFPEKIIESIVSIPESAKQYASLSSKSIRKFLPIMRCGKYWKWENIAPEYQAKIENLIKKGWNNVDKNTGEIIGVEYPFANAEQVQGLATWMAAYVIYDRHSERSASEKYTSYEQIDVMKLVPNNSLRNPLVEQIVRETLFVVKDVWKKFGQPDEIHIELGRDLKKNAEERKRISDSNTTNQQEKERIKRLLKELLNDQFEEYLEDGSTKNSRFETKPNPESPLDVEKFKIWKNLAGNLPEDIDKFFKGKDAKEKDKLPSSAEIKRHALWLTQKCKSPYTGKIIPLSKLFTESYEVEHIIPRSKMKYDAKENLVISETEVNKAKGHRLAAPFISECKGKCKHGNTEYALLEYADFETHCKAIFRGKKLKNLLATEVPEDFISRQINDTRHITRKISELLQPIAKSENGLVFTIGSITSDLKREWGLTKEWKRLMLPRFQRLESITGESYISVNAKNANDFDIHVPENPDLDLKRIDHRHHALDALIIAATTREHIRYLNSLNAVDNNEELKKVKQTLVKSKVREFSLPWERFTEDAKNALSTVIISIKAKNKVVSKPKNKYQKWVEKDGKWKKEFVAQKPPKEEGKKWLSVRKSMFKEPQGIIHLKEVYDEKSIVKAIEIQINRMKVQDTPAMKTASYIYDQEAKEIVKRLILEYDFDIEAIKKHLKKHPLKDASRQEYKTIKVAKFEEYASKRVSLDASFDSKKINKIPYANHIKEVYAEKSIVKAIEIQINRMKVQDTPAMKTASYIYDQEAKEIVERLIREYDFDIEAIKRELEKRPLKDVSGQEYKAIKVAKYTKXSKSPSPLAEILKKHLEQYNXGDKEHPELAFHREGIEVLNKRLKQPIGKVTIYEKKSSEDKFKNNYVEVDKGANVYFIMYEDLKTKERNEMYSIAAHKVVERVVSGEPIAENKEGYKTIILSPDQLVYVPTPEEIRNPELINLETNDPNKRKLIFERVYKMVSCTGSKCEFIPHNISKAIIDTVELGSSNKNQRAWDGKVELKPKREDSGTMIKEICQKISIDRLGNIKLA

SEQ ID NO: 7925 - protein, 1504 aa, unidentified
  REGION 1..1504: note = Description of Unknown: Cas Enzyme sequence
  MOD_RES 65: note = Any amino acid
  MOD_RES 102: note = Any amino acid
  MOD_RES 107: note = Any amino acid
  MOD_RES 116: note = Any amino acid
  MOD_RES 144: note = Any amino acid
  MOD_RES 155: note = Any amino acid
  MOD_RES 230: note = Any amino acid
  MOD_RES 275: note = Any amino acid
  MOD_RES 294: note = Any amino acid
MKKILGLDLGTNSIGWALIEQDFSKKEGKILGMGSRIIPMSQDILGDFGKGNSVSQTAERTTLRXARRLRERYLLRRERLHRVLNVMGFLPEHYASEIDFEXRLGKXKEEAEPKLXYKDKVFVFKKSFEEMLADFRQYQPQILXNEKGASKLIPXDWTIYYLRKKALTQRIEKEELAWILFSFNQKRGYYQLRGEDEDAIDKKEYVVPLKIIQIDKGENDKKNNKKSWYXVTLENGWVYSAAFFSEPQWLNTEKEFLVTEELDENGNVKIVKEKXTDKEGKEKRRITPLPSFEXINLMSKKEQDKFYKKIKAKTETAISNSGETVGAYIYKTLLQNPNQKIRGKLIRTIERKFYKDELKRILQTQKEFHIEFQSEDLYNDCIRELYRNNDAHQLRLSKKDFVHLLLDDIIFYQRPLRSKKSSIGNCTLEYRKYKDEEGTTLTQYLKVIPRSNPYYQEFRIWQWMHNLSIYTRDNDTNVTDEFLNKAEDWEILFEFLDGRKDIEQKTLVKFFLEQKGQKGKLLNEEAEKYRWNYVEDKKYPCNETKTLMTTRLAKVKNIQDAFLTRELEQQLWHLIYSVTDKTEYEKALKSFATRHRLDETSFVEAFKKFPPFKSEYGSFSEKAIKKLLPLLRKGKYWNWNAIDEKTKMGIEKILPAEHDESTKDGVREQSLHLTYDESIQDRVREQSLHLTKEEHFQGLQLWLAQYIVYGRHSEAAMTGKWNRVADLEQYLQAFKQHSLRNPIVEQVITETLRVVKDIWGKYGNRANAFFDEIHIELGREMKNTAEDRKKITNMVAENENTNLRIKALLAEMIHDANMENVRPYSPMQQEILKIYEDGVLNSELEIDNEILEISKTAQPSSSDLRRYKLWLEQKYRSPYTGEIIPLNKLFTPEYEVEHIIPKSRHFDDSFSNKVICEAAVNKLKDNFIGLAFIKNFHGQIVECGLNKRVKIFEVTEYEDFVRRHYAKNKGKRNKLLMEEIPEKMIERQLNDTRYISKFISGVLSNIVRSETHDDGINSKNIIHGNGKITTELKQDWGLNDVWNDLILPRFERLNHLANSKHFTAWSENHKKFLPTVPLELSKGFSKKRIDHRHHAMDALAIACATNEHINYMNNEHALRKGKSKEEKQKIRYDLRANLCDKKYHEGSGKNYKWMFKKPWEKFTADAREKLESIIVSFKQNLRVINKATNHYEKWIEKDGVKVKELHKQKGVNWAIRKPMHQETVSGKIVLSRIKVPNGKILTATRKSLDTSFDLERIKKITDTGIQKILRNHLKSKDNNTEMAFSPEGIEEMNKNIRALNNGRPHQPIFKVRVFELGNRFVLGNNANKRNKYVQTKEGTNLFFAIYQDEIGKRSYETIPLNEVIEHQKQRALFSREEQKQMPQFPLKGEKRNFLFSLSPDDLVYVPTEEELINQISVNFFNLSEEQKKRLYLVNDFSSTTCYFRPNRVAKAIAPKEIDMSYNEKKKKVTGSYDTKTASLEGRQIKDICIKLKVDRLGNISKHDS

SEQ ID NO: 7926 - protein, 1448 aa, unidentified
  REGION 1..1448: note = Description of Unknown: Cas Enzyme sequence
MSTPTKKILGLDLGTNSIGWALTEQDLENKHGKILGMGARIIPMGAELNKFEQGQAQTKNADRRIARGMRKQNKRYKQRRNKLIYVLQKLGMLPDQIKLSAPFTDPLKIDKICILPIDKKQKQYSALDLLELRVKALSQEISLKELGRIIYLHNQLRGYAGGGNEPEEEKDKDDEENTNEERKGNESYITSAKIVSISAPETITYKNKQRKKVRVKIVIEEGVELEGESFLETLNLNETLELQVNIRKSKQGKTITFKLPVKTNWRKKMENLEQRLSEASEEKGSEVYLCQYFASILKENNWAKIRNNVILRSRYQSEFDAIWKEQSKHHPILNSSDRNLLSEILQFIFPGNTENQSKFREIGLEKGLYQIIRNQIIYFQRELKDQTHLISNCRFEPGEKVVAKSHPVFQEHKLWEQINKLTINTKTEKGPNRKGEMKYAYEDKPIPAKVKEWLYDELQQKKEISFTTILAKLKKEQALRDGVDFLNGINPKAKLSGNETKALLKKMLGETLWQQLNLQDELIQIQLWDILFNCKGNEYDLESERTSKVLDFLKIHSKDAINLEQLEQTAIKISKIKFSRNYASLSLTAIEKILPLARAGKHFNRELSAELREKIIRLLNETVEDPFEKSVQDFLEKNQNEVLTSGGILNTYATILIYNRHTAKEYGSNEQIKSYKEIKRLQPGELRNPLVEQLISETLMMVRDIWRQFGAKPDEIRIELARDLKNNAERRAKIYESNRKNQKANEEVKNLLFELNQELTITNIEKYKLWESQENLKEEYIKQYQDASKSEVEKMRLWKEQGHISPYSGQPIPLSELFNRERYDIDHIIPQSRYFDDSFGNKVICEKSINKDKGNKTAMEYFEAGSSTIRSVLSKIDYIDLVNKYFNGIKRKNLFATSVPQDPITRQIKETQYISVRVKEELNKIVGNDNVKTTTGGVTDYLRNQWGLTDKFKNILLERYKKAQPLLAENEYEKYEKTFDEKKKEREKNSLPFNEMKQEKEQFVETYNKNFTQFKNNKLIIKDWSKRVDHRHHAIDALVISCTEPKHIKRLNDLNKELQTWLDKNRKDILPNFEGSPSELLDEILNLDSDKRESVFKQIERFKNIEMPWKGFPEAAGKAVCCVIVSQKPKDKLLIQKDKAGEMQIKIRGQLHKGTIYGKTQGVESYRIPLSKLAGTKFATEKTIEKITDEFLKSIIAEHLKDFGDKKDAFSAEGILNLNKKLEERKRKSKNGEEEPAPHPPVSSIKIFYRDPTKIKKKKNEEEPKDALQRLDRRKAFNESLYVKTGDNYLFAVMEKDGKRVYDVITLFDAVNLLKEEFNKEGVEKSTFSKDIVFKTYFEQKNKGKLLFTLRQGDPVYLPEKDEQVVTDKSDPRYADFWGDKEERSRNIHFVTQYSGTQIYFIKHNIAHPILKQKEFGTQNAYEKLHGLSIKKSCIKLSIDRLGNIKPA

SEQ ID NO: 7927 - protein, 1493 aa, unidentified
  REGION 1..1493: note = Description of Unknown: Cas Enzyme sequence
MNKILGLDLGTNSIGWALRNPDLIENQIEKFGVLTFPTGVGKDERGRYTKSYAAERTKKRSTRRLYQARKYRLWATLEDLINEGYCPLSIEALNRWRYYNKEEARKNNNAGRMYPIENLAFDAWVKLDFNNDKKPDYRSPYQLRKELAETKLDFTKEENRFKLGRALYHIAQRRGFKSSRKKTDDTKEAEISDNIEDLQYSEKKKNKKIIELHEKYPQAQTIGVLFALLEKDGVRIRESVAQYAIRENYKDEIKHIFQFQELDFEHSLYTKLVETARNKNNGSIFYKRPLRPQKGLIGKCTLEPNKYRAPISHPSFETFRAWAFLNNIKYKDNKDKNAQWQPLPLELKEAIYQDKFFRKSKSYFPFSEIADLIKAKGNNWELNYKPKTTVTGCPVSARLKDIFGDNYLQVQIQKEKAPKAPKAYYDLEDIWHVLFSCEDQEFVAEFAEQKLKLSPEKKQQFVIAWNAFPVGYGMLSINAIRKINKFLEKGLIYTEAVLLANIPKIIGKELWQENEKFLLTSISGVIDENRQQKTILKIVNNLVSKHKNLEANEKFGHKDTNYKLVDSDIKDIQNAIEEQFGASRWETFTEEEKQKVHNTVKDCYQAYFITLGLTRKDINDERHFEVKSGNCIYYKTDSGYYRLPKLIDTLSEFLQLNFNVKDKLLQKIYHPSEINIYPPAKPNKDGVLKLGSPKTGSFKNPMAMRTLHELRKLMNYMIETHQIDSDTRIVVEVARELNDSNKRWAIEKWQKQRETENQEFAQAIEQLIKEDKNIKADSKSDSDINKVRLFYEQNNEAQALPPIVEEKESAQGKKKKTSEKDEAVKWSGHGEKLINKYRLWKEQGYQCMYTGKFITLTDLFTEGEIDLEHTVPESKSLDSSLANLTVCFHDYNRTIKKNKIPTQLNNYAKDFSEYTAILPRLDNWKEKVERIKQQIDFWKTKSKKATDKKWKDDAIRQRHLWQMELDYWQNKLDRFTMTEITSGFKNSQKIDTQLISKYAFHYLKTFFDKVDVQKGSITAEFRKIYQLQSADKEKDRSKHSHHAKDAAVLTLIPIAAKRDAILEKYYEAKENKTKYIGTEPYKGFKREFIWNIDDNVLINNLTNNQAFSPAKRKIRKRGKEQFINETNKPMWATGDSIRGQLHQETFYGAIKPAKQGENGNLLKDENGKYIQEEEIKYVVRVPFQYRKDENTPGFKTLDEIKKQVVDASLKAQIEQQVKEAGGLKEAFEKGMHLLDKNGKPHGNRIRHIRVWARVSKPLAIKKQTYLSKTEYKQNYWAANGENIICAYYKNDTVDKNGKIKKNRELEIINLFDAAKLKNFGLVNENGELQIFRKDKNNEVIINKEGGKEPPYAILKAGMKVIFYDENIEELKKQNGEKDGDYNKRISYRMYKIIKFAGGRLTFQHHLEARIDKELEKAYPEKQYFKSDPKNKEITFGGRSTDGFAEKVSDALKYNSYNNYEAWPKLRYSVDWLDMAIQGKHFEVKLDGEIKWLQ

SEQ ID NO: 7928 - protein, 918 aa, unidentified
  REGION 1..918: note = Description of Unknown: Cas Enzyme sequence
FHINQRRGFKSNRKTDRKDNDSGALKQAISELRKRIQDSGCATAGEWFWKERMQQKPEGVRDQWVRARYRETPSTTDEGKKRIGYDLYVDRAMVEQEFDALWAAQAALQPGLFTEAARAELKDTLLYQRNLCPVKPGRCTLLHEELRAPLALPSTQRFRILQEVNNLRLLDEALREVPLSPEQREAVVIALEGKNKLSFAAIRKLLPLSGKFNLEDEKRAELKGNATSVILARKDLFGDAWAGFDAAVQDEIVWQLVSQESEGALIAWLQQHTGVDEACAEAIVNTRLPDGYGRLSRKALERIVPALQREVCTYDKAVQAAGFAHHSDLGFDFDHAEDEVQQVGERTIASTGEVQALFAFKQLPYYGKALQRHVAFGSDKPEDHEEKRYGKIANPTVHIGLNQVRTVVNALIRRYGRPTEVVVELARDLKQSREQRQQTQREQADNQKRNTRIRDLVAQTLGTSPEHVRGSDIQKWILWEELSRDAADRRCPYSGAQISAAMLLGEAVEIEHILPFSRTLDDSLNNRTVAMRRANRIKGDRTPWEARADFAAQGWHYEAILQRAEGMPPRKRYRFAEDGYQRWLGKDQDFLARALNDTRYLSRLAASYLRLVCPQGVRVIPGQMTAKLRGKFGLNSVLGLDGEKNRNDHRHHAVDACVIGVTDQGLMQRFANASKQARKDGLTKLVVPPPWPSYRDHVERAVRHIRVSHRPDHGFEGAIVKGTAHGIREDGIRKDGRIKQRPKAKGSADRKTITLIPIDEPRQLARHGVDAEGKPLPYKGYASGSNYCIEITVNDKGEWEGQVISTFDAYRIVRESGWERLRGAQSQNGQALVMRLVIGDSVRMEVDGRDEVMRVVKVGGNGQIFFAPVCDANVDTRNSDKQDPFAYTSKYAGSLQKTQARQVTISPIGELRDPGFQG

SEQ ID NO: 7929 - protein, 1005 aa, unidentified
  REGION 1..1005: note = Description of Unknown: Cas Enzyme sequence
KDRQSNAVARRLARQDRRMRDRYLKRRGRFMNALIRHGLMPEDSDARKQLERLDPWVLRLRGLDEGLTMHEFGRALFHLQQRRGFRSNRRTARKAVEETGKIKSAATALRQKMDESGARTPGEFLARRRLRNGRADHHAAANHPVRVRLIGTGARAAYNFYPTRELVEEEFHALWNAQRRCHGDLLTDAARDELHDILFFQRKLKPQPVVRCVLNPSEKRAPRALPSMQRLRIYREVNHLRIQMPGRAARKLTRAERDTLVHRALHVRKLNFATAHNLLHMPPGSKFILQGASRKHLDGDQTAAALAARGSWGPGWRRLSASEQEQIVEKLLAEQNESKLRDWLIGQYGLSSDTADAVMAAHLPEGHALLGRNTAARVLKELEPEVVTYDRAVREAGFDERSPLDFDGEVLDKLPYYGEVLQTHVAYGSGDPSDNPEKRHGRLGNPTVHVALNQLRRLVNELIDRFGRPDEIVVELARDLPLSARGKAKLNRMDRQNRAANDRRRDTLRELGVADTYENRLRLRLWEELNPGNPSDRRCPYTGEQISRNRVFSGDVKIGHILPFSRTLDNGVANKTLSLGQAIRFKGRRTPYEAFAASPAGYDWQAIAARAAAMPGSKSWRFAPDAMQRFGDEERDFLDRQLDDPRYLSRIFRRYLMHTGADVRVTPGRLTSDLRRALGLDSVLKRDDRDQAAGAAKNRLDHRRHAVDAVVVGLTDRALLNRVATLAGKAGEPLDDRPLAGLPTPWPRFRASVRECIESIVVSHKPDHGTQGAFHNDTAYGVVHAPDELGRSKVVHRVPLSRLRPGQIDSIRDPVIRDRLSAAATGLTGAAFTRELIDAGETLDPPVRRVRICETMRVIPTVIDADGRVLKAYKGNANYCYDIFREDGGQWGGRVVSRFQANRGEFNPDDRETPDGTPLLMRLRVNDMIATGRGGERRILRIVKLSRGQVTLADHFEAGSLKSRHTDRNDPFRYLLASPGRLQALNARAVHVTASGRLFDPGPPA

SEQ ID NO: 7930 - protein, 1045 aa, unidentified
  REGION 1..1045: note = Description of Unknown: Cas Enzyme sequence
MNTKKCKLPEYTIGLDVGTNSIGWSVVKEKDGEPVELVDCGSRIFIRSVEDKSPTPKNRKRRESRLQRRQIQRSSRRKNRLRNYLILKGFLPEVLKNNPAPEEELNRLGNPYIIRAKALDKELTPHEFGRAILHLGTRRGFLSNRKTSFGDLDDDTSAREILEREDEKAGDKDKEEGKLKKGISKLREDVKKSGARTLGEYLSGLSRKRNKGDFHDRYTDRRMYKEEFSAIWEKQSSCNPGLYDEETREELEKIIFSQRPLKLKADRVGHCSFEPHLPRTRQGRLEFQRLRYWQDINNLSCYNPETGEIDVPLSLEQKKELAKALETRRDLTWAKIRALLGLHKKTAFNLQKVEGKKKGLRGNRTTHDIAEIIGEKWNSLDESEQYLLVEDLISYTSKKGLRKRLVNHWNFSEEEATRLAVVELEEDHANLSLKAIKKILPHLQKGKKYSYKQDDAAQVGAIQAAGYKVGEPEKTNLDSLLSPPPIPNPIVQKALHEIRHVVNAIIRRYGKPSAIRLEMARDLEMNTKRYRQFLLRQSKNTKANERAEEQYGIIRNENPHLKLRRNISYQDKLKYRLWEESGKRCAYSGKSIGMTELFTHATEVDHILPYKRTLDNSYMNKVICLSEKNKKKGDKTPWEAFGNTSGWEEILMISKDFPLPKRKRILAEELPDDFISNQLNDTRYIATEASKYLKSLGCDISFTKGGAVSWLRHQWGLNSLLGESEEKSRDDHRHHAIDATVIALTTRSLYQKIVHLASAAEGESLSPEHGIEVPSQLPELRNDLSERLDNLIVSHSTNRKLTGAFHEETAYGIRKGADGETGVVVRKVLADMTDRDKRNIVCPVIKEAVELYVWERGGKIKEAMKHLQEDPLLHPRTGDRIRRARVWVSKTLNKDSFWEHLAPWDKDKVLRILPYGNNHHVEIIRNRENGEYESRFVTTMEAAKRARRVRWPIIRTDHGEEWEYITYLCVNDTVSLVENGRRTFYRVQKLNQSGKRLCLRLHNAATLGNKSEERMKSISMLMRDLEMRKESVDVLGYLPALNKED

SEQ ID NO: 7931 - protein, 903 aa, unidentified
  REGION 1..903: note = Description of Unknown: Cas Enzyme sequence
DQSEEKVSGKISKSSRALLEEMGLIETQLSDEDYKALSREEKKAARQKEAGARRDALAKLNEQSELTYGAFLWQRQVAGKQTRARPSGEADKLYDVYPTRELYEDEFFKIWAAQTRHHSQMTCEWGDRIHHVIFTQRPLRPPERGQCTYLPSKKRTFRSMPGFQRYRIYQEVNNLEWTTASGKRRLADFPIVRDEIISLLEKPSLKAKPTTKNATVTFNKMKKVVQKNGLSTGEVVFNFETAKREGFDGNQTSNVMQHDDYVGQTWHDWSLDKQDCFIETILDDSKTDDEVRNELMGYGLTYAAAEHCLNAPLVEGTAHVSLHAARLMMGVMRDGIEQADHHTGEITTRLPIQSEAAEYLADSEDCPDFINPMRTTGESRQLWDQLPYYGEAFQDGRHIIPGDRVSKDRHDERKYFGGVTNPTVHIALNQIRQVVNELIARYGHPASVAIELGRELPAGAKGRREIEREQKENQDKNKELDKKLEDLEQKTNPDNRLRLRLWEELSKDPAGRCCPYSGEKIGLTNLFDGSTDIDHLIPFSASLDDSRANKVICTRQANRDKGQKTPFAAFGHSPEGYDWEQIFNRVQVLSKSKQWRFQEDAMEIWQLNEGNFLARHLNDTRYIGRLSREYLECICHIDKIDVLTGRLTALLRGHWGLNSVLADQPNDKEPKKNRDDHRHHAIDAIVIGMTNRSMLQKVATAANSAEELAWDRLFIKGENRRSPIDPWDDFRKDVKAVVKGIVPAHKTYRKKFINGRTTDGQLRRTTDGQLHNDSAYGIVSHPDKKGKNKGKYELTIRKPIENFVTQDEVKKIRDRQLRRDFIAAFDKAEANGRKGVDGIKDLAQKLGIRRLQKIEKMKGIPIHNTSGKPFKVYKGDSNWGMEIYAYPENHKQSDKWLPITISR

SEQ ID NO: 7932 - protein, 1032 aa, unidentified
  REGION 1..1032: note = Description of Unknown: Cas Enzyme sequence
VDYVLGLDLGARSVGWALIELQGDEPKRVVAAGVRVFEAGAEGNIEEGREESRGVKRRQARLARRQTRRRRQRLRQLYRELAGAGLLPAVQASPGRPFAVAVQEAINVLDGQCRLQYQHDPCANRIPYLLRARALDEPLAPWELGRVFYHIGQRRGFKSNRKAEARDPEERSLVYDGIRRLEEEIQRTGARTLGEYLSKLDPRQERIRCRYTQRSMYEREFDAIWAAQSPHHPCLTTELRERLAAVLFSQRPLKDGAELVGSCSWDPSQKRAPAWSLEYQRFRVLQEVAHLRYADESQVWQPLDAEQRSKLVAALSTTRELDFRAIRKLLGFAGKVRFSVEAGGEKKLRGNVVAAEFIRAIGEEWNALGAERQAELVRQVALAEDDDKLREELITNWRLTPEQAGRLVADVRLPRGYAALSLKAIRAALPYLEQGMSVQQAREAAGYELMPPVPARDLLPPLASSGIEVFNPAVKRSLTELRKVVNAVVRKYGKPAEIHIEVARELRKSREERQKESRRMREREAERERMRQKIHKEVGIPLEQIREEDVRKGLLYEECCRTCPYTGKPLGGFAGLFSGTSPVQIEHIIPYSISLDDSFANLTLCLASENAVKHNRTPYQAYSADPGRWEDIQARVRAFRGPYAAEKLRRFLMDEQAAAALLQRFSARHLNDTRYAAVVAGRYLSLLYGGEVIDGKRKILKVTGQITAHLRRVWGMNEILGRAGVKSRDDHRQHAIDAALVAVADQRSVQRLSQAAARAELQHRRRLPALEPPFVGFKEGLQCLVQTMNISFRPDHRVSGPLHKETFYAVSGAPAAPTGTIRTRKPVFRLTEEDVDRIADPAVRCLVKQKLAGVGEARKLEKDWPVLPNAHGQPVPIKRVRLELRDAVRAVGQGHRRRWAEVGESHHVAVFEVTKRSRQGTRTAWEGEVVSLWEALERLRLGKPVIDRAGGPDRRFLFSLCKNDTLQLNGPRPGIYVVRKIRQNKQITLVPQHDARPEKQREQFSPTVSGLLEYAARKVVVTPLGELVESHE

SEQ ID NO: 7933 - protein, 1176 aa, unidentified
  REGION 1..1176: note = Description of Unknown: Cas Enzyme sequence
MAYQDKIFSFDISPSAIGFCVFAANGAGDAEHIIDMGVRVFPTGREPQKSAGASPSLAAARTVKRSIRRGRDRFLGRRHAAAENMKQIGLLPRGDKEFEQLLRETAEKPDNDISNTVYALRVRAREEQIPLYYLGRLFYHLLRRRGFKSSRKTEGGENESGKIAAGIVSLDAELMNKSYSQWLYERVKNNEVVRLRKDSSAYTEDAKTPYAFYASRAMIEEEFDAIWAAQAQFYPGVLTDERRDALREIIFHQRPLKPVDCGVCLFYPNERRLAKADPLFQELRIYQELNHIRICAHGETDGRPLTLEERDKLALLLAQQKNVKFSKMKKVLNLLNNESINLEVSRDGLEGNLTSAIMRNKKYFGAQWAAIPFERQRAIISKLNDETLFPEELDKWLADNCPQLSADERKAVQSAALPEGYGRLGITASMKILKELKDAVISYAGAAQLAGLVLKSAKENRDFLPKYQEIEAIYRQIIPGTNREGDDYDKRMGRISNPTVHIALNQLRLVANALLKKHGKPRKILVAVGRELKMNDREIREYNKNLYDNKRLNQEADEKMQELGLVPTAEGRQRYRLWTEIKDPANRVCIYSGKPISVADLFTGGKVEIGHILPLSATLDDSMQNKILCYSEANREKGNRAPADVFAWSPNYEDILSRAQFLPEKKRWRFNRDAMARFEDENGFLSRQITDMQYITRIAAEYLSALYPEQEEKYNKNTGELFGKFFSKRYVFPISKHLVGKIRYGLGLFDLPNENDEDAPLREDHRRHAVDAAIIGLCTPSAVRTIMKSLRETEPETPDGSNSVAKSVAEGIAWPDFRAELNQGLERIITSHRPRRTVIATNADRRKGHDKTGGQLHKETLYGKEKRNIPIADLDFNDLEEICDEKFRQDFVNFLKEAHGIIIGRTAKRTFSYLWDKEHNSICEAFVKQYPQYGALKNFICWGRSVVKKPFLELDAASIASIRDVFLRRSLQEFLSQELGIEFTDSLSEKDFLPHEKKILKTELGKALQKFKETDGQYQGIRHVRLFSSATAPIALRDKKGGVYAFVQGGNNFRFDIWQYTDKKGTEKWVSDTISMFDAVKPEKMNPLYRRPHPAAKRVLSLQQNDMVAYTDLDTGRRVIGRVVKFTQSGQIGFAPHNVAASEEVQMIKDMKKLMTEWKCRKVSVNAIGQVIMPQL

SEQ ID NO: 7934 - protein, 1183 aa, unidentified
  REGION 1..1183: note = Description of Unknown: Cas Enzyme sequence
MKKVLGLDLGTNSIGFALLEVEEDKDGAISFNELASNSIIFSEYILAEERRKFRSARRRNDRTSRRKANIRKLLVYFNLASKELLDNPIKYFNNLTKLCTEPYSLREKAINGKELSKDEFTFALYTIISRRGYSNLFATQDSADEVKESEVINSAIANNKNIYKNNNYALPSKVLTVKKEALEKDGFINIAIRNKKDDYNNSLDRNLWKEELEKLLQSQKNNKELFLDTKAFDDFKNKVLKGINDNSLGVFEQRDLKSVEDMVGFCSFYNLYHETPQKRVINSHIKAIEFVLRQRIENSILGELIFNKKTGEFTSISKEDIEKTIEFWVKNPSSQKIDTKNIFKGIGLKDIEIKVSDKQDNTIQNITVHKALLEIVDFKTLTKDEDFYSKLLETLHYFISKEQIIKEIKELNSKNILSDEQIEKIASINKSTSSYLSFSLKFINEILEKMKNGIDYNKSLTELGYFKRYINMKAYNFLPPLNPSKDDIKWLEKKIPNFNPQELFYQPLVSPNVKRVISVLRKLINELISKYGKIDKIIIETARDLNSKKDEEKIKKFQEQSNKERKEAETILKANGKEVSKKNILRVRLWHEQSLKCLYSGETLTLEQALDENITEVEHFIPRSRIWIDSYKNKVLVFKKSNQDKSNKHPVEFFKSTAKWDQFVGRVNGNILLNKDKKFWLTNENNIQKIWDNEKLEDRFINDTRSATKIAANYLEHYLFPKQNEHGKGETNENVIRVTGKAINELKRVWGVHKTIENKDGKKDRETNYHHTIDAIVIALLNSSSKKVLNDFFKQNENVFKREALKEKLKNRFPRSKKDGKTLFEFVEDKVCKYENNEIYVCKFMKKKSNIRGFKDGNVKLIWDENSNEFAQVDKKEISKKLLLNKFGKDAKDEEVKENFDEIKKQLNLPKQNNIQIALQEYEKRLLDTREKINSIKEKIKKEDNLLKVNRKETESSETLQIKNKIEDLKKKQKELIKKLEFPCYFLTKNGQKQIVRSLNVKSNDKTKADIIIVTDKKKKDRVQRLNKDIYEKWKSSKTPFVAKLNDNTLNINLYNTSDGQVIGLNYFSSIKNKISPKISERKMKLISDSEGNILEEIDKITISKGDILEVRKYSKDLKNYTKEYLVCNGGGDVSDGNNKLELDSINKKKKKRIYRTLNRFTVVTPVKIDFFGEIIYEEFKKS

SEQ ID NO: 7935 - protein, 1171 aa, unidentified
  REGION 1..1171: note = Description of Unknown: Cas Enzyme sequence
MKKVLGLDLGTNSIGFALLEVEEDKDGDISFNELASNSIIFSEYILAEDRRKFRSARRRNDRTSRRKENIRKLLVYFNLASKELLDNPIKYFNNLTKLCTEPYSLREKAINGKELSKDEFTFALYTIISRRGYSNLFATQDSEDEVKESELINSAIANNKNIYKKNNYALPSKVLTVKKEALEKDGFINIAIRNKKDDYNNSLDRNLWQEELEKFLQSQKNNKDLFLDTKAFDDFKNKVLKGINDNSLGVFEQRDLKSVEDMVGFCSFYNLYHETPQKRVINSHIKAIEFVLRQRIENSILGELIFNKKTGEFTSISKEDIEKTINFWLKTPSLQKIDTKNIFKGIGLKDIEIKVSDKQDNTIQNITVHKALLEIVDFKTLTKDEDFYSKLLETLHYFISKEQIIKKIKELNSKNILSDEQIEKIASINKSTSFYLSFSLKFIDEILEKMKNGIDYNTSLTELGYFKRYINMKAYNFLPPLNPSEDDIKWLEKKIPKFNPQELFYQPLVSPNVKRVISVLRKLINELISKYGKIDKIIIETARDLNSKKDEEKIKKFQEQSNKERKEAETILKANGKEASKKNILRVRLFNEQSLKCLYSGETLTLDQALDENITEVEHFIPRSRIWIDSYKNKVLVLKKYNQDKSNKHPVVFFKSTAKWDQFVGRVNENILNKDKKFWLTNENNIQKIWDNEKLEDRFINDTRSATKIAANYLEHYLFPKQNEHGKGETNENVIRVTGKAINELKRVWGVHKTIENTDGKKDRETNYHHTIDAIVIALLNSSSKKVLNDFFKQNENVFKREALKEKLKNRFPISKKDGKTLFEFVRDKVCKYENNEIYVCPFIKKKSNIRGFKDGNVKLIWDETSNDFAQIKKTEISKKLLLNEFSKDAKEEEVKEKFDEIKKQLNLPKQNNIQIALQEYEKRLLETRVKINSIKEKIKKEDNLLKVNRKETESSETLQIKNKIEDLKKEQKELIKKLEFPCYFLTKDGQKQIVRSLNVKSSSKTKADIIIVTDKKQKDRVKRLDKDIYENLKSSKTPFVAKLNDNTLNINLYNTESKGQVVGLNYFSSIKNKISPKISERKIKLISDDDKITISKGDILEVKDLKNGTKEYFVCNGGGNVSDGNNKLELDSINKKKKKRIYMTLNRFTVVIPVKIDFFGEIIYEEFKKS

SEQ ID NO: 7936 - protein, 1055 aa, unidentified
  REGION 1..1055: note = Description of Unknown: Cas Enzyme sequence
MKYLLGLDIGITSVGWAVLNLDAKRIENLGVRAFNAAEDPQSKAPLAEPRRLARSMRRRLRRRAGRLRRAKELFVQYGLVASERDDDIFLTKEKDAPTPYEIRAKGLDHLLTGEEFARALFHIIKRRGFKSNRKKAAPDNQDDKRMLGSISENRRIMEEKGYRTVGEMLCLDEKFRDKKRNGQDSYENTFDREMMEDEIKVLFSRQRELGSQFASEEFEESILQVFNWQMPFASGDKILKLTGKCTFEPDELRAPKYSYHAERFTLLQSLNNLRYTVNGDVLQLDAEQKKQIIEMAYTLKQVTYKQIRNALGLPEAARFNSLRYLHRNKDTKQMEESLDCEKSKFVEMKGYHAIKEACESAGVWDKVKNSPDLMDDIAFALTFYKTDEDISRYLEDKSVDPQVIDAVLGCGQQFSGVKHISTKAIKKLIPYMENGLRYDEACAAVGYDHSNPRSSNRSYKLPVVGDAVSTNPVVRRALSQARKVVNAIIDRYGSPYIIRIELAREMGKSAEKRNEIKRQQDENARLREERRREFIEKFGREPSGEDVLKYRLYVEQGGKCAYSLQPIDINRLFEPGYTQIDHIIPYSRSFDDSMSNKVLCLGSENQKKRDRIPYEVFGHDQKRWEEYERIVPAMFKDLKKRRNLLCKEFNEDEWKERSLSDTKWIAREFANFVREHLQFADPEVKKPVRCVNGQVVAYMRRLWGLEKHREEDDLHHALDAAVIATITDWQIQAITDYAKASENPDYLPYYVDEYTGEVIENKIRLPQPWPNFRKELLARLSEDPAAEIAKLSLSSYAGFDDVKPIMVSRMPQRKVSGPIHEETIRSVKKLGSEGKSVVKRPLLNLSKSDLDNLFDPDSNKVLYALIRERMERFDYKAKEAFAEPLYKPRKDGTPGPIVKSVKVCQTQNTGIEVRGGIADNGRMVRIDVSRKSDKHGKFKWYATPIYVSNFMRGELPDVPGEFVFSLYPYDLIRLRSKGGVFFGYYRGYNINTDSLTICEANNVQRVKSSIGIRNAYSIEKFYVDVLGDYYPIRREVRRGLENGGDFKSGEAEDSE

SEQ ID NO: 7937 - protein, 1228 aa, unidentified
  REGION 1..1228: note = Description of Unknown: Cas Enzyme sequence
MQAQESYKPYSLGLDIGTNSLGWAVLAVDPDNLDRPTEILGMGSRIFSDGRAIDKAHMGESLGETLQSDRRKKINTMRAHQRDRARRGRLLRMLSDGLGLVRTNGCGRGLRVDWVDPFKATASNRDAWLRRESVFAARAACATDPLDSTNKYDRARLARSLYSLLVNRGTLLTDDGEIEEPEPEAPPKKRKGKAKEAKATTPKGDDPATLRAECTRREEIVAAACGIGGLGIWLSAQFDRRHPFAPIRARRMDSDRRKNHWKNLDDETIARVGSQALPGRSSRKMVEEEFARIHETQSAAFESAGIGAGEWDKLRALIFERAPYNAVRWPCPYVPADERTPRFDPSAQQYLAWEKAWSLRAFDAQANEIDLDAVSDPDAPSLRHRFYLALLTHPRLTWKQASTALGLPGSTSFNRVNASGKETYWTGHPFPELGAWIDRRDRGAQDDGRERVEWPELRDRVLNLFSAPIRGEDRDFATIPSAIAVEIRDLLVAPPRGSIPYGRSMLQGMLPLLETMRPHAARDAALARINEERELDTYALDEYRAGRLPYYGAAFLGMLPRLPSRRKGPYSKGNGPTRVICDVEAKYGRVPNPSVHIALNQTRRVVNEIARKYGRPSRIVIETTRQLHLSDRGRMTLLKRIAENEKRNREAEAAVRRVLGNTSAEGEENRRAVRRYKLWKELTLCGEREARLCPYCGNHEVTMSDAINGHGVDIDHIYPRSLGGGDEMGNCILCCKPCNAEKTNTKTPLDAFGNDAERWERISDATRYLPARKRRMILNPENERSKFLAGQLESTSWASKMLLQWLRPLCLVETNVLASRGELTGTLRKRWDLEDLKKDESGMRIDDNRHHAIDALVTAALSRSLLQKAARGNDLAVKNFDLWDGFKADVERAHKRIVTSHKVERPRILFTADGRRAASVPGAMHYETIYARSGVREQKASALLPPPLTRGRLPLNGPDAAAVLMKAHDLLGRLVESPVAGKSTYDSSQVARLCDTFSLWFGAENPSMAYFRERIDGQSEIWLRCNGRNGPKLNARPPSETGEICTTPWNCEHGTLSGVFRTAFDFLCARNGVAKIAIRPTRGPDESGSEYDSEVYGPPDGRRETIYGLWRSAENLCAVVENIMPLRVRLFQLLRVIADPEELHAFAVTKPEMRIYKNDAIRIDRRVCLIKTMRIDQGRFRIGLEDINTREDVGSEPALQTLLKRHERVELGVTGLLGGFRLKMRLDG

SEQ ID NO: 7938 - protein, 981 aa, unidentified
  REGION 1..981: note = Description of Unknown: Cas Enzyme sequence
MVQRILGLDIGISSIGWAVINYDKEDATQNKIIKSGVRIFTQAENPKDGKSLAEPRRLARAARRTLKRKRQRMKAIKKLLMETLLLPHKDLFIGDIDETIYSKKERTDIWQLRSEVVKRALNAEEFARILTHIAKRRGYKSNRKVDEKGDSEGKKVLGAIENNQNLLTKYETIGQAIYETTKDTGIRRNKKDDYLHSVSREMLLDEVNKIFEKQQLFQNTMATDKLKDDFITIAFSQRDFASVDGMVGKCTFEKNEPRIAKRTYSAEEFVTLTKLINTKVVLEDGSERGFTKEELETIILLCKQSERPSYIKIKEAIGLEKTSVLKNIEDYEIDKETGEFLKNKTTKFVSAFKGFHELRKVVEKTLSKTHWHNISQDTKLLDELGTIFSIHKSDKKISETLDTLNFGMLSDDETIKLKEALIASISFDQFIYLSLKALDKLLPYMREGKRYDEAVSLAGYKKETGTKQKFLRALNKQEQDQLTNPVVKRAIAQTRKVINALIREYGQFDSVHIELTREIKKSHKDRNEIKKGQEKYRLYKEETVEDFIKLFSREPKGAELLKFRLWKDQDGYCAYSGFMGEKAYIKPEKLIDDVKYAEIDHILPYSRSLDDSMNNKVLCLAKENQDKKNMTPFEYFENIGRDWNSYEVYVKNMKNIRKAKRDRLLKKNFDENSEKEFRERNIRDTAYMARYIKNFIEENLELRSIGKKKVVTINGTLTNMLRHNWGVGNKSRDTHLHHAVDAILIAFATDSEVQRLSTLSAKNEGFNYTSSEAKSKKFRFSPPMENFRDEVQKSIDEIFVSNAPRRKVTGAAHKETIRSKKLEKVKGSFEVNGGLAENGEVKRVDVFKKDDKYHFIYLYTADFEKEKLPNTTIKNVDIDDAFTFQFAIFKDELIEIKQKNKDAFRGYFKFSESDGRFNMQFHTDSEYDKKTGRFSTGSLEYIKKYQVDVLGNIQEVKKETRVATKKVLKKNKHNSIKNKTR

SEQ ID NO: 7939 - protein, 1138 aa, unidentified
  REGION 1..1138: note = Description of Unknown: Cas Enzyme sequence
KKTEGDLALSGKTVGEFIYDALLDKPKLKIRGHYVQTIDRDWYLAEMESILEVQARFHPELSNELLRDLIIQDLYPSNTSHQNSLKSKSTSHILARDIMFYHRPLKSKKSSIADCPYESRYYKDTTGKVIKKTVKVIHKSHPLYQEFRLWQWIDNLKIVPKDHKTHGTIEIDSDTRIKLFDYLTTQKEIKQNSLLKFLKIDNKTYQWNYPADKAYPCYETRNQLVTRMDKAGLDYTEIQNILKHEEELWHLIYSIDSSEEFNKALTKFATKYTVSNPDLFVEQMSKHPTYNNEYGAYSVKAIRKLLVLMRSNKYWSEQQIHSTTQERIQHIMSGELDESISNRVRQKAIHLEAISDFQGLPIWLANYIIYDRHSEVKTNHWTSPNDITHFLTKEFKQHALNNPIVEKVIRETLQVVKDIWIKYGDGQPHFFHEIHLELGTEMKNSADKRKRMQTNQMQAENENLFIRSVLRELSKEIDVRHYSPKHQELMKIYHKDVVAGQSKIDDDISQIIRKDNPTTNEVMRYKLWVDQKYLSPYTQSPIALSDIFSNKVEIEHIIPRSRYFDDSFSNKVLCEAEVNKDKDNQTALQFIKNNGGKTIQLNKGRQVVVSTEEQYTQYIQKTFSGKKQQYLLSEDVPDGFINRQLNDARYISKFVKSVLGNIVREQGEQEATPKRLIPMSGAITSRLKREWGLNQVWDSIVADRFTRLNEITQSSDFAHYDSHNHLKLTVPEKLEKGFNKKRIDHRHHALDALVIACTTRSHIQYLNTLNAKNYALGQTLRKTKTQNQDGTEYKSFGEFYPPWEGFVLDAKKTLSTTLISTKKNTRILTKTNNIYWTYEERNGKKIKVQRKQTKGDMYAVRKPLHAETYYGKRTLVEQKLKSWNDALKNPDLVVKKITKEYVLYALELHDQNVKKAHTYIKKNPLIIEGEKQDKVLLYNYLYGYSSKILLNEKIKKKQIEKIMDGAIKHIVKTHLANYDDNISEAFSEEGLTTMNTHITELNNGKAHLPIKKITLFTEGTPRPVGTSGNNHAKMVKAAKGTNLYFAIYQNTDGKRSYKPMELSELIERTLQKLPIIPEKNEQDVPLLFYLNPNDMVYMPTEEELENPHLFDHTSLTPDQATRVYEFISYTGNQAFFRP

SEQ ID NO: 7940 - protein, 939 aa, unidentified
  REGION 1..939: note = Description of Unknown: Cas Enzyme sequence
MSKILGLDLGTNSIGWALIDESEQQIVRMGSRIFPEGVIDLGKGEGRELSKNASRTEARGIRKQFFRRRLRKKILLRELTKYNMCPLTQKDIDQWKTDKIFPEEKLKDWFSLNPYELRSKALKEKLSLQEMGRILYHLIQRRGFQSNSRSAGSDTGVIFEGKGEKIGIEETRNSLIKHNTLGEYLNAIVPKEKEVFKQGRERVRNRYTTRQMYIDEFEKIWDHQVKYHESLTPELKVIFGGRKKDGYDQDGVLFHQRPLRSQKHRIGKCPFEPKKPKAPISAIEVDEFRVHQWINTLDCNIPLTSEDKELLIRQLYSKEKVTFSALRKAIKRSDSFYQFNYKDNDSIVGTHTISKLSNKKFFGKQWFDYTRKEQEDIWHILLSFEDKDKLAAYAQNNWGFDHKKAQDISSFNLKQGYMNLSRKAIRNILPFLKQGFSYDIATALGGVKNVLGEEWKALKDFELEIIKTNVPQIVRSKTKGGYIKSLRDFMQREFDVTEKQLDKLYHHSASIEANETLSRLPVNLEADREIQSIRNPIVITALFEIRKLVNELIDDYGKPDQIKIELARDLKISKKKRHETRLEQQRQERENDRVKKELERHKQRITKDALLKYKLWEECNQTCPYTGNPISIHQLFSGEVQIEHIHPYKRSLNDSFGNKTLCFVDENRTKGNKTPFEYYSQMSDAKWEMVKAQALSCFKNKKGYPKAYLKFKHFIRTKHDSDFISRQLNDTRYISKEAKNYLSKICSNVMVAPGQSTATLRHYWGLNTLLNAENKKSREDHRHHAVDALVMACTNREHLTELSKWNSVDRRYDLKEFPMPWETFRKDAEKKVREILVSHRKYNPVITKRNLGTAARGQLHKESVYGRRKSPNETEHSYHIRKPIETLTTLNQVDKVVDPVIRKLIHERIARIGGYEKGKNIPKNAFYETDIEGNLHPTV

SEQ ID NO: 7941 - protein, 1126 aa, unidentified
  REGION 1..1126: note = Description of Unknown: Cas Enzyme sequence
  MOD_RES 260: note = Any amino acid
  MOD_RES 300: note = Any amino acid
  MOD_RES 323: note = Any amino acid
  MOD_RES 506: note = Any amino acid
VKQILGLHIGTESIGWSLIRKSTNPRVVDMGTRVFSSFVNYLGEGDRETSSATFRSLTRNARKIHNRKLCRKRRMLFFLAKNKLCPLSQKEIMQWQNNKYHNSLDLRMDAWFALDPYYLRNLGLNKKLSPHELGRVLFHFTQRRGKIMNAVQDAGNAKVLLQGFPSVNRVGITQTQNNLKDQYLGEYLYSILPKKGLPYDYKVERVRNRYLSRSMCLNELDAILTNQKKYHDLVTDSFINKLIGDNNTDGLLYFQRPAQXRKNGRIRTDCPFEETKRRLLKSHPLHEWYLLYCWVDSIRXYGKKLNARQRETALKIALQFSSXMFKKVRVALKVDDAFAFNYEDSARVFLSHTLVQLYRTSAFGNKFQSLSELEQHELWHDLHFYTDKKMLKERLRKRWGLSVKKAEAVSEIKMQKGYGILSMKATRSILAYLKQGLNVDSAIALAGVQNAIGNKHWSKLKKDTKKEIENFISAAVEDDLFSNPDTWIEDFNDVFGIKLNTKKLYXTIFQNNEEHFLKINAAEDQELQRKFKPVAQKPIFELRKLINNLVKEYGAIDQINFVLDNALKASSKQRKQLCLAKKLRKQELPKIHDAVLDAGQNPTHANLFKYKLWVEWNKTCPYTNAPISLEKLFSHEVCIVYIHPWKRFFNDSDRNKTLCMRHFAPNIKNKTPYEYFSKQPSGVWERVKTRVFTQLTQGSAKHAYYQNFKHFTMANYTRDAISQEFNDQHQMALKLRHYLRQISPEVVAARGNAISSLRRKWGIGAVFSDVKTERHFSAKESAINAMVTALNESKFLEELKDWNRYEPTIHNVSFPTPWTNFKQDALSAITATSVSYAVDNKAVRKIIHKNSGTYTLSPKGKLHKESFYGLRKTAKGEESFHIKKKINSLATAKQVSKIVDDGVRELVYDQIDLCGGFINGKIPKNALTTPTDTGWETNVFLPNKRGDKVPVRSVRIRENVSNAVQLHEGVNKYVNPRNNHHVVVYKTIDNAYNEHIVSFWEVVRRIRNKEPMYQLPADGRLIVSTLHINDCFILGLSHKEIYRRLEEGISLWENVYRVQRLSSKYYEFRHIYDLDVYSQVYPNYIRILNFGDKKTGWLTHNPLKISISVLGKITPFYKPLKVPEMH

SEQ ID NO: 7942 - protein, 1153 aa, unidentified
  REGION 1..1153: note = Description of Unknown: Cas Enzyme sequence
MTSKQENLGALTIGLDIGIASVGWAVLGENRIIDLGVRCFDKAETAKEGESLNLTRRMARLLRRRLRRRAWRLTKLARLLKREGLIADANLFKNKIEKNAPVPKSSWQLRVDALDRQLTAEEWARVIYHLCKHRGFHWVSRAEEKAAEGDSKSEGGKVKQGLAGTKKLMTEKNYRSAAEMVLAEFPEAQRNKQGDYGKALSRILLGDELKRLFEHQRQLGNTFATEILEAAILGNGDRKSGLFWAQNPALAGNDLLKMLGHCTFEKSEYRAPKASFTAERHVWLTRLNNLRIVVDGATRPLNEVERRVVLPLPYLQAGDLTYKQLGSALIKEGFLQKEGFKFAGLSYPTKQASDEKAKDPEASVLVKFPAWQTLRKTMKDKGLETEWQKLSTDALEGKPEMFDQIAWVLSVYKDDAEVEVELRKLNLPNAETMIDALLDIRFDKFSNLSIKALRQIVPFMEQGQRYDEAVANIPEYGHHSQLHEVGAGEHKYLPPFYKERDKTGRMVFNYDMDIPRNPVVLRALNQARKVVNALIKEYGSPHEVHIEMARDLSRPLDERRDIEKLQKEFRDNNEKIKAQFAQDFNIVGTVKGKEFEKYQLYREQQGKCAYSVEPMDIHRLFEQGYVEIDHALPYSRSFDDSKNNRVLVLAKENRDKGNRTPFEYLGGKDNSERWRQFVAFVESNKSYRLAKRSRLLRKDFGEKEAKEFRERNLNDTRYICKFFKNYVEQYLQLHEDSEAKRCVVLSGQMTSFLRARWGLVKVRSDSDRHHALDAAVVAACSHGMVKRLSDYSRRKELEQVREGFVDIDTGEILNPAMFDQIEKHFPNPWPHFRNELEARLKLDNPALLREEMQRLGTYSEEALAIVHPLFVSRAPQRRNSGAAHKDTIYAQAPTAEKPNRVTQKVALSSLTLSDLGKIDDPETCKLIDPHRNEKLYAAIRTRLEQHGGKGDKAFPASNPLRKPDCVGNPTGPIVRGVTMVIDKLSGIPIRGGIAKNDSMVRVDVFTKAGKFHLVPVYVHHAVAKILPNRAIVAFKDENEWTLIDDSFEFCFSLYPNDLLRVTQKSGETIFGYYRGCHSGTAAINVALHDRYALGDKTTSLALHKKDASKPLPNDKLGLIEGIGVKLAANIEKFNVDVLGNRYPAPPEKRRDLA

SEQ ID NO: 7943 - protein, 999 aa, unidentified
  REGION 1..999: note = Description of Unknown: Cas Enzyme sequence
  MOD_RES 692: note = Any amino acid
MKKILGLDLGTNSIGWAVIDEDESYIEDTGVRIFQEGVVAKTIGKGDKEESKNAVRRNKRQMRRQFYRKRLRKIKLLELLIHEHMCPLNIEELNVWKNWNPQKKSLMRTFPESPQFMEWIRLNPYDLRARALHEEVTDEELGRIFYHLIQRRGFLSSRKTDEKESKTIYEKGLPKSNILPINTTKEKIKKSTLGEYLQTLMHKQNEPYKMCLSDGEETRVRGRYTTRDMYVSEFEAIWETQCKYKDLENRLELSKKIRELKGGIQRKGNALRINYLKSKYGEKNVIVEDLNGRIRVTTKQEIPLKEYLAGKIYAIENENGETILKYKSNESVLFWQRPLRSQKGTLAPCQFEHDMPVITAKHEFLLDKEGNIQKRSKSPCPVSHPEYELFRAYQFVNNVSYGRQNMHLTAEQKEMAVNVINSNKSTFKFSKIIAKLGLTYEKFNFEEDYSVAPNVTIATLSPLFDQKTWSDHYEEIWHCFYFYDDNDKLYEKLCKSFGYKKSIDDLKKVRLKEDYGNIFLKAIRNILPFLKKGYSFDRAVILGGVKNAFGNRWERFSDFHEEIERAVIGILREDNKEGEAILKIRKYLSAPENHYGFLEDDPYFSYLYHHSQDVNISDECEKLLPAVDNLRNPIVQQSVNEMRRLVNNIIKSLRHKYGDDFAFDSIHVEMGRDLRNGKKKREELSQQIKKNXAKNEEAVQRLNEYGLQPTRNNIQKYLMWKEIEEKAGVVRCPYTGKTISISSALGSDNLIQIEHIIPYSVSLNDSFSNKTLCEANFNRKKGEKTPYEFYQSNPSPELWGVDSWDAVEERAFKLLPYSKAKTFTNKHKLDKSEFIERQLNDSRYIAKKSVEILSNICKDVRVMPGQLTAELRHLWGLNNILQSTDVIDCEVPDLKNDYMCNCYAVRNEEGKIIRLAKTENDKPITHSNEILIPANVSVSEKQIKLKYFTLNIKIPENRSYENGEYLAKFHVSDDISVYPKYVERPYSDEDHIIFRGQIQ

SEQ ID NO: 7944 - protein, 1052 aa, unidentified
  REGION 1..1052: note = Description of Unknown: Cas Enzyme sequence
MAYRLGLNIGTNSIGWCILDLGLGDCPSSILGAGVRIFPDGRNLKSKLSLAVERRLARLTRRRRDRYLRRREQLIQSLIHLRMFPASLGGQKRLESMDPYALRAKGLTERLSLLEFGRVLFHLNQRRGFKSTRAVETHAAVGKIHPAVDRLRMLMREKGSPTLGAYLHMRREQGQSVRVRLQGVGSEALYEFYPDRALLEEEYDLLWQVQTQYHPQLAESAREKLRRIIFSQSSPRAVHPGHCPFEPTNERAPLALPVAQHFRIYQEVNQLRITTPEQRERSLTLGERDIIANLLLAGKNVSFNSMPGKLGLEPGHLICLEGSNKIKLEKDLTSALLAQKGHYGPSWFQLNDVEQERLVLLLLEEESVDLLVQELVDNWGLSEDRAQVLALLDLPAGYSRLCREALAAVTAQLKADVVSYSEAVARAGYTARPEPQSGTVLDRLPYYGIVLERHIGFGSNLPTDNLAACYGRLANPTVHIALNQLRRVVNELIKEFGQPKQVILEVARDLKHGLQARQEIQRRQEEQHRATESWRKELRRMGLLDSYSNVMRLRLWEELGDAPVARCCPYTGECISPAMLFSPEVAVDYILPFALTLDNSPGGMTVCLRRAKLYKGSRSPYEAFGGSPDGYSWEGILGRVATLPKFKRWRFSQDARTRYEEKGDFLDQQLADTQYIAKVFREYLCAVCDSDNVWAISGRLTSLFSRQWALPRKSRDDYRHHAQDAMVVGVTDLTILQSAAAQSVHNIHLGPEHLLAGLEAPWPGFRSEVEALLSRIIVSHKADHGIAGKLHSDTAYGVLAPNGEPDNGQRRVPSTAITEPVHILAVKGTSLRAQLLRAVTGQTLSQCHAELMALATLRASEVKERLRSLVPLSATAFADRLNAFLARRGIRRVRILETLTLIPIKDRQGRVYKGFKGDSNAYYSIHQGATGKWVGRTVSTFEANSPGGEGDLQAFPLVIRLFRHDMLEIQDNGERKIVYVVKISRGQIALAEHFEANVDKRARDKKKSFNLTYKGSPATLQACHAKPVFVSPAGKLRYVKITALANGVEVQV

SEQ ID NO: 7945 - protein, 1373 aa, unidentified
  REGION 1..1373: note = Description of Unknown: Cas Enzyme sequence
MKKILGLDLGTSSIGWAIVNEGENDNEQSSIIKLGVRVNPLTVDEQINFEKGKSITTTADRTLKRSARRNLQRYKLRREALKKILFEKNFISEKTLLSEQGNRSTFETYRLRAKAATEAVTLDEFARILLMINKKRGYKSSRKAKSKEEGSLIDAMDIAKQLYETDWTPGEFVLHLLQSGKKYIPDFYRSDLQAELDKVWNIQNPFHSEILTDDFKKQLENQGKVNTVKIFLGRYKIYTAENKGADKRLQAYQWRVDALHRELSKEELAFVISEINGSLNQSSGYLGAIGDRSKELYFNKQTVGQYLMAQLEANPNTSLTNQVFYRQDYLDEFNILWTTQCKFHPELIDELKKDIRDVVIFYQRRLKSQKGLVNFCEFEQRQIEVIVDGKKKTKIVGYKVCPKSSPIFQEFKIWQILNNVELTDQKTDAERPLEQEEKELLFQELTIRDKLTKDAVLKLLFNKSKDFDLNFKEIEGNRTIAALYRAYAQIVDMSGHGEIDINKTPVKEVQEKIKTVFEALGYNTDILEFDSSLNAEAFEKQPLFRLWHLLYSFEGDNSNSGIENLLQKIKKDFGFEKEFAQILTAVTFQPDYGSLSAKAIRKILPYLTEGNEYSLACEYAGYRHSKASLTKEELDHKQLKDKLTPLPKNSLRNPVVEKILNQMINVVNLAIQTYGKPDEIRIELARELKKSAKEREDMTKSMNEATSAHEKYRKILKEEFGLEHVSRNDIIRYKLYKELESRGFKTLYTQTYIPQEKLFSKEFDIEHIIPQSRLFDDSFSNKTLENRAANIEKGNETAFDYVASKFGDDGIDAYQKRLEDLLKEGSISRGKYNKLLMKGSEIPDGFIARELRDSQYIAKAARQLLEELVRDVIPTTGSITNQLREDWQLIDVMQELNWDKYEKLGLTETFKNRDGKEVRRITDWTKRNDHRHHAMDALTIAFTKRSYIQYLNNLNARSDKSSSIYGIQEKELYRDKNNRLRFKPPMPLNEFRASAKEQLENTLVSIKAKNKVATSNVNVTQKKGGTNKKNQLTPRGQLHLETVFGKIQKPLNKEENVNASFTKDKIAMVGNPKYRIALLARLAAFDNDPKKAFTGKNSLQKNPLWLDEKQMEQVPEKVKTTGFETIYTIRKEVGPSLSVDKVVDAHIKAILVERLLQFDNDPKKAFVNLDENPIWLNKEKGIAIKRVTITGISNATALHNKKDKDGHLVVDEQGNKIPVDFVTTGNNHHVAIYRDEKGILQENVVSFFEATERVNKGFPIVDKDYKKDEGWTFLFTMKDNEYFIFPNEASGFDPKSIDLTDPVNYALISPNLFRVQSKSSKDYWFRHHLETSVQNNENLKEIAYKRCRSLSFALTIVKVRVNHIGQIVSVGEY

SEQ ID NO: 7946 - protein, 1468 aa, unidentified
  REGION 1..1468: note = Description of Unknown: Cas Enzyme sequence
MARKIGLDIGSSSLGWLVSEDGETIKKGVVVFDTGMSKGQSGGYVSPTRERREARSKRNLIRARKYRKWALLKVLIENDLVPINTAELEIWCRYKKGQTNKFPENKQFLKWLKCDFSYLGIKTKYVNPYDLRINSIDNKVSNHEFGRALYHIVQRRGYKDIGEIDTETEKQITRRSESGFQKALDENRTVAEALKNEFLNKNERARNQYPYRDEYRKELEEICKKQGYDISKNAKGIYNNTFVFKLWKAIIWQRPLRTQKGNIGKCALETKKLRCPISHPVFEIFRTWSFINTINYLDENGEKQPLSNIFKQNLFEWFLKKEANFKFEDIRIFLDKKFGQHNKYNYPLDKKQENKSKGYEIEEGIYDTSVSGMPVCKGLIDIFGENIKQGLYSIENYNLGNLAKKGGFGNAPKCIDNYSVYDLWHAVFSFDEIFLEKFAINKLGIQNTIRKRKGIDITISPLVELKKKFLQGYCDLSLKAMCNILPFLKQGYLYNEAVVLAKIPELTADIWEEQKEKIITAAKAASQIYEWNKTIIDISNKLIDKWKGDKYFADKDFSYSLQQSDIVDIEKMCRSHLGEISWMRQERKDEIINAVKDEYSEFFKDNKRSYRKGRTLTDTFNELLSELKIGIAVDKLYHHSNINNKYTQKCQIEPNTEKPILPKAMSKFGYIVEILPNAIIDSIKNPMFNKSMSILRKLINELIKDGTIDKETEVIIELARELNDNNKRIAIERYQNERKNKREKYREFLKEFSIRENRSFNIEESLATFELWSEQTFAETKDEKGNKIRNKDHHEILREKEAIKRYELWIEQKGQCIYSGRVISITKLFSSEIDIMHTIPRSLLPDNTMANMTVGFSSYNRDLQQHKLPKQCENYSKDVENWGAAIEPRLEKWKQIRDHYKKLFEERLKPKGNEDENSKNKRIQDRHYFKLHYDYWNDKVARFEADEISDKWARRQIVDTQMTTKYAREFLKTYFNKVAVQKGAVTAVFRKIYGFQEETAIKSRNRHTHHAIDALVLTLIPSNSSQRECILKDYFKAIEENKNIHLFGKYDSQKHINNIEKTTLIYNYEKDKVLKQTAKTIRKRGVKQYLKDKNGKFILINGEKILLKAKGDTVRKGLFAQTYLGKIRIVERDENGNPQKSGNGWKFKTGDEEYSFVVRKPIKDALSKIDDIVDPILRNHIRKQKNNNVIKDFQGKEIRHVRIKVKAGKEVKERLNFRSKHHYKNKFYAEAGSIPYAILLEKFSNSGDERRVLPITSHEISKSYKQFRNFNIEQYIQKNNSNYSLWNKTLLKVGQKVFVLNEDAEYEMRNNNDFQRNRMYVITQFSDGSIWLKYHLNALAKEEIKNMVSLKKDEVLLEYEKQSNLSEIAEDFTISDYKTRKEDFDKRRFRFDSIDNSFRLSRLVEKIGLEKVKLIKKELDQFKAIPSKIEIEGETALLKTTNWNFLVEGRDFKMNIDGSVNFDFQLNE

SEQ ID NO: 7947 - protein, 1417 aa, unidentified
  REGION 1..1417: note = Description of Unknown: Cas Enzyme sequence
YDNQIGWNRLEQKWYGKFIDNQEPKLAWNEINGKNQFLFMDSFNEMLKEFAVNQPNLVIGNKKVPLDWTIYYLRKKALLEKISKKELAWLILNFNQKRGYYQLRGEEEEDATKTIKTRKYFDKKKILNIIDSGKEYKGLKVLIVELEDGNKGKIFKKEIPKWIGLEKNIIATVDIDITGKDKYDDDGFLSQRFSIPTDAEWETEWKLIKLKTEKDLTDSKKTVGTYIYESLLQNPSQKILGKLVRTIERKYYRAEFEEILNTQTKFHKELTDSTIFAKCVDELYQTNYSHRQNIANWSFTEFFVKDILFYQRPLKSKKTLISDCPFECRYSSDGERRGIKCIAKSNPLFQEFRLWKFIANLKIYQREKIVDGRMHYDYDVTQEYLKNEDDYVMLFEWLNDRKEIEQNVFLGQYLKLNKTKAQEFRWNYVEDKSYPCNETRAAILSNLKKANISNDFLNDDIEQKLWHILYSVEDKFEIEKAITKFAEKYNLEENFIAIFKKFPPFKKEYGSFSQKAIKRLLPLMRMGKYWEEKEIDVNTRKRIDKIISGEFDEKIEKRVREKAINLTEVGNFKSLPEWLASYVVYNKFSEAKDTTKWENSKQLDEFISSFKQHSLRNPTVEQVILETLRTVRDIWIKQGHIDEIHVELGREMKNDKKERERLTKMVTENENTNQRIKAMLMEFKNAEYKIDGVIPYSPTQQEILKIYEEFALGNLNKEDRDFEFVSKIAKNSQPSKSEILKYKLWLEQQYRSPYTGEMIPLGKLFTPDYEIEHIIPQSRFFDDSLSNKVICESVVNKYPYKDNQLGYEFIKNNEGRIVPELSTSHKSVKIFTKDGYEKFVKQHYAGIKGKMKKLLMDEIPQDFIERQLNDTRYISKEIKRLLSNIVRVRLENGEYELEATSKNLISITGGITSQLKQEWGLNDKWNEIVLPRFERLNEITGTNDFIAYNKEGHKIPRVPFELSKGFTTKRIDHRHHAMDALVIACATRNHVNYLNNESAKDENKRYDLKHSLCYKSKTDDKGNYKWSFIKPWDSFPQDVKHSLDNVVVSFKQNLRIINKTVNYYQKFDENEKKQFVKQLSGENWAIRKPMHKETVFGEVNLRKIKEVSLNIALENPKVIVDKDLKNKLIELQITGLDSKKIKKYFEDNMDVWSDTNLGKIKVYYFTKDTKERYFATRKPIDTSFNKDKIESSVTDSGMQKVMLKHLALYDNNPELAFSPDGIDAMNRNITQLNGGKNHKTVSKVRVYEKADKFAVGDSGNKKTKFVEAAKGTNLFFAIYQVEKYNEKEDKTEVSRTYCTIPLNEAIERLKKGKKAAPETDQNGNKLLFVLSPGDLVYVPDSEENIATLNPKIIDKSKIWKIISFTGKRLSAIPYSIASIIFDKVEFSVTNKVEFIKEKDLCIPLKTNRLGEIVSIGV

SEQ ID NO: 7948 - protein, 1434 aa, unidentified
  REGION 1..1434: note = Description of Unknown: Cas Enzyme sequence
MKKILGLDLGTNSIGWALVDLENNKIEGMGSRIIPMGTDKQDYEKGVGITKNATRREKRTVRKGNKRYKLRRNKLIYILNELGMLPEQFHLKNGIPEATKLQELELLPVSKKTKQLDALGLLELKVKALNSPIELKDFGKILYQFNQLRGYSGGNNDEDKKMKKDEDEDGEKKKYEVFIQKMKIGNIEQLDGTFTSKGEKLHYYNVTFIIDEEEKEGRTKLQNLQDKIGEEEEFEVRIRRNKKGEETSIEVALPQKSNWRKAMELSEKTLKEENLFISQLRLRDLQQNKWTKIRNRVFLRNRYKEEFDKIWETQEKEFPFLKNCPKETLEKIANYIFPGNSESQLKLRKTAIEEGLKYIIKEQVIYYQRPLKPQTELVGNCRFEKEEKVIPTSHPFFQEFRCWKQINNLFITSKTLIGNKYAYQNRYLTTDEKLAIYEKLQTQKEVGFATVIEILNQDKNKGKLDKEQKDYFLNGLNVKAKLKGCDTLISFKKELGDYYNGFISQNKQLVEQLWSVIFDVKNHDGSEYDVKSTRVSSIISVLNNYTDEKTAIELSLKLAQKIKFPRKYASLSQKAIQNILPLMIPNPLNIPETIQQQFKNIQHLIETGEIINDLKYKLEDYVVDFVKNNPNVLQDGELMESFAISLIYGKHTSETIKPQIKNYHDIVEDKERAKNLRNPIVAQIANETMQVVKAIWKQYKFNPEELEIRVELARDLKNSAAEREKIWNGQRKNKTINDKAKDRLREEGIAITEENILKFRLYEQQKYMSPYTKKKIIPFSKLFDDKEYDIDHIIPKSRYYDDSFSNKVICEKYINEEKSNRTAWEYITQQNSKYKDGSGELEILSANDFLNHVNDNFFGKKKKNLLAEKIPSNPVERQLKDTQYISVAIKSELAKIVGSEKVKTSTGEVTDFLRSRWGLRKLFMNLTESRFKQMELWDLDENGNPKTSWITKYFDKEKQKHIYEIKNWSKRYDHRHHSIDALVVALTTQSHIQRLNNLNKYYQDELTARKDEFKIETKEGESIFEGFFNLEAERRDEILKEIESSRKFDAPFPIIDENGNPILDKNGNPKSHLVDYVRKHLETMIVSHKTKDNLGIKINEKTNKKQLKIRGALHQETYYGKLNGRDTKRVEMSSLSITKDKITKQEQIVELIDKVLEKEIIEHKKKYDSMKEAFTGEGLKTFNNKRMAVSKQPVYKVKVWYNKEEKKESGLQRLYENNSKQSVITGDNYLFLVMEKNGKRIFDIASLYDSVSIANEALKNNIYDFKKKIVEDYRVKHKDKPEKTLFTLQKNELVYLPTNKDDEILRKTNTELAEWLSIAENKSIFCKRVYKVVKFTGKDCFFIPHNFANTISVAKDLSKEDQQELKEKYGEKTIPKQEKNYEEFGSFGTCAKTEVNANFVKELVLKKEFEDESPMKIQESCIKIQIDWLGNISI

SEQ ID NO: 7949 - protein, 1237 aa, unidentified
  REGION 1..1237: note = Description of Unknown: Cas Enzyme sequence
MKRILGLDLGSASIGWALIEENDNKTSIVGLGSRIIPYEGTEGKDFAKGTGESRNSLRTKARTARKGYDRYQLRRKYLVDALVKANMFPDETLKNLPKIELWALRNKAVHSQITLKELGRLLFWLNQKRGYKSSRSDANLGKKDTEYVATVKSRHEKIKELNLTIGQFFYQELYNDPFFKVKENIFPREAYIEEFDAICNTQKQFYPDTLTKEFISKLRNEIIYYQRPLKSQKGLVSVCEFEGFWRKGKDGKEYFVGPKVAPKSSPIYQLSKMWENINNIKVSSRIGGDIEITPEQKHAIFQHLDNNEKLTVTDLLKILKLDRKNCYVNKQIEKGLVGNITKHAIRQCFGDSLKYTHLLRLELNIVENDKKGYLVDKKTGEILNEKTTQHIDAKIEHEPLYQLWHTIYSIQDKQECSNALQAKFGIEQTIADTLADIDFSKYAFGNKSAKAIRKILPYLMEGDKYSEAMSYAGFEHSDSLTKDENLKRKLLDTLKPIAKNSLRQPIVEKILNQMVNVVNAIIEKHGKPDEIRVELARELKQSKEERNDTDKAMSKRQRENENITKRLAEYGLKATRNNIIKWRLYEEIDNEEKKLNAVCIYCGQPISLTEAIKGNDVDIEHIIPKSKLFDDSQSNKTLAHRHCNKNKNDLTAYDFMKSKPTEVFEAYIERVNSLYANYVINKAKRDKLLMPEDKIPDNFIDRQLRESQYIARKAREILQTICYNVWATSGTVTAELRHLWGWDEITMNLQFEKYKQLGLTEIVEWESEHGKNKHKKEVISGWTKRDDHRHHAIDALTIACTKQGYIQRFNTLSAEKTREDMKSAVEQKSVVFNEKRSLLEKYIISEQPIEVSKVEDAVANILISFKSGKKVAVIGTRKTGTRGNKKVVQTGIIIPRGSLSEESVYGKIQTIDERKPIKYIFENPQLIIKPYIKQLVEERIEAYKEDIKKAIASLKKEPIYLDREKEIVLEYASCYKTEYVIKYSVDINFNKADKVIDGKIKAILQQRLDKFGGKAKEAFKDVQLDDKSIIKWYEDEGLERPIKSVRCFTGLSAVVPVKKDEEGKDIGFVKPGNNHHIAIYIDKDGNRFEHVCTFWHAVERKKYGIPVIIKDASEVWDKIQLQPEGTYPESFLEKLPDVQLKLELSMQQNEMFVLGMTNEDVQTAIETEDYKIISDKLYRVQKLGSSDYTFRHHLETQLSNEENAKFSKRFYRIKSTGSLFGLNPYKLKVDRLGNISI

SEQ ID NO: 7950 - protein, 1434 aa, unidentified
  REGION 1..1434: note = Description of Unknown: Cas Enzyme sequence
MSEILGIDLGTNSIGLTKRTTELGNNIIDQLEFFSSIIFQKGVGEKKGVEFSYAAERTKHRSTRRLYQARKYRIWETLDVLMKNGFCPITENQLDQWRRYDKSKGLKRQYPVDAIQFEQWVRLDFNGDGIADYSSPYQLRAELATQQFDFTNQIDRYKLGRALYHIAQRRGFKSSKGETIKEQEKEAEEKELSPDVEIQIDLKKSEEKKSKDLIEYKAEHQLPTVGSCFYQLEKDGIRIRAGKFQAVRSQYEEEIKYIFEFQKALDIDSNFYRAIHKAIFFKRPLRSQKGLIGKCTLEPSKARCPISHPEFELFRALSFINNIQYRKTSSDEWLNLSIDLKESLFEDKFLRIKNNFKFEEIREWLQKKVGFYLSTDDKTINYKDKTNVAGCPISARLKNLLGEDWKNFKKETSKTRLNKKSGEIHTVSYSMEDVWHVCFSFEDEERIVEFAKNALQFDEKQTKSLINLWTAIPQGYSMLSLKVIRNINRFLKKGLIYTDAVLLAKLPDILGEELWKENEGLFLSKIALITAENRIEKRTLNIVNNLIANYKSLELDEQFAYKNTSYCLDQSDFNDIEKITIEGFGEKTWGRLKQEEKDSILSEVGEKYQQFFSSSKRDFYRLPKLGETLKSYLSNNPAINFLHCENQFIDSSTKLPCQCSACRKLNLLYHPSQIEFYKPAKEQTIDWKGTALSLRLLESPKIGAFKNPMAMRTLHELRKAINHLLKEGIITEDTRIVVETARELNDANMRWAIQAYQNERKKENEIFEEAIKELYKGTERVITEDEIDKARILVEQSDIPEFGELTVDISENIKKKKTKEKGILYSKDVTKYRLWLEQGCRCIYTGKMIKISDLFSDSKVDFEHTIPRSISFDNSLANLTVCDAHFNRQVKKNQIPFQLSNYEDILGRLQPWEDKVERLIDNVNFWKAKAKQAQTKEPKDNAIRQRHLWQMELDYWQNKLNRFKMEEVTSGFKNSQLVDTRIITKYATHYLKSVFNSVDVQKGSITAVFRKILGVQSIVEKKSRDKHSHHAIDAAILTLIPSAAKRDKMLKLFYEIQEKERLENVDYLKTELDKERRNCHLGNVSGISQFIEEHILINHISKDQALTPAHRKARKRGQEIFVVDKNGNEKTKWITGDCIRGQLHGETFYGAITQAKKNEDGTFLRDADKKLIIEDQVYYVVRRELRYKKNSQDSGFVSLDDLYPKIVDKNLFRIIEKQCEGKSFKDVCEEGFYMFDKKGNKINRIRHIRCFTEIKNPIIVKQQTYLSKKTYKQNYYSQVGDLYVMCLYKNGTQKEYKIYSLFDIAENRRLDQVDIPVKLVSKRNNNTLCLDYCMKSGTTIILRKNETEMVQELDRSDLLKRVYVVSGFENDGFRVILKQHLNAQKDKDLGKGESTKDFDNLPQKIRCGINTLNFLICEKDFIISIDGNIEFLVK

SEQ ID NO: 7951 - protein, 1568 aa, unidentified
  REGION 1..1568: note = Description of Unknown: Cas Enzyme sequence
CIMKKILGLDLGTNSIGWALVDADEKIILGMGSRIIPMTQDVLDTFSGGKPLETQTAARTSYRGIRRIRERHLLRRERLHRVLNVLGFLPEHYVQEIDFDKHFGQFVDESEPKLTYNNRNFIFISSFEEMLSDFKQSQPQLFYTKPNGKETKIPYDWTIYYLRKKALSQKIAKEELAWIILNFNQKRGYYQLRGEDDADATRTAQTRIYFDTQIINSIVDTGSVYKGLKVIQITLANGDSGKYFSKEVPNWIGLQKNIIATIDLDKDGNDRFEDDGTLKRRFSIPTEEDWEKKWKLIKIKTEKEIKDANATVGAYIYENLLQNPSQKIRGKLVRTIERKFYKEELVAILKKQIELQPELFTDDLYNDCVRELYRNNEAQQFVLSKRDFVHLFVEDIIFYQRPLRSQKSSIGNCTLEKHPIKDKDGKIVRDDNGKPVLVPLKVISKSHPLYQEFRVWQWLSNLKIYRKEDDADVTTEFLKNTEDVVNLFEFLMKQKEVGHKDILKHLVNPILKEKFPNAKPAAFNKEVDKEIAKYRWNYVFDDSKEKEEDKSKKYPCNSTGFIIREKLKKVENVPNGFLTPTIEQHLWHVIYSVTDKKEYEAALKSFANKYKLDENSFVEKFRKFQPFPSEYGAYSEKAIKKLLPLMRLGKYWSWNAIDTKTQSRIEKIITGEYDENIKTRVREKAINLIDNNHFQGLPIWLASYVIYDRHSEVESIDKWHMSHDMQEYLYYFKQHELRNPIVEQVITETLRVVKDVWEHFAELNHIPYSLIYDEKKKKNVKSYNSYFDEIHVELGREMKNTADDRKRLTDQVTNNEVTNLRIKALLAELKENSDGKLPVENVRPFSPMQQDALRIYEDGVLNSTIELPEDIVKISKSSQPSKSELQRYKLWLEQRYRSPYTGQMIPLGRLFTEDYQIEHIIPKSRYFDDSFNNKVICESAVNQLKDKLLGLEFIKKYPGQKVECGMGKVVEIFSEEAYQTFVKDHYAKSKTKRQNLLLEEIPEKMIARQMNDTRYISKFISSLLSNIVRADKEDDGINSKNLIPGNGKITTILKKDWGMDAVWNDLILPRFERMNQLTNTDVFTYWNEQYQKYLPIDSVNIDSKQVKIEKKRIDHRHHAMDALVIACMTRDHVNYLNNKNAHEKGTNDEKGFRYDLKNKLCFKTKLDDKGNYKWQLKKPWSKIETEALIKADNDFTIDAKNKLETVVVSFKQNLRVINKATNNYEKWVEKEGKKVKAKVKQEGTNWAIRKSLHTPMPYGKKSYSFDLLKIAESVGKREYIIDDEIKAKVEKVLIECNGKITEAQKRLKQFPLIDNNGNPIIQTAFRIDTEKFRRRQQISLLSNRGQGGVKNIEDAKKVIDKIVDFKIRKDLLQHLKECNEDLDKAFSPEGIESFNSKRKIPIYKLPIGESGSGRFCVGNKISTKHKWVEADKGTNLYFAVYESKEGKRSYDSIPLNVVIERLKQGAPPVDLKNENDFYLTPNDLVYVPNEDERVNIKNLNPREFNQEQRRNIYKVVSFTGNRLSCIPHSVATSVVNKLEYTQLNKIEFTKEKESLIKLKVDRLGNISI

SEQ ID NO: 7952 - protein, 1170 aa, unidentified
  REGION 1..1170: note = Description of Unknown: Cas Enzyme sequence
MENILGLDLGTNSIGFSLRNPNINSDIIQQFENYGSTIFKKGVGSEKGVEYSYAAKRTQKRSVRRLNQSRKYRIWETLDVLMKYGFCPITEDELNQWRRYNKAKGLNRQYPVDAVKFEQWVKLDFDGDGKPDYTSPFQLRKELASIQLDICIEIDKYKIGRALYHIAQRRGFKSSKGESIKEQEKEAEEKGINNDTDITIDLKKSEKKIAGKIEEYIEKQKGKGIEIKTVGWALAELENEGERIRENWTPIRLQYENEIKYIFEFQDQLTIESEFYSKIHKAIFYKRPLRSQKGLVGKCTLEPTKERCPVSHPEFESFRAWSFINNIQFRERDIENGGWINLKQEDKEAIFEHCFLRTKANFKFEEINFFLTKRFNHHYAFNYKDRINVAGCPVSARLKNLFGEDWRNYKFDSIQSRIDIKGNSHIITYSIDDIWHVLFSFEDEENVHDFAENKICLGNKSKAFLNLWLAIPQGYSMLSLKAVKNINRFLQKGLIYTDATLLAKLPEILGNDLWIENETFFLTHIGELTVKNRKHRKILNITNNLISQYKAKSIEHNEQFAYKNTNYSLDESDLIEIENHCIDSYGEKTWADKMTEEERLQIKSQVTKYYQEFFSSSKRDYLKIPKLGDAIKEFLTDNFDFLMCKNTDRKKDETCSCSVCKKVNLLYHPSQITIYSPAKEQSVEYNNLTLSLRLLQSPKTGAFKNPMAMRTLHELRKLINYLLLEGKINEETRIVVETARDLNDANMRWAIEAYQRQRESENKEYEIAIRELLNDSDFIGNANPSNDEDIDRMRLLVDQYDIPEYVELVIVPEPNGKSKKEKKKIERVESFNRSPEFLRIIMQEKDLVKKYRLWKEQEFRCIYTGKTIKITDLFADNIIDFEHTIPRSISFDNSLENQTVCFADFNRNIKKKKIPYQLSNHAEILARLNNWKAKIERLQDNIEFWKLKSKKASDKDNKDYAIRQKHLWQMELNYWKGKYDRFTMKEVTIGFKNSQLVDTQLISRYALHYLKSVFSSVDVQKGSVTAAFRKIIGIQDEYEKKNRDRHSHHAIDASVLTLIPKSATRDRMLELFYKKQENKDLINGNMNSIEVAYLKAENGKIESDLQFEIHKCKIGSANKIVETIEDNIIVNAITNDKALSPARKVMRKRGKPVPIQDTNKKPVFITDANG

SEQ ID NO: 7953 - protein, 982 aa, unidentified
  REGION 1..982: note = Description of Unknown: Cas Enzyme sequence
MARILGLDLGTNSIGWALIDDAQNKILGIGSRIFPMGVENLGDGEGEISKNASRTGARGIRRQFFRRKLRKKILLKALAENQMCPMVTNDFEDWKKTKEFPSEKLANWFALNPYELRQKALNEKLSLEEIGRIFYHLIQRRGFLSNSRKGGSDDSAIFKGNPKEGKIGITETQERIQDKTLGSYLFEIYPKENQPFQDGLERIRNRYTTRKMYVDEFELIWNKQSQFHSQLTNELKTLFGGRKLDGYKEDGILFHQRPLRSQKHLVGNCSFEPNKTKCPISAIPFEQFRVWQWVNTVEYNGKKISQEEKEKIVEFLYANEKPDFKKIKKAIGKESTEFKFNYKDDDKIVGTHTISNLSNKKYFGKKWFEFTEKEQEDIWHVLYFFDSKSNLKEYAIKNWCFAQEQAESIAKFNLKDGYSSLSRKAISNILPFLKLGFTYDVAVVLGGIKNVFGSEWEKLSDEKRNYLIDNVYEIVRSKTKGGFIDIIKDILRNDYNISDHQLRKLYHHSATIDVVELLEKLPVGKEADKEIQDIRNPIVITALFELRKLVNELIDEHGKIDEIKVEMARDLKISKSQRNKIRREQKRLERENDRVKARLLEEGQRITHDNILLYKLWEECKRTCPYTGKPISVTQLFSGEVQIEHIHPWSRSLNDSFSNKTLCYADENRKKGDKTPFEFYGNDDANWSAIKERALKLFSDTAAYPNAYQKFKRFVQQKFDEDFSSRQLNDTRYISKEAKNYLSRICKNVIVSPGQATSNLRQKWGMNNILNDENEKTREDHRHHAIDALVMACTKVSYVQELSKWNRYNRNSELKNFPLPWETFRKDAEVTVDKILVSHKKVSNDITIRTHKCEKNGKTHVNVGVAARGQLHLETVYGQNKNCKSDEYVYRVDINNLSFSQLTSIVDLNLKQVILTEIFKKLESTEIEFFNMMNSKVKNLDKNQQKKIKEKIDKILKETSFFMPNEGKRYARLNKVEPNDIE

SEQ ID NO: 7954 - protein, 1016 aa, unidentified
  REGION 1..1016: note = Description of Unknown: Cas Enzyme sequence
MSKRVLGLSLSADAIGWALLEEVHGRPDGIVDLGCRVLGKAGKKKTPNSKNAECRNAGLTRRILQRRARRKQQALDYLLKLNLLPQALKASPNPEVILNRIGNPYHLRAKALDHKLSANELGRVILHLVQRGSCPRSRKALPGDMIDDPDALAVLAEFGEGDAHAERGNEETDLKKDVAALRRAIKETGCRTLGEYLSRPDLRGHKHNPAFGRRLRTDRQMYQDELELIWQQQQCHHALLTEQVKEQVERIIFYQRPPESRVGRVGRCALEPKRKQAGMARLESQRFRYLQTINSLAYFKDGGEQGVFLSAGQKGKLIPLFEAEADVAFSKVRAILGFDESMEFNLECSHKTLKGNVTACRIRKVLSVWDGLGTEKQEALVEDLLTIGKKPVLKKRLIAHWGFSPATAASLCLLELEPGYCPLSVKAINKLLPFLYQGQSYSDARVSAGYGFEVQGMEIKDNLGLPPEIANPVMQKGLHELRRLVNALIAEYGKPDAIRIQMARDLDMKAWRQAEFVRQQKAKARANEEAMQMFQDMKRRYPYLNPADASDRTVQLKYRLWRDQHQRCAYSGLRISSSALFGSEVEIDHILPYSESLDDSYMNKVLCYRKENRSKGHKTPIDAFGGHEAHWHNIVQNLNRWDRSLASKKKRFFMTAAELQKTDFIGRQLNDGRYISRITHDYLRKLGVEVSVGKGMMTAWVRQRWGLNNQLGSAPLKDRADQRNHAIDALVIACMDRPFYKRLVEAARELEHKQPQLNLDDLPVEPAWQTLREDLQHALDSMIVAHAPLLNEIGTGRAYRRPLDGTFTHTNSIIDPAVRKIIVQHLECCNNKPKAAFAEGVTVYHKDGKTPIRRVRILRPETALPNPEITETGAIGEQGRGFKRLDGLCHHVKIFRNKNTGEYIGDFVSMREARHQGRAAGKQKQPVIKTGQIEQFEFVMALHVNDTVSVEQAGRRIFYRVQKLDAGSNGCMLRLYSAASSDGKEEEIHFSIDEASFDRWQLQKHKINAIGKLIGC

SEQ ID NO: 7955 - protein, 1056 aa, unidentified
  REGION 1..1056: note = Description of Unknown: Cas Enzyme sequence
MKYRLALDMGSTSLGWAMVQLNGQGAPCAVIRAGVRIFSDGRNPKDGSSLAVTRREARAMRRRRDRLLKRKARMMQSLQSLGFFPGDEAARKALELLNPYALRAKGLDQALTPAEFARALFHINQRRGFMSNRKTDKSDSDSGALKTAISSLRTAIDPSGAQGKARTVGELLYRRMTDLSKRQEERTVRARYRQERVTRDDGKTRIDKSYDLYIDRAMILSEFETLWAKQAELNPSVFNPAARQELHSRLTHQRPLKPVRPGRCTLIPDEERAPLALPSQQRFRIYQEVGNLRILGEHLNDFELTKEQRDSLVAALERGNKSFKTAIPKLLGLPGTVRFNLADTKRTELKGNTSSQILGRKDLFGEAWHGFDEAKQDAIVMRLVQEESEAALVAWLQAETGVDEPRAERVANASLPEGYGSLSAKALGLILPELRKAVVSYADAAKAAGFHHSRLSDNTEVSGRTFKLEQIDPSTGEIKLFHVFHELPYYGEFLQRHVGFADPKASPEDLAEKRFGRIANPTVHIGLNQVRKVVNALIQRYGHPSEVVVEVARELKQNQDERKEQSEHQAKNQRRNERLRAQAAGLLQCAPERVRHADVERLILWEELSDDVADRRCPYSGVQISAEMVLREQVEVEHILPFSRTLDDSKNNKTLAMRWANRIKGDRTPWEARADFAAQGWDYAGIQRRAEQMPNKGKRYRFGEAGYQQWLKGADQDGKGFLARALNDTRYMSRVAREYLSLICPQGTRVIPGQMTAMLRKNFGLNGILGLDGEKNRNDHRHHAVDACVIGVTDQGLLKRFASASADARKQQLDRLVENMPDPWPSYREQVRRAIGDQQTIPVHVSHKPDHGHEGAMHNDTAYALLGAGRVAVRKVVDGVRTREETALKVIEFSSAKALHRHGQLPDGSPRPYKGYKGDSNYCIEIVRGDSDKGKWAWEIISTFDAYQAARKHGVKRLHDARLSLSGKPLVMRLIIGDYLRAQFKDTTRLLVVKKIKSNGGIFVAQANESNVRQREDEKDPTLIYGSFTAGTLQKARGRRVTVSPIGELRDPGFKE

SEQ ID NO: 7956 - protein, 1129 aa, unidentified
  REGION 1..1129: note = Description of Unknown: Cas Enzyme sequence
MNQAANETLSTHSFLSLGLDIGIASVGWAVLNEARIVDIGVRCFDKAETAKEGESLNLARRQARLLRRRLYRRSWRLTKLGRLLKQRGLINNAAFFKQQPSASVSTWQLRVEALDRLLSSEEWARVIYHLCKHRGFHWASKAEEVQAEGDAKGEGGRVKKGLADTAAKMASKGYRTAAEMVLAEFPHAQRNKRGDYDKALSRALLDQEFARLFEHQRRLGNPHASAEFEVRVRGNSDRKSGLFWEQKPALAGADLLKMLGHCTFEKAEFRAPKTSFTAERHVWLTRLNNLRVVVEGASRPLTQDERTLALRLPYQTEQFKYKTLKAALVKAGHLPGSARFGGLAYPSEAQKEAGKAKDPEDQSLVKLQAWHDLRKALSKAGLQTAWQQISVAALDGQPQWLDSIGWVLSVYKDDAEVERELAALELPQAQAVIPVLLGLRFDKFHALSLKALRQIVPHMERGLRYDEAVAKIPAYGHHSQRVVLGTGTRRYLPSFYKDARGNTGSMVFRDDIDVPRNPVVLRALNQARKVVNAIIKKHGSLSAVHIEMARDLSRPLDERREVKKLQEEFRDRNDKARESFEADHGYRPKGIVFEKWMLYREQLGKCAYSLEGLDIDRVLKDANYAQIDHALPYSRSYDDSKNNKVLVLTRENQNKGNRTAYEYLTSFAGGEDGDRWRNYAAWVNSNKSYRMAKRNRLLRKNYGADEASGFKDRNLNDTRYICKFFKNYVEEHLQLAPRADGSANKRCVVVNGQLTAFLRARWGLSKVRSESDRHHALDAAVVAACNHGMVKALADYARNKEVAYLKEGFPDPETGEIINPEAHARGVQHFPEPWAHFRHELQARLYTDDLQALREDLQRLGTYSEQDLLGVRTLFVSRAPQRRNDGAVHKETIYAQSEALRKQGGVTQKVPLTSLNLKDLDNLADPHRNAKLYAAIRARLEANGGKADKAFGPDQPFYKPDKDGNPTGPIVRTVKLVIDKLSGIPIRGGIAKNDTMLRVDVFSKTGKFHLVPVYVHHRVTGLPDRAIVAFKDEEEWTLVDESFEFLFSAYSNDLLEISLKKDRHVGYYAGCDRSTGALNLWTHDRALHVGKDGLIRGIGAKTAQSIKKLNVDVLGITHPARPEQRHGLA

SEQ ID NO: 7957 - protein, 1595 aa, unidentified
  REGION 1..1595: note = Description of Unknown: Cas Enzyme sequence
MRFSVNYLIFFLLNLGISLQLGGNYQIYSYKMKKILGLDLGTNSIGWALTNNDFDNKTGNIEGLGTRIIPMSQDVLSKFDSGISISQTAQRTEYRGKRRLVQRFLLRRERLHRVLNILGFLPKHYSEAIDFDKKFGQFKPEREEKLSFYKNENGKNQFLFLDSHQKMLAEFQLINPELKQVPYDWTIYYLRKKALTEKISKEELAWIILNFNQKRGYYQLRGEEEAKTDKISEILSLKVVKVEVGEKDLRNKSNRDRYWYNVHLENHLIYKVTSFKSLEEWVGCTKEFLITSEINEDGTIKKDKIEGKPKVRLSILPSFEEIDKMSKAEQNKIYAKIKIKTEKLIDDSNKTVGSFIYDTLLKNPNQKINGKLIRTIERKFYKEELAKILKVQIVFHNEIFGDRNLYKICINELYRQNDSHKNNIKDKGFDYLFLEDIIFYHRPLKSKTSLISDCSLELSPIKDKKGVLVKDTNGKQVLKPLKCIAKSNPIFQEFRLLQFVKNLKIYKKETANDVDVTNEYIKNEEDLAELFDWLNDKAEISQKQFLAYPKFKLKEDKFRWNFVEDKIYPCNETRNQFLNAIAKIDVDRSFFDNKNTQDLWHILYSVTDKTELFSINNETGIQSGALSTFAKRHNLSNEFVLNFSKIKPYKKDYGSYSEKAIKKLLTLMRFGGNWSEKNIDTKTLARIDKIQTGEFDENMRTRVREKAIHLNTISDFRDLPLWLASYIIYDRHSEASDVSKWKTPADIEDFLKYEFKQHSFRNPIVEQVITETLRVVKDIWQHYGEGKENFFDEIHIELGREMKNNSNDRKRITENINQNENTNLRIKAILTELKNDGINDVRPHSPSQQEILKIYEEGVYSNEKDKVKLEEVDKIRKNTKPTTSEIIKYKLWLEQGYCSPYTGKPIPLSKLFTTQYQIEHIIPQSRLFDDSLSNKVICESEVNDLKGNKTALEFILNNEDRIVTLTGGNTVKIFTKETYSQHITSYYSKNKNKQKRLLSDEIPEKFIERQLNDTKYISKIVKNLLSKIVREEDEQEVTSKHIVSLNGSITSRMKQDWGLNDVWNNIITPRFERLNTITNSSDFGKIELKVDEFGNKGKQVFQTTVPDSIAKGFSKKRIDHRHHALDALVISCVTKEHINYLNSINSERTNYSLVSKLRRVEEIVINEKTQKIAKEFHKPWNNFTKNAEDVLNQTIISFKQNTRVINKTVNKYTSYKDEKGNLNIGTNGLIEKKIITQTQGDNWSIRKPIHAETVSGKVFLKRIKQSDITIANAIEQVDLIVDKEVKKQLSAKIKQYPNNKEGLKKNLKSFPIMIDGKAIDKVQIYETVGGENGATATRKTLDSTFDEKKIEKITDTGIQKILLNHLKQEMYQNAIDENGKIVPAHEVAFSENGLDELNKNIAVLNNGKNHQPIKKVRVFEESNKFPLGESGNKTSKFVETAKGTNLYFAIYKNDLNNKKFITVPLNIAIQNLKDGLPPIPDKYLDDKTKVEYQLNQFLSPNDLVYIPTNDELENSNYIDLNNLSKDQVHRLYNVNDFSGYTIYFTPNQFAKNIAPKELDTSFDSKLSKSLEGITIKENFWKLEVDRLGKIKKIIR

SEQ ID NO: 7958 - protein, 1016 aa, unidentified
  REGION 1..1016: note = Description of Unknown: Cas Enzyme sequence
MGEIMRKMKYRLALDLGSTSLGWAMVRLSQQAEPCAVIKAGVRIFSDGRNPKDGSSLAVSRREARAMRRRRDRLLKRKNRMMATLLRHGFFPQDEDARKALEKADPFALRAKGLDQALLPEEFARALFHINQRRGFKSNRKTDKKENDSSALKKAIGDLRQAMQATGCRTVGEWLYARHAKGLPVRARYRENRSIQDNGKTKIEKSYDLYIDRAMIETEFDALWRKQSGLNPAQFHDTARHELKDCLLHQRPLKPVKPGRCTLLPDEERAPLALPSQQRFRIYQELNNLRLLREGLSEEPLTLTQRDLLAHALEGNSKRSFTQIQKLLGFSGQFNLEDEKRTELKGNSTSALLSKKDFFGPVWFTWTERQQDAIVKQLVKQENEWRLVKRLQKYCGVDEITAERIANAPLAEGYGSLSANALEKILPALRAEVITYDKAVIAAGFDHHSHISHAATGEILPELPYYGQYLQRHVGFGSGKAEDPAEKRYGKIANPTVHIGLNQVRTVVNALIRRYGHPSEVIVELARDLKQSQEQRKDEQKRQADNQRRNERMRADIAQLLQTNPERVRVIDLQKMILWEELSFNVADRRCPYSGVQISAQMLYSEQVEIEHILPFSQTLDDSLNNKTVAMRQANRIKGNRTPAQAAADFEAQGWPMAEILQRASLMPKGKRYRFAQDGLAQWLREDKGFLARALNDTRHLSRVAREYLSLICPQNTRVIPGRMTAMLRGKFGLNDILGVDGEKNRDDHRHHAVDACVIAVTDQGLLQRFAQASASAREKQLNKLVETMPLPWDSYREHVQRAIDNIWVSHKPDHGHEGAMHNDTAYGLLGGGRVHVRKTVDAVRTREVAALKVIEFADAHATARHGLLPNGEPRPYKGYKGDSNYCIEIVRNDKGKWEGEVISTFEAYQLVRQYGGARLRHPRLSMSGKPLVMRLMIGDPVGIEFEGVRKIYRLSFMASVGTLAFAECHEANVDKRTRSKELSYLFKTAGSLQKSNGRCVGISSIGHLSDPGFID

SEQ ID NO: 7959 - protein, 1341 aa, unidentified
  REGION 1..1341: note = Description of Unknown: Cas Enzyme sequence
MKKILGLDLGTNSIGWALVDTDENGKPCKIAGMGSRIIPMDAATLSDFDKGNSKSQTAERTGFRGIRRIRERYLLRRERLHRILFKIGFLPNHYAQSIDFEKRFGQFLSETEPKIAWQKNSDGQYEFLFKNSFNEMLSDFKIHQPQLLEDDKKVPYDWTIYFLRKRALNYRIEKEELAWIILNFNQKRGYYQLRGEDDEDATRTAKTRKYFDKKVIKSITDINQDYKGLKVLLVELEDGNKGKIFKKEIPEWIGQEKNIIATVDLDKDGNDRFDDNGLLNQRFSIPTDAEWETEWKLIKLKTEKDLTDSDKTVGSFIYDTLLKKPNQKIKGKLVRTVERKFYKEELKAILEKQKEFHAELQSKDLFSECLKELYPNNESHRNTISNRDFTYLFMDDIIFYQRPLKSKKSLISDCPYEERKYLNNETGEIKTVPVKCISKSHPLFQEFRLWQFISNIRIYQKERWINEKMHTDVDVTSEFLKNEDDLTDLFDWLNNRKEIEQKAFLKYPGFGLKKEADNYRWNYVDDKPYPCNETRSLILNRLEKVENVPANFLSKENEEALWHILYSVEDKHEIEKALKSFAIKHNLDDGFVDIFKKFPPFKKDYGSYSAKAIKKMLPLMRTGRYWNEDSIDTNTKLRIDKILTGEYDEKIRTRVRDKAINLNDISNFKALPVWLVCYIVYDRHSEAKEIAKWEKPEDLDAYLKSFKQHSLRNPIVEQVITEALRTVRDIWKKHDDFSEIHVELGREMKNPADKRKRMTEQINENENANLRMKSLLMEFLNPEFEIENVRPYSPSQQEILRIYEDDVLKSGIEIPEDVEDILKKFKETDTKKQPTRSEVLRYKLWLEQKYRSPYTNEIIPLSKLFTTDYQIEHVIPQSRYFDDSSSNKVICESEVNQLKDNCLGYEFIKNHHGQKVELNFGKTVEILSVDAYEKLVKDNYSRNRGKMRKLLMEEIPDGFIERQLNDSRYISKVVKSLLSNIVREEGEEEATSKNLISCTGGITDQLKRDWGLNDVWNTIVYPRFERLNELTKSNQFGQWENKNGNRVFQTQMPLELQKGFNKKRIDHRHHAMDALVIACATRSHVNYLNNEAAKASAKESRYDLRRKLRRIETVQIEKSIDGKKVLKNIEVAREFYKPWVTFTQDAQTALENIVVSFKQNLRVINKTTNSYQHFDENGKKIVEKQKSGESWAIRKPMHKETVFGNVNLKKTKTVNLSSALEHPELIVDRRLKSKIKQLLFDGLDNKKIQKYFKDKTEEWSEINFSKIELYYFTNDTTEKFVATRKSLDDSFTSKKIEESITDTGIQKILLKHLENNSNNPELAFSPDGIDEMNRNIKELND

SEQ ID NO: 7960 - protein, 1187 aa, unidentified
  REGION 1..1187: note = Description of Unknown: Cas Enzyme sequence
MEYHIKSAQTARSTAAGVSKKPADISLAFDVGHSSIGWAVIKSETSGPDILGCGTVTFQAEDCLASKRRVFRRQRRHVRSTRQRIDRMEKLLAHLGVFTVEELKSKHAQGKGHPAPWLLAARVLAARTSNLDTTPYLLKWEELWDVLRWYAHNRGYDNNRLWARDEAVMADDVDSDNEKVENALALMKEHGTHTMAETITSVMFEPHGKLKALDVGDSKLPFFTNKSRYKAKNAAFPRDTVEREVKALLEAHMGALEHVTKDLIALLGEDTSDAATRARLRGMNIKLPRRFQGGLLFGQLLPRFDNRIISTCPVSGGKVCAKSTPEFRLYRWLMQVANVRVVRSGPEQPHQLSVTERVALHERMVARGALTPGEFKAAVKEITGCATNNLETMLMHPDADKALVLDPVRKLIQTDRVQFLWPHFPESVRERIQKRAAGKWRQGKVLTLNDMLSWCDELGVSSQTVLTAAKDAVAAKAVKKTSKAKPINEAELLATPLKIEAMNGRAPFARHILTKASEEVIAGYDPRKKSRANDPAGGEDKPEDGCLVRDSLQAAKSKPFPDFEVWKGKWIKKTANAARSEQEALETYRKAQASAVHDAQTNNHLVRHRLLILQRLVTDIIADPLLVNGDASRITGVAIEVNRELKEMSGKDREKLKMAISQRLGNFKSVVKKLEEAGILHPSPGLIRKARIAEDLGRFCPYTGRHYDWQDLLQTDKWDKDHIIPYSVRPSNGLDSLVITTKAINLEKKARTGLEFIEWMNQPENLTRRDQLGVCSVKEYKDFVNGLESWKGHDDDVKRKRRRKQLLLLPKWEEKDVGFLPRDLTVTSHLVRLGALVLHRSLPHLEPHEITSLPGSVTGAIRTGWKLLGCLSSANAGVLEKNGELKTKTDIREVTHLHHALDAIVIGLTHHYFPKNGRLWEAMVRREKQRSKEDNELLLATGLFHTTQYGVVFAQEPPKYLTELIRRRLAERRVVQHLPSDMSGMLVEQNTRGVVSIDEDGTVHLKQIKRDDKTGKLKVNPTKEHSSRLIGLRPGKLSEQKGVRVIEPNYGVAILDAPPPKADGTAGDSDDRFVVIPFAGVWKQLKELRELNGGKRPIVLRQGTLIQVPKKGRRTDLRGIWMVRGIQDRKRDGIILELCWPDVIDSREAGVAWAKPNASLRSLFDEGGMTLVRNSLTGLASIPTLSC

SEQ ID NO: 7961 - protein, 986 aa, unidentified
  REGION 1..986: note = Description of Unknown: Cas Enzyme sequence
MQQEEKLNKIGNFTFNFEIRKGCIGWSIYEVNELGSLVQLCKAGVRVFSDGVNPKNNETLNSARRANRISRRKRDRLVKRKKTLLSFLIKSNILPSDEYLLESLKVLNVYELRSKGIREKLELIELGRIFLHINKRRGYLSCRSVISSHYKQEIARVKKFENFLIQKKYPTIGCYLNQMNSKKKGLRFRDPEGFLPGRHLYADEFDKIVEVQKEFYPNIAENVWQRIREIIFFQRPLKNVEEKNYKCRIFPDEVVAPKYSMGYQKILLLQRIEKLKLVDVNENLIDLSKDEKKRIYDKVMESYEEISLDSIGFYLDRKERIILLGDASKKLGFSPFVNRARLLLKNNLENNPELNLDNIFEKLDTNKHKLNSENVLSDLGINNSDYEKLIDLELPRGDAHYSRKAISHILNLIENNSLSLEEAIEKVKTESISISCCPVVIQENLVIHPTIKNVLNQLEILIELFIKRYGSPKMIKYEVAEELKLSYGTKKEINSKKIKTTLKKERAKEILSKKYHVNGPSYDQVARYVLWEELKKSTDSNTSICPFTLQPITFAQLFSEDIVIVKLLPFSRSLNDSFDNKTICYRSAAIEKGNGTIWEAFSSSTNYDFEKILKNCSILPAVKRRHFFREPSIEFMGYEKLINQQMEDKSHVSEIVKSFVIKYCKSITTVSNGIVSLLEFALRFPKMEIKDFRVHALRAVCLGVVSKEFLDLFIKENEFNINEITCKEPCFDFHKTLHIVLDEIKISRKENHKNNGKLHDETYYGEIKHPNSYEKEHGFNLVVRRKITDIRPSDICLIRASNIRSGFKENMTQVQIIKKFNKIGVKKIRVLKKDKSAMYLFHPASSKKFYKCVIPSEIHSVDVWRLPKQDKIKRGSNLKFETYNLLEVAMKIDKKPHPAAKRVLRIHKWDTLKIVRESKAELVWVRTIRPSKQLIGVVPLNQNSRSDKDTIWITFSMFEKMSLQRLKITPEGIILDMKDPYEKLRL

SEQ ID NO: 7962 - protein, 1044 aa, unidentified
  REGION 1..1044: note = Description of Unknown: Cas Enzyme sequence
MTYNLGIDIGIASIGFAAVDLKAETILKSNSFIFERAENPKTGASLALPRRTARGQRKVINRRAKRKKAVRRLLRAHEFIDVDVVDTPFTQTRGEFYPNQFDTNALRQDKNATISVWDFRKDALERRLTDAEFARVLFNLAKRRGYQSNRKVAEDNDVEGKKALSAAKDLQEAMVKSGHVTIGAYLSTKDKKRNGDGNYENFVERNLLRHEVKKIFESQRGFGFEKATPELEEQFLDIAFFQRPLKSSAHLIGFCSLEPEERRAPKFSYTAEIFVLWSKLNNLKLKSQYGEERPLTQSEKETLATKAHTLKSLSYAQIRKHLDLTDQERFNISYRKVKEADTSWEAIRDTAEKRDFITLSGYHAIKEALVIPSEMDWRAWLNENRDTMDEIARILSVLEDASEIKADLGKLPLNFVQIENLCKITSFKKTVDLSLKALRVIEPTMVQGLTYDKACLAAGYDHSQKINAGLSKLPPFEDIRNPVVNRALAQARKIINAVIREFGKPETIIIELARDVGKNFQDRATIEREQKKNEDRRNDAKMHIAELLKISPEKVSGDDIVRYRLWKEQDGFCPYSGVYMTVDMLRDELATQIDHIIPYSRSWNDSYMNKILCLTSENQSKGNATPREYFTRIGHDMDRLVSYASRLPRKKAENFLIENFDEDKAKEWKDRALNDTRYIARALKNHIENNLDLGKGNRVQTRNGALTAHLRGAWGFPDKDRRNDRHHALDAIVLACSTQAMVQQLSNWNKYEARRKNPTTRIYPPKPWEGFREDIKAYIDTIFVSRMPVRSITGAAHQETIRSIRSLPNGEKQIIQRVKLKGLTLSALEKLVDKERNIALYTLLKERLEAHGGKGDKAFAQPIFMPVKDASTTKAPRINSVRIITNEKSGIEINHGLASNGDMVRVDVFKQDGKFHLVPIYVHHFTKANLPDRAVVAFKPEEQWTLVDESSFLFSLHKNDYVMLRDKKQQIEGYYAGFDRATGAISIRAHDSDSSFGKDGMKTGLGVKLLQDFQKFFVDFFGIKTRIEKEKRLGLADDSDPERG

SEQ ID NO: 7963 - protein, 938 aa, unidentified
  REGION 1..938: note = Description of Unknown: Cas Enzyme sequence
MPKLFSFDIGHASIGWAVFEIGNPRDPVLDGCGTVIFPADDCLASQRRTFRRQRRHIRSTRMRISRMKEFLLGLGVLSQDQLDAPGGPAPWKLAAQVLCGHRLLTWRELWDVLRWYAHNRGYDGNRKWSRSQVADPADTEKEKNARDLMKRHGTATMAETICARLHVDPRSPSTETPHRAYKTLNAAFARDIVVAEVRRILESHAVVFPIIDARFIESLCAEDNVPRGGIAVADQLTALGWKRPLPSRFVGGLLFGQAVPRFDNRIIGECPVDGKKLPLKSCQAFREFRWAMIVANIRVSDGRDGTRPLTATERESITDSLRRIGAFTASQFKREVAAITSQGEGNVAAMMTDPNAEDALVLDPPLAYVHTNRQMKIAWRILSPHLQRRILARMNRQKRITWGWIASQPDAPPELPKALVEGSADRSRKRSKDAPVTWETLSQRPVGPTWSTGRAPYSRETMRQAAAAVMRGEDPRTAGGVLFMTPERLERERAKSLDELTNNHLIRHRLRMLDRLINDMVKRYAEGDASRVPRCVVEVVRDLSEFSGKTNQEITKELNVRLKNFNDVAARLEKDLSGVNVSITAGLIRKARIADDLGWKCPYTGEGFDSVTLARGGVDLDHVIPRSQRASDSLDSLVVTFPAVNRWKGNRTARQFIADEQGKAVPGARHLSIMSIEAYDAMVSGLSPDDKKPTQYSRGPGSLGDKVRRWNRKQRMMRSNFAEPEFTPRDLTITSHLTRLACRQIERSIPALQTPGSITAVPGSVTGIVRKAWHCLGCLAKAAPAIMHDVPVWDDTGSPVLDPQGKPVTRSVPRPKADIREITHLHHALDAAVMGYAAILLPRDGSLWERIVTRKVPTAEAPEFRRTYGWTGMLKLAPSKNGSGAHRLEVLDLPTSYKQAIADRLAERRVVKHVPADMRGARLELKAWRVVHVVDGRV

SEQ ID NO: 7964 - protein, 1390 aa, unidentified
  REGION 1..1390: note = Description of Unknown: Cas Enzyme sequence
PTKVKKILGLDLGTNSIGWALVKEAENENEKSSIVKLGVRVNPLTVDEKTNFEKGRPLSTNADRTLKRGMRRNLQRYKQRRENLIKILIEFGIIQNDSVLTEIGKNTTYQTLSLRTKAAKEKIELEDFAKVLLAINKKRGYKSSRKANNEEEGQAIDGMAVAKKLYDNNITPGQYVLELLFKDKKYIPDFYRSDLKDEFKRIWETQKQYYPNVLTTELYKELDGKNKSQTWAICQKPFQIAGVKRTTKGKEKNIETYQWRAEGLTEKLELEHLAIVLQEINNSINQSSGYLGAISDRSKKLYLNQQTVGENLYAQLVKNPHTSLKNQVFYRQDYLDEFETIWETQSKFHSQLTADLKKEIRDVIIFYQRKLKSQKALISFCQFESWEQEYKEEESGKIKKRTVGRRVIPKSSPLFQEFKIWQNLNHLVFTNQETNQSIEVKDLEQDLRQGLFDELNMRGDLNPNDLLKILKSEFKIGKLSHWKCNFEKIEGNRTNAALYNIYQKISDFEGYGIDWKKKDARAIKEELASTFPEVGIEATILNFDAEADDFTKQASYQLWHLLYSAEEDDKVSEEDKLIYGNTSVSLKKKLNQKFGFKPEYATMLANMSLLSDYGKLSAKAIRKILPYLKDGHLYSEACGLAGYNHSNSFTAEELSKRAIKPTLELLKKNSLRNPVVEKILNQMVNVVNQVIETYGKPDAIRIELARELKKSAKERAKMTKGIADATRRNEEIKKIITQRFGIPNPTKTDVVRYRLWQELEPRGHKDLFTNTYIPPEKIFSNEIDIEHIIPKALLFDDSFSNKTLSYKDINLKKANRTAIDFIKQDFQSEVEAYTARVETMLKGGHISKGKRNKLLMALTDIPDGFIERDLRNSQYIARKAKQMLFEVFPEVMATTGSITDKLREDWDLINVMKELNLPKYRALGLTEFEERLDKGTETLFKHEVIKEWTKRNDHRHHAMDALTVAFTTHNHIQYINNLNARRDTSQDNHPIIKNIAKQITEVNSKNKRVFKAPMSSFRESAKEHIEAILVSFKNKNKVVTKNINVTKTKKGENRKIQLTPRGQLHKETIYGKSKRPMDKPVKINSRFSIAQASLIINQKEKEAILNHLKKYDNNADKAFATKTLKDDPVILNDEPLKEVRVFEEIFTIRKDLNPENFKTLKHIDKVVDEGVKEAMKKRLAEHKGDFKTAFSDLEKHPIWLNEAKGISIKRATITGVSNAEPLHYAKNHLGNLIYDDLGKEIPVDFASTGNNHHVAIYADKNGNLQEEVVSFYEAVIRKNQGHPIIQKEHPRGWKFLFSMKQNEMFVLPSEDFDPNEIDLMDAKNSSLISQHLFRIQKIATKNYMFRHHLETIVTNNLEFTYKHIQSVDRLRGIIKVRINHTGQIVQIGEY

SEQ ID NO: 7965 - protein, 913 aa, unidentified
  REGION 1..913: note = Description of Unknown: Cas Enzyme sequence
MKRILGLDLGTNSIGWALVDLEEKKIEGIGSRIIPMDEATLGRFDKGNTQSQTAERTEFRGIRRLRERHLLRRERLHRILFKLDFLPEHYAHSIDFEKHFGKFRKDIEPKLAWRRNTNGKYEFLFQQAFNEMLEDFAIFQPRLVEGGNKVPYDWTIYYLRKKALTSKIEKEELAWILLNFNQKRGYYQLRGEDDDDATKTAKTRKYFDKQVIKSITDTNQIYKEFKVLIVELEDGNKGKIFKKEMPEWIGLEKNIIATVDIDKDGNDKYEENGFLNQRFSIPTDTEWEKEWKLIKLKTEKDLAESNKTVGCYIYDTLLQKPNQKIRGKLVRTIEREFYKEELRAILGKQKEFHSELNNRNLYSECINELYPNNETYRNSISNHDFIYLFLDDIIFYQRPLKSKKSLISNCPYEERKYFDKETDKIKIVPVKCIAKSHPFYQEFRLWHFIANLRIYQKEKIINERLTIDADVTNEFLKSEDDYVSLFKWLNDKKEVDQKAFLKFPGFGLKKNAENYRWNYVEDKTYPCNKTRNAILTKLEKKEYSYLSQEAEIKIWHLLYSVHSKEEIDKALTDNLKRKNRKKKEAQFEILMELKSSGFSVESIEKLKNIKLEETDYGAYSAKAIKKLLPLMRRGKYWNERNISGDTKERLSAIMDRLKYINHDPKKIEDIADNDISKQILKSFRGVNDPLKGLNTYQACYAVYNRHSEAKEISRWESPQDIDVYLKSFKQHSLRNPIVEQVISETLRTVRDIWLKHAFTITEQDEKGNILDGTSHLSEIHVELGREMKNPKGVREKISRQNIENENANLRIKKLLMEFINPEYEIKNVRPYSPSQQEILRIYEDGVLNSGVEVPEEVESILKKFRETDVKKQPSKSEILRYKLWLEQKYRSPYTNEVIPLSRLFTSDYQIEHI

SEQ ID NO: 7966 - protein, 955 aa, unidentified
  REGION 1..955: note = Description of Unknown: Cas Enzyme sequence
QYILEEINNKNFMPKQVQRENGVIPYQLHLEELKIMLENASQYFSFLNQIDETKKTVKEKILSIMTFRIPYYVGPLNNHSQYAWVVRLSHQKIYPWNFDKVIDKKASAEDFIKKMTNMCSYLLGEDVLPKNSLLYSEYLVLNELNNLKINGEYLSVKIKQDIFEQLYKKYKTVKIKRIKNYLIHNGIMTEDDNIEGLDLELKASYKVYLDFEKIVGKHVNNTQMIEDLIRWITIFNESKDILKDKIKEVYGDQLTKDQINKISKLSYTGWGRFSKRLLTDVYDTNQETGEMMNIIEALRTTQDNFMQLMRNDKGYVQAIDEINGALEENEPTKDMIKKLYLSPAIKRSVWQTLKIVNEIRHITGHDPKKLFIETTRSHQEKKRTKSRKDRLLELYKTCKTESRDWIKEIEGKDESLFKRDVLFLYYTQMGKCMYTGKTIHLEDLKNSNIYDVDHILPQSKTKDDAIDNRVLVLKSENSAKGDAFPIKREIQKKQKKFWDHLLKKQFISKKKYDRLMRTTTLTTEELASFISRQLVETSQSTKAIANLMKKQLKETEIVYVKARNVSEFRYHRNNKNHKNTDQFVKVREANDFHHAKDAYLNIVVGNVFNTKFTHNPQNYIKNLKKQPSEKYSLNQMYNFDIKGAWKRGNNGTIQTVREVMSRDDCLYSRYTTEAKGTFFDVTLMKAGKGQSPIKAQKDNPLSNIERYGGYNKIKGAYFCLVESLKKGKKIRSIEFVSIMKKEFFEASEENKLDYCKNTLKLEEPKILIAKIKIGTLLKVDGFLMYLQGRKDVRLVISNAVELKLNQESYNTLKLVVKVYAQVMEYKKSKKVYEVTEYDKITPQKTSSLYDQFTNKLLHSIYSKKLEKPGQLLKEKRENFTTLTLADQCVSLIEILHLFQCNSSVANLKNIGGKASTGNLAISKKISQYKEVKIIHKSVTGIFEQEVDLLAPCLGE

SEQ ID NO: 7967 - protein, 1130 aa, unidentified
  REGION 1..1130: note = Description of Unknown: Cas Enzyme sequence
DLWDAEPTRRGRLLAKSRPPLALLQSSLYSIRLLSTRGGVMQRIFGFDIGTTSIGWAVIDHDAARAVGCIVGMGVRIFPEARDPDGTPLNQIRRQKRLIRRQLRRRKLRRRALNELLNEAGLLPPFAKGKRVNGSYVRSSWEEVMQLPPLELRKKALAERLEPYELGRALYHLAHRRHFKGRDVESDTPVESSAEEKAAQSARATTVQILQESGKTLGEMLAERAPTRGEIPRQRTRGIHALREHVIEEFNRIIEAQRRHHPILRDPVFVDQLRNVVFSQKPIFWRTNTLGECPFVPGSPLCPKGSWLSQQRRMLEKLNNLSIVCGNLRPLDSEERAAILEKLQVQASMTWAAVRAALKPVYAKRGEPGAEQALRFNLELGGESKLTGNLVEAKLVSIFGERWKTHPHRQAIRDAIHERLWKADYVEIGTQRVVILPETERRRRRAELAKKFIHEYDISDAEAKALSELQLPAGWEPYSVEALRRFLPLLEQGVRFGALVAGPEWTEWREANFPNRKQPSGGSLDLLPSPANSGEQKRLAAIRNPTVVRVLNELRKVTNNLIRVHGKPDLIRIELAREIGLSKRERAEIREQLRRQEKRRREAEEDLKSKGILQPTRAEIEKWLLWKESQERCPYTGDHISFDALFRNGEYDVEHIWPRSRSLDDSFRNKTLCRRDVNIEKGNRTPFEFYQSRPDEWAAIVTRLRGMTAKGRSAGMPYGKVKRFLAESMPEDFANRQLTDTSYAAREAVTFLKRLGSKSGAGTSVAVQAVAGRVTAQLRRLWQLNNMLADNAEKTRSDHRHHAIDALVVACTDPGMVHRLSRYWQQKDDPRAERPHLPAPWPGIRAEVQQLKDCGEIRISHRVRKKVSGPLHDEMPYGDTGKEIMKNGTILGVFVKRMPVEKLSLETLKIDDVAQISKTAKFVVRDKAIREALRNHLAAAGGDPKKAYPPYPRVTPNGPEIRSVRVLSLQQKSLMAPVAMSWNGERERQPNGFAELGTNHHVAIYRTSSGKAEYEIVSLYEAARRLARGEPIVRRQRDGAKFVMSLAAGEAVEFLDGERKGIWIVQGVWANGQVVLTRDYDARPTSKKESERLGMSGKREEFYPKVSTLISDSVRKISVDPIGRIRVAND

SEQ ID NO: 7968 - protein, 1158 aa, unidentified
  REGION 1..1158: note = Description of Unknown: Cas Enzyme sequence
MRYVLGLDLGPTSIGWAALRLTGDDEFSGFMSLPDGETAFPAIGVRHFQINIDKYGSGDSEETHASQRRKSRLQRRTLRRKKARRLRLLRLLQENGLAPSDESELKRLIQKDPYDLRAKATKEKLHPHLIGRVLLHIAKRRGFRSNRKQAEHVKQGAHKRDIARFEEARTKFKSELKGRTPGEFWHDEREQQPFEPIRNREGQYRAVAEREQYADEIRRIWAMQELPTDLLERILQDQGQDDKDKLLFWQQDYRLSKRKRKRVIGKCSLMPGRLRCPYSNRKAQEFRMLQKVNDLSLRQDGNETPLTRLAEKRDLLIGELSLERWMEFDDVRRKLRVHGSFNLEWKGNRRLPGNAVDCELRKLFGKDQVKRLPVDEREQVWGEILSYLDDEEFSDSAFADRMKRDHGLELDDLNKLNKVQVPTGHVAFCEEVLDRLLRLMRTGTPLHEAKEEVCRELNLEAAGEARDELPIPDREHGVEITNPAVSNALHEVRRVVNSLIKELGKPERIVIELAREMKASKEHREEISAAQTRNQDERAKARMRIAEHMQCGGETVADWQVERYRLWQQQKCRSPYSGDCISLTQLFGPEVQVDHILPLSISLDNSLSNKVVCFSKENNDKKQRAPIDWLETDPERWERVQRAIAHWNPKNKRGDGLSQCLDIDESVKVRANAEKWERFFVRTHEIQEKYQPGNLLSDTMHITTAVREYLQSLYPSREAEERVATTKGGITAELRKIWGLNAILGTGDKKNRSDLRHHAIDAAVVTVTGSKQVTRVTKAMQDAWPEKRYGRIKAPKPWTSFAEDLDACIRELRVSHKVDHDVSGALLDEQPFGLAKPVKDAMKKALAGIDENRRSLARELVLGIETVDNGKRKTVRMTRVSRNAWLCSTTLPYLRRRPLTKAIKTVQDIDSIPIEAKRLRAAIEEKLQENGIGLTDKKAAIPPSVLDSLTLQDFHARKIPVKRIQTIEKMGNMIIITDQAGDPYKAYPSVKNHHHIEVFQHKVRGKCQYVCRLWTRIEVTQRAARREPVIVHTHPEHPDARFVMSLAKGDTVMVKDQEGKDVLAKVEGISQGLLGRPRSIDLELLPVELADKEFLKIPGQKDTTKKLRNEFRRQWRITSLTDIAKRNIRKVTVDPLGRVRWAEKKYWDQGAVVAPPIQ

SEQ ID NO: 7969 - protein, 1083 aa, unidentified
  REGION 1..1083: note = Description of Unknown: Cas Enzyme sequence
MNTTASPDTTSKKSTGDLSLAFDVGHSSIGWAVLQNIDASAPSILGCGAVIFAADDCLASQRRTFRRQRRHVRSTRQRIARMKALLAHLGVLSREQLDQPGCAWPWQLAARALCGGPLLNWSELWDVLRWYAHNRGYDGNRRWSAADIEMLKEDTEKEENAINLMQKNAVTTMAETFCKELGVDPLGSKKSSTVRFKGFNAAFPRKTVEDEVRRILRAHFGKLEKVNTDFKRALLGRDTNDKLAWQAISCPDLKLPKRYQGGLLFGQLVPRFDNRIIMRCPITGEKVPTRHCAEFLNFRWGMQLANIRVASGDGRELRPLNVEERKATDAQMREQGSMTEGELKKAVRSVTGCSRDNLDTMLMHPDAKDALLLDPVPKLTKSDKLKPLWPVLPERVQRRAANIWRRGKAITLLGLRERIQMAGGSLATFDGEVERLLDAANTKRRRKVQPITREEFLAEPLVVRRLEGRAAYARLILRRAFEEVMAGKHPKEEGGCLFRSEEVRAAQLQRRIDEQTNNHLVRHRLLILERLQRDIVKEYLGGKSAHIGRVTIEVNRDLREMSGKTAKEKAQDLGQRLANFKNVAEKLEEAFEGKDVHISPGLIRKARIAEDLGWTCPYTHHSYDAFQLLNRTVDKDHIIPRTERASDSLDSLVITFSAINKWKGKRTAMKFVEDEQGNPVPDMPNLSIVTLTHYKAFVEGLDTFRGHDDDKRRKKNRQRLLLVRDYEKPEFTPRDLTQTSQLVRLGAQVLKKGFTGLERQPVITSMPGSVTGVMRKGWNLIGCLSAANPNVLDEIGQPKIKTEIRDITHLHHALDACVLALVSHFIPNNGGVWELIVKRRLDETEQLQLRAATHGIFNFSPGRRFGLADLPDSLKEQIRQRLAERRVVQHVPTEMTGLRVEQNAWRVVGIADGEALLRQRIRQPDGSRPVKEKRERTEKLIGPEPHNGTGKLKRNKAALIIPDNYGLALDPEPTIIPFHKVWTRLQDLKGANNSKTPRVLRNGQLIRVAESAGEYKGIWRVFSTKNAAVGFLVDMGRPDVVRLKNGVEGHKINVRLSSLLKHGVELVRSNYAGMAACPSTLSA

SEQ ID NO: 7970 - protein, 988 aa, unidentified
  REGION 1..988: note = Description of Unknown: Cas Enzyme sequence
VFEAGLMRLEQDGRGESKNAKRREARSSRRRLERLNRRLVKLARILQKSGFLPPGDLGDPEKRNVLFTKLDQKLSNPYKLRAAGLGRKLEPFEFGRALYHVCQRRGFLSNRKELSKKKEIIGEVKKSIGELEEKISGSGARTLGEYFSKVNPHEDRIRTKYTSRKMYENEFNLLWGFQKNYYPDVMTDDLKQKIHSAIFSQRPLKSQKYLVGHCEYERTQRRAAWALLDAQEFRYLQRVNDLEVILNDEKRSLTPDERIKLIAELERNPSLTFPKIKTLLGLHRLSSFNLEKGGERILPGNNTSSKLREIFKERWDEFSREDKNRIVEDILSIQKEEALARRGAKEWRLDEESAKRFGNISLQSYYCSFSRKALAKILPKLREGFHLNEVLRETYPDRWEKMSKPHNLLPPVKNDDIPEIRNPIVERSLSELRKVVNEAIRKYGKPDMIRIELARDLRRNAKERENAIKRMRLNEKGRKNAKDFIEDIYKLENPSRDDILKVILAEECGWHCPYTGKSIPREGLLGDHPQFDIEHIIPFDRCLDDSFMNKTLCDADFNRNKKQNKTPYEASFGKPEWDEIIERVKKFKGMGRDEKLRRFKMTERDVEEFFNDFSSRQLNDTRYATKRAKEYLGLLYGGLKEDAARGSSKIQAVGGQITAYLRNVWGLNSIFKDGPGKSREDHRHHAVDAIVISLTEQRWINELSNAAKQARHMGKRRFRAVMTPWKGFSEDVRKSVFSVIPSHQVTKKVKGALHAETFYGKPYEGKNGKVVTRTRVPLEKLSNKDVEKIIDKTAKILVANKLKELNIDDPKKAFKNPADLPNITSKNAYKIPIRKVRIEIPFGTHLKVGKGLRERYVYSDSNHHIEIVEHSQTRKWEGHVVSMFEAYRRLRLKEPIIKKDHGEGKKFLFSIAGGETIEMNDENGNRSHYIVRGLSSDNNQIRVVPINDARKLHDIGKKGLAFLPNVLRRKRCTKVLITPLGEVRRASD

SEQ ID NO: 7971 - protein, 1039 aa, unidentified
  REGION 1..1039: note = Description of Unknown: Cas Enzyme sequence
MLPHILGCGTVIFPADDCLASQRRTFRRQRRHIRSTKQRIARMKTLLTHLGVLSKSQLDKPGCAWPWKLAAGVLGGGEVLSWPELWDVLRWYAHNRGYDGNRRWGAEDAEALKDDTEKEENAINLMQKNGITTMAETFCKELGVDPSGPKKSSMVRFKKFNAAFPRQIVEDEVRRILRAHFGKLERIDADLERALLGRDSNDRDAWRAIACPNLNLPRRYQGGLLFGQLVPRFDNRIISRCPMTNQKVPTRHCGEFLDFRWGMQLANIRVGASGTGELRPLGVEERQALDQQMRDRGSMTEGELKKAVRRVTACSRDNLETTLMHPDAKEALILDPVRRLTRSEKLKTLWPLVPERVQRHAVKIWRRGKATTLLGLRERIEINGGPTAQFDAEVERILDAANSKKRRKEAALTREALLAEPLLVRRLDGRAAFSRPILRQAFAEVMAGKHPKEENGCLFRSEEIRAAEIGRRIDIQTNNHLVRHRLLILERLQRDIIKEYAGDEAKRIGQMTIEVNRDLREMSGKTAKEKAQDLGKRLANFKGVSAKLETAFAGKNIHISPGLIRKARIAEDLGWKCPYTGQTYDAFQLLNRAVDKDHIIPRTERTSDSLDSLVVTFSAVNKWKGKRTALKFIEDEQGKPVPDMPNLSVVTAAQYKTFIDGLETFKGHDDDKKRKLNRKRLLLLRDYEEPEFTPRDLTQTSQLVRLGAQVLRRPYLGLERQPVVVSIPGAITGAVRKGWNLLGCLAAANPNVLDETGEPKIKTDLREITHLHHALDACVLAFASHYIPNHGGIWKLIAKRRLNETEQMELRSATKGLFEFSAERRFGLRDLPSALKQQLCQRLAERRVVQHVPSEMTGLHVEQNSWRVIRVENDEATLRQRIRQPDGSRFMKETREKTNKLLGLRPTGGSGKLQKNKAVLVIPDNYGLALDPEPTIVPFHKVWDRLQALKKANGGKMPRVLRVGQSIIVPRGRYAGTWRVFSVKASLTVDLGAADKIRLENKGQGTKREVQIKTLARDGMEIAPRRLTGVSECPSTLSA

SEQ ID NO: 7972 - protein, 1066 aa, unidentified
  REGION 1..1066: note = Description of Unknown: Cas Enzyme sequence
MAKKEFGEYYLGLDIGTDSVGWAVTDLQYQIMKFHGKAMWGSRLFPEAQTAADRRAHRIARRRLQRRGQRLGLLQDIFMDEITKVDPQFFARLQDSMLHEEDKSVDGKNSLFNGPGIDDKAYHKKYPTIYHLRSELIDSNEEHDIRLVYLALHHILKYRGHFLFDGDLNAIQDLDAVMKEFSDQVKDSLGFEFVCEDAEKFKEILKNRDLGRQSKQKEIEKLFDLKSMEKEQSAKVKEMVKAMVGLKFKVDNIFDNTGEEVKEFNENQFGTDAYEENKSKLEVALGEDYYILEKLQAIRDWAVLASILRGEKYLSHAMVKTYKEHEDDLMLLKKVIKKYFPEKYDDVFKNVAGDKLANYCAYIGYSKIKRQKVQTKKKCSQEDFQKYIAGLLKDVEAEDSDLQRIKARITSGEFMPKIRVKDNGSIPNQVHVMELDQILKNASSYLPFLNQTDEDGITPIDKIHQILTFRIPYYVGPLNNRNPHAQNCWVVRKFQEKIYPWNFDEIVDREASAEKFINRMLSKCTYLPDQFVLPKNSILYSRFMVLNELNNLKIKGEEIPVELKQGIFNDLFMTRNKVSLKAIIDYINAKGLEATKEDITGIDTLTGFKSNMRPAIEMRKVLGNEYNEADAEDMIQLITLFGADRKMLKEILKKRFSQLSDDMILQVSKKSFNGWGNLSRKFLIEIRDNIPDPATGEYRNIIDTMWNENKNLMQLLGRDYHFAESVQAYKRSIDSEDGSLTYQMVKDLYVSPAVKRSIWQAIGIVKEIRGITGHDPKKIFIEMARGPEQEKKRTTSRKDKLLALYQSIQDESRDWIDEISKRDESDFRGDKLYLYYMQQGKCMYTGETIDLEDLFRKDASGNELYDIDHIFPRSKIKDDSIDNRVLVKSIVNREKTNEYPIKEDIQKKMKAYWGYLKAKDLISSKKYERLMRNKPLSMDELSDFVARQLVETRQSTKAVAEILGDVLYESEIVYVKAGLVSEFRHEYDMLKCREVNDLHHAKDAYLNIVVGNVYNTKFTKDPRNFFKEPNHEYSLNAMFRWNVRRGDTVAWIVQIRRGYKQSLMQH

SEQ ID NO: 7973 - protein, 1386 aa, unidentified
  REGION 1..1386: note = Description of Unknown: Cas Enzyme sequence
  MOD_RES 130: note = Any amino acid
MKRILGLDLGTGSIGWAVVDQAETADEHSQIIKLGVRVVPLTVDEENNFEAGKTITTTADRTLKRGMRRSLQRYKQRRKALISILKREHFITNDALLSEDGPRTTFETYRLRAKAVTEEISLHELARVLXMINKKRGYKSNRKANKQEDGQLIDGMDIARKLYDEHLTPGQYTYQLLRSKNGKTKIPSFYRSDLVAEFNAIWECQAEFYPDVLTEELRNKVMGRGKRDTSNIFFAAKGVSTAENKDRKTRLISSYRWRAEALNGKMDIEAVAAALCDINGEIAGSSGYLGSISDHSKELYFQHLTVGEYLMKQLAADPHYRVKNRVFFRQDYLHEFNTIWETQAKFHPELTDELKHEIRDVVIFYQRRLKSQKSLINFCEFEGKQITLVDGKKVMTGPRVCPKSSPIFQEFKIWQELNNVIIENRTVKVSKAKKPTTPTLFSIPEVEKYVPLTDEQRKLLHDELSVNKELSKTAILKVLGLNEKQYNINFKSLHGNVTQVALMDAYKNILEWSGHDASKFDKLTYAQKMEFVTSVFEVLGAKTDFLEFDASDLTNYTQQPAYKLWHLLYSFEEDNSTSGYDKLTQHIQELTGLDREYAVAIAAVSFTDDYGSLSTKAMCKILPHLLRGLQYDKACEQAGYRHSAKSLTREEIDSKPLIAKLEILPKNSLRNPVVEKILNQMIHVVNTATQEYGIQGKDGKHFDEIHIEMARELKQSQSQREDAYKAIGARTKENEEIIKILTNEFDEFRSQRPSRNDILRYRLYQELAMNGYKTLYSNTLISKEKLFSKDFEIEHIIPQALKFDDSYSNKTLETHHVNQAKGNKTAIEYVRDTQGEEGVQQYLERIAYLNKPGTVGKYKNLRTERDKIENTFLNRDLTDTQYIARKAREILLQATRTVVTTTGTITARLREDWQLIDTMKELNFPKFEKLGMTECYRNRDGHEVRRINNWSKRNDHRHHAMDALTVAFTRLEHVNYLNNLSSHADQPMMQANAFALRQNLISERKFIPPMPLDTFRATAMQHLSNILISIKAKNKVVTPHVNRPRGSNKTQTCLTPRAQLHKETIYGTQMRYVTKEEKVNATFTIDKIATVATKVYREALMKRLAEHNGDAKKAFTGKNALSKVPLYIDDLHTRKVPEKVKTVTQERIFTIRKSIDKDLKLDKVVDKGIRAILQQRLDEFDGKADKAFTNLDENPIWLNKEKGIAIKTVTITGVNNATPIHDKKDKDGNPILTTDEETIPVDYVSLGNNHHVAIYEDEQGDWHEYVMSYFEATERARQHLPIVDRSYNRDEGWKFLFTMKQNEYFVFPDPERGFYPGEIDLMDENNYALIAPHLFRVQKITTRDYVFRQQYETTVANKDLKLKGTIFHRILSENGLKGIVKVRINH

SEQ ID NO: 7974 - protein, 1429 aa, unidentified
  REGION 1..1429: note = Description of Unknown: Cas Enzyme sequence
MILEYTNIKVNSKGDNNMGNKNSKYKGDYYVGLDIGTGSVGWACTDTEYNLLRGKGKDMWGVRLFDEAKTAAERRMHRTSRRRRQRELARKGLLRSYFEEEISRIDPNFFQRMDESKYHLEDRSNNNKQKGALFPESKDSNALTDKTYYDKYPTIFHLREELTRSKEPHDVRLVYLALLNMFKHRGHFLNENLNASGNVNFNDAWYSFYEAYISIFSTQDDEGNAVDVVIPENFDTDSLKKELGNRKISKSQRVENGKEILGIKNDNKAEKEMLKAICGLSCTLSTLFGKDIIDINGVGIKNINFDKSNFEEIFDKLTEILDEQELSLIIAMKNVHDVLQLEDLLHGEQFISKARVKAYDEHREDLQLLKKTIKRLAPEHYDSLFRFMGNGSYSAYIASVNYDKRIRKYKGNDSAKISNKQRRYVEGGKTGNSNNEPDELYKNIKNILKGFKDDEDVKTIFNKIETDSFLRKQLTSANGVIPNQVYVAEMEAILKNAEAYLPFLKEKDNSGLTVSERIIKLFSFHMPYFVGPVGSLNDGRKNKWAVRKSADKIYPWNLSDVIDMEATHEAFIVNLIRHCTYLNDEKVLPKHSLLYEKFMVLNELNNLKIKGEKISVELKQAIYNDLFMTGKSVTMKRLTQYLISNSVIKEGEEDSISGIDQTFHNSLTSINKFNGVFGLSNGSYLNKENKDLIEKIIRIGTIYGDSRKAYEERINKLVRDRFDDKQLKRICGFKFNDWGRLSKEFLEMEGFSKIDGVGRTIIQALWETNDNLMQLMDSNKYTYATELTNRTKKVEKILSEWTFEDLEDSYLSAPVKRMVWQTLRILQEIEEVRGYAPKKVFVEMIRDRQADPKRTVSRKKKLEELYKSIKDEKELKDAISSYDEARFRDRKLYLYYCQMGRCMYSGEIIDFDSLMNSNLYDLDHIYPQHLVKDDSLDNNLVLVKRKLNQKIKKGIYPIGNDIQIKQNKFWLDLLNKGLITKEKYTRLTRTTEFTAEEKADFINRQLVETAQGTKTITEILQSALKESEVIFSKSSLVSKFRQDFDIYKCRNANDFHHAQDAYLNIVVGNIYNAKFTKNPLNFIKESEKNKDSKDYKYHLNRMFEYDVTRGKELVWKSGSNGTIHTVKQEVFKQTPIITKKSEIKSGALTNKETIWSKNVANYNMYIPMKMSDPRMSDVTKYGGRKDISKVAYALVVYKLNGEEIRSIESIPSYIGISKNNRDNLLKYFTDLLIDENKKKKITDVEIRYMPILVNSLVKRNGYLCRISGTTGNSFIAQNAISPHYTNKQIYYAKKISKAAEQKRYDEIDKKTGERIITEENNLDFYNEIISLMSSLIFTKRKGSLISETFNDEKEEIFKNLSLDKQVQILNQLIIGINDPGNGINLSHLGMGENVGKATFSRNISTFDEFVLINQSVTGLYETRIDLLKV

SEQ ID NO: 7975 - protein, 1364 aa, unidentified
  REGION 1..1364: note = Description of Unknown: Cas Enzyme sequence
MKKILGLDLGTTSIGWALVNEKENNEEKSSIIRLGVRVNLLNSGEVNNYNHGDDIATNIVRRTKRSSRHNLQRFKLRRDQLIEYLRSEGLLAEDADLCETGNRTTFNTYRMRAKAAEKEIPLEEFWRVLLMINKKRGYKSNRKIKGDDEGSLVDGMEVAKMLAEKNLTPGQYLYDIRRKSLRFKPEFYRSDLQAELDKIWDKQKEFYPDILTEETKDLITGQGKTKTAKIFNDKYSVETAQNKGKDSDLQALRWRADALNNELPIDVLAYVICDINGKILNSSQRLGMISDRSKTLYFNNQTIGQYLMHRLEENPNNSLTNIIFYRQDYEDEFEKIWTRQAQYHPELTEERKAQIKGFIFFQRNLKSCKSLVSFCELEHSEKEIEVDGKTKKVTIGCKVCPKSSPLFQEFKIWQVINNLAIINKVTDEKTTLNDDEKIKLHNELQIKAKMSKTEVLKLLGLPTRKYDLNYKEVPGNNTIANLYAAYQEIILQTGNGEYDFRKMDAADTYATAKSIFEGLGFNTDILSFDVTKTGRELENEPLYKLWHLLYSYAGDNSKTGNDALIRKLSEFCRMDHEYAKILANVTFEPDYGELSAKAIKKILPFLIEGHVYSDACVLAGYNHSQRSLTKEQKEAKVYVDHIENIKKNTLRNPVVEKILNQMINVINEVAEEYGKPDEIRIEMARELKLNKKQRLQESTRVSQATKETERVRGILQKEFHIAHPSHNDIIRYRLYEELAYNKYNTLYSDTHISKEELFGPRFDIEHIIPKALMFNDSFSNKTLELRSCNIDKGNTTAMDYVSSTYSEDWTEQYKARVNDLADKGAISNTKRKFLLMTREEIPEDFLNRDLTNTQYIARKAYELLEQFVPSIVATNGNITARLREDWQLIDIMKEINFEKYRKLGLTETYTNSEGKTIGTIKDWTKRNDHRHHAMDALTVAFTRPAIIQLLNNLSAQSDTNYILEEIKKRELKGGHFAAPIPLDIFRREAKEALNNILVSVKAKNKVVTKNVNKIKTKNGVIKTTQLTPRKSLHNETVYGTSIQKEMKTVKVDTKLTLEKIQLVSKKAYREALLKRLQEFDGDRKKAFKNLEKNPIWLDEDHRKRVPAEVNIIETKIIHTSNTIVSEKLNVDSVIDPAIRKILKDRIKEYGGDKVTAFKNLSENPIWINKEKGICIKRVKIKISDEVIPLRNKKNHHGKEIHDELGKTIPTDFVKTDGNHHAAIFIDEKGNLQEHIVSHFEVTARAVSGLDIVDKYYNSDKGWKFLFTIKKNEYFVFPNPEIGFDPSEIDLMDEKNYKEISSNLFRAQSVSSKYYVFRQHTDTCSIYPDELRNTTWIRIRSLEGLKGIIKVRVNHIGKIVQVGEY

SEQ ID NO: 7976 - protein, 925 aa, unidentified
  REGION 1..925: note = Description of Unknown: Cas Enzyme sequence
SFQIPYYVGPIGQGHLDKKGYNTWAERKEKGRVYPWNFNEKIDTLKASEKFIERMLRHCTYMSGKTTLPKTSLNYERYMVLNELNNLKINGEKISVDFKQAIYKDLFEKGKKVTAKNLRDYLENNGIIRKNSDDVISGIDGDFKAYLSSYGKFKGIFGDTINDEETQKMLEQIIFWGTIYGDDKKFLSMRLKENYSDKLDDALIKRICGMKFKGWGNFSDDFLNLEGASKSDGVIRSILFALWETNDNLMQLLSSEYTYLEELERYRSDAEKPLSEWTHDDLDEMYLSPAVKRMVWQMIKVLNELNTVIGYEPARIFVEMPREKGEKGKRTVSRKNKLLDAYKKLGKEDKALRDEINAAEDSRFNIKKLYLYYMQKGICMYTGERIDFDKLFNDNIYDIDHIYPRHFVKDDSIENNLVLVKKNVNARKSDTYPLDKSIQSSMKDFWKQLKDASLITAGKYERLIRKTTFTDDEKAAFISRQLVETRQGTKAITAILKRAFPNTKIVFTKAAVVSDFRNSFDIPKVRVINDFHHAHDAYLNIVAGNVYFTKFTDNPRNFIKNATKYMGDNLYKYNMAKIFEYDVIRKDYKAWIAASKEKNKNTDDITSDNGNSAPTIIKVKHTLSRNTPIITRKTQKKRGMISKQTIHGAHKAKQDNYLPVKTKNSVLNDVTKYGGYEKIQASFYTLIEYTEKNKTIRSLESIPIYLDIYNKEFDSTDESKLLTYLTDKLNSNVEKNSSEKTIPIVKIPCIPFDSKIRIDGYDYYLKGRTGDYIELSSATSLILNHEHIVYIKKIDKAIVSSNYDEINSQKNKIITKENNYELYNLIIKKLNTSLYNRRKNNIRDILYSDTERFTELDIKNQCYVLMQILRWITSEKASADLKILDRGSQAGTTRINKKISSLNEAVLIHQSPTGLFEKRIDLLKI

SEQ ID NO: 7977 - protein, 954 aa, unidentified
  REGION 1..954: note = Description of Unknown: Cas Enzyme sequence
RALRRKALRMKELRGVLENNGLGNQNIVVDAGDVDVWALRAEDVFCRKLSPRELSRVLIHMAKHRGYKSMRKSAEENDKETGKVLASIALNRERMGGYKTMAQMIYKNNCDGAKKYRNGDGVYDNSIPREEIERELDLIFEAQHKYGMFTADLFEQYKKIAFRVRPIQSVSKMVGGCTLEPNCLRAPKEAPTAELFVALTKINNMKIVIDGETRSVNDEECAAILDLLRKTQTVKYKTLHNKIWKGQDVVFRGVKDETQDFYSMTGWHKLKKILDDPDMSDTRMLDRIMKVVATKKDDAAIEKELRRKKIPEKYIDKLKALSTSKFINLSLQALYKIVPEMIRGMTYDKACTAAGYDFKNKISGEVKIDNGCIREIAEWTRVPVVNRTVAQFRKVYNALIRKYGVPDQVNLEVGRELKNNFDDRKKIERQQNENRDKNDSARTEYETLTGRKATAKDALKYKLYRDQNGKCMYSGEAIDLEHLDNYEIDHILPYSRSLDNSYMNKVLVKYTENQAKGNKTPYEYFGNATRWDDFVGRVSATKTLGARKIYNLLNKDFEASEEDFRERNVSDNAYAARYVRQILNTAFPDLRVDVRAGALTHYLRGQWGLEKSRTESDRHHAQDAIVIACATPGMVRYLSTISGLFENKRNEKGKPWWDNLKQNIQEPWEGFRTDVLQSVEDVFVSRTIRGKATGSAHKDTINSPKSGKGSMILPRGRADKDNMFRMDIFKKDGKYVVVPIFVADTVDKNRQDIFYPQPPKAEQPVAIDDTYEFVMTLHKDDYIKITTVDDKVYEGYIIKCQLPAGQFFIRNSDNSAVFSVKTDTFEPDDLIVIGGNLCKVMDCESGKLRAMCPNGLIEEVEAIRKQTRSGIDSKKQIKTIGKYEKCDVQKTLSVGTFKKLQKFQISVLGDISEVKSERRALVCAIKSQSEKRKGRKQPKRNKNGVAHPSTNKTV

SEQ ID NO: 7978 - protein, 1349 aa, unidentified
  REGION 1..1349: note = Description of Unknown: Cas Enzyme sequence
MRKYYLGLDMGTSSVGWAVTDENYRLLRAKGKDLWGIREFDEALTAVDRRTHRISRRRRQRSLVRIGLLKEYFHNEIAGKDPLFFQRLDNSKYHLEDKDEPVRTRNGIFNDPDYKDADYYKQFPTIFHLRKELLNNPAPHDVRLVYLALLNMFKHRGHFLNASLSGEGSGRKMEDVYRLFRDAAADGAEVSFPEDISEDKLTEILGSRDFSRSRKAEELAGLFGVEKKEKQKTAFIRAICGLKVKAELLFNDLVLEEDKKADICFSDFGYDEKLPELMDDLGENFYNIVELMKEMYDIGLLAGIMKGHTYLSESRVQEFEKHGRDLGILKTVMKKYKSGEDYDSLFRSEEKGSYSAYVNSFNSGRRVRRNMKDRKQEDFYKTLKKLLKDMPEDDLDVKYILGEVDKETFLPKQLTASNGVIPNQVHAREMKKILENAEAYLPFLRERDESGLTVSQRIQQLFSFQIPYYVGPTSENSKTGWIVRKEPGQILPWNIEDKVDMKKTSEEFISRLVRKCSYINDERVLPKASLLYESFCVLNEINNIRIHGERIEVSLKQDIYNELFKSGKRVTRKKLVSFLCARGVIDDDTQISGIDITINNSLSTYGKFRAVFGEKIDEDDCQGMVEDIVFWCTVYGDSKKFLREQMADKYSDKLSDAQIKRILGFKFNDWGKLSKEFLELSGCDKTTGEIRSLIRSLWETNYNLMELLNAPEYTYKEELERRQNTALKTLSEMEAEDLDDYYFSAPVKRMVWQTLQIIRELEKVLGAPPERVFLEMTRSPREKKARTISRRQKFLDLYKNIKKEQRDWKGEIEKADADGSLKSKKMYLYFTQKGRCMYTGETIEIDQLFNDNLYDIDHIYPRHFVKDDNIDNNLVLVKKSVNAHKSDTYPLEDTIYTKQKNEWKELRRLNLITEEKYKRLTGRSPFTEEQKAGFIARQLVETSQGTKGVADIIKQVLPESKIVYSKASNVSEFRHRRKIYKSRSINEFHHAQDAYLNIVVGNVYDTKFTQNPLHFIKKEYAGDAEKNNYNLSRMFDWDVIRGDRVAWIAQKKGGPAGTIATVKEMISRNTPLMTRLSFEGHGGIANETLYGAKKASREKYIPLKATDKKMQDVTKYGGFTSAAIAYFFLVEYEFKGEKVRSLEAVPVYMKQKIEADPDGLQQYCTTVLGLKFPDIRLKKIKIQSLVKKDGYYIHLSAKSNNQICLRNAVNLCLQQEWIKYIKKLEKYTEFLQVDRVLTKEKNEELYQELLRKHQNGIYTKRPNFVGDCLKNGWEKFESLELNQQCDVLVQIIKLTSIGVTAYGDLKLIGGPKKCGEMRMFKRINGVKELILINQSVTGLFENRIDLLTV

SEQ ID NO: 7979 - protein, 1498 aa, unidentified
  REGION 1..1498: note = Description of Unknown: Cas Enzyme sequence
MSDKKIKLGLDLGTNSIGWALVDHNEQERSGKILGCGSRIIPMSQDVLGKFDSGVSVSQTAERTRLRSARRLRERFLLRRERLHRVLNCIGFLPEHYAEQIDFNFRKGKFLEEKEPKIAYRKDQRTQKHEFLFKNSFAEMVEIFKSEHGQLHNSLAIPYDWTIYYLRKKALTEKINKEELAWLLLNFNQKRGYHQLRGEDEVEDTNKKVEYVALRVIDVQDSGDRKGKEEIWYNVTLENGWIYRRTSKQPLDWIGKVKEFIVTTEMNEDGSIKKNKDGKEARSFRAPAENDWTLVKKKTEFDIEASGKTVGAYIFDTLVKNPVQKIKGALVRVVERKFYRDELRKILESQSRFHSELQNQDLLKKCLEELYPNNLTHSNQIQSKGFEYLLIEDILLYQRPLKSKKSLISNCKYEFRTFTREGKTEIEPLKGIPTSHPLFQEFRLIKFIQNLRIYEREKNVDGRTFFDLDVTNEFLRNTEDYIALFNWLSSKREIDQKAFLKYPPFNLKKKVDNFRWNYVEDKSYPCYETRAMFNFWLDKLPVKPDSFFNKETEEALWHILYSVNDKDEIKKALASYARKYDLNEAFAEIFKKFPPFELGYGAFSTKATKKLLSLMRFGPNWKAEEIDSRTLERIDKIISGEFDDSIRNRVREKAIQLTDLHHFQGLPEWLASYIVYDRHSEDREAARWKTALDIEMLEQHSLRNPIVEQVINETLKVVRDIWIHFGQGKENYFDEIHVELGREMKNPAEQRKNLTRMINENENTNLRIKQLLAELKNHPEIENVRPYSPSQQEILKLYEEGVLLSERDNIPDDVQEVLKAKSPSQAQLIRYKLWLEQKYISPYTGQVIPLSKLFTSAYEIEHIIPQSRFFDDSLSNKVICEQAVNKDKDKMLSYEYIKNNSGKKIELGYGKVVSLFTIEAYENFVKRTYGHSKGKLKKLLSEDIPEVFVQRQLNDARYISKVVKSLLSNVVRKADEQDATAKNLVVFNGAITSQLKQDWGLNDVWNDIIAPRFERMNEITQSNHFGEWTSKDGKRIFQTSVPLDLAKGFSKKRIDHRHHALDAIVLACATRSHVNYLNNEHALGKGTKDEKQKKRYDLQHKLCFKKLQGDSNFKWSFHKPWDSFTTDTKEILLRTIVSFKGNLRTINRTVNKPLRWVQNGEISEKKSVKQDGINWAIRKPLHKDTVFGKVSFRLKKKVNLTKALEVSADIVNISLRNKVTELKAHKYDLKMLLKYFKDRNNRWEEQDISKVEIYYWDHDNVATRTKVDDNFTSAWIDSITDAGIRKIMKNHLARYDEAKGEKIIEHPELAFSPDGIDEMNRNILELNDGKPHKPILKVRTFEPLGNKFQVGQTGNKKTKYVEAAKGTNLFFAIYADEKGTRSFETIPLNLVIERQKQGLSPVPEKDENQNNLLMVLSPDDLVYVSKESQGISEVDLSKIYRIASFTGSRLYAVPVSVASTIVDKAEFSQLNKMEFSLDELSVKQYCVKLKINRLGILA

SEQ ID NO: 7980 - protein, 1048 aa, unidentified
  REGION 1..1048: note = Description of Unknown: Cas Enzyme sequence
MQDNVPYALGIDIGIASVGAALVADDHIVGLHVRIFDKAEVAKTGESLNSKRREARLTRRRLKRRRSRLLRLRKLMVEYGLLSDWKVKDCNGPLSENVTGSPWQLRAEGLDRELSPSEWATVLYHLINHRGFQSNRKSETAPASDDGKMVASATGNQSKFREKGYRTIGEMIALDPDFAEKKRNSTGDYSHTLLRKDIEEELRELFRIQRSKNNNYAGELFEEKVHALLMERKPALSGKDLLKMVGQCTFETDEYRAPKSLPSSERFVWLSKLNNLHILSFHGERSLSQEQKTILDRTIQEKGALKYSDIRRLLNLKAEDFFSGIRYSTPFSRKKNQSEETGEKTKEQDPEDQFFYEFKHFIQLKKAYKKAGRDDLWSRDSKDPDRLDAISEALTIFKEDDEIQTHLSGLGIEKDIIDAVLPLSFSGFIRLSRKSVLKILPHLEAGYRYDEAVRMAGYQHHSVRNTASCQKFLPPIDPYEIRNPVVFRALNQARKLINAIIRQYGSPRSVHIELARDLNKTLQERRAIEDEQKKNQELRNDDFNLFDELFKRAPKKDEFQKLRFYREQDGKCAYCLEAIDIRRLLEEGYAEIDHALPYSRSFDDSLSNKVLVHIKENQEKGDSTPFEYLGGGTTERWKRYRDFVESNKKYGRSKRSKLLREQLDPNETEEFLERNLSDTRFIARFFKNLVESSLLLDGGQGSKRCVVVSGQMTAYLRRHWGLTKNREESDLHHAMDAAVVAVTSHSMVKRLSDWSRQRECRYLKKDEKKEKPKFPMPYDSFIEELKAKFKDVRVSRASRRLGTGQVHEETIRSAKFASEGKTWKKVPLKELTTEMLDKIVGYTDPRNTSLIEGLRKRLSDHGGDPKKAFSEPFFKPSSGSKAPIVRSVKVYTDLKSGIPVRGGIAERGPGSMIRVDIFTDGKKFYPVPIYISDIGKKQLPNKAVVAHRDENEWTEMTDAYKFLFSLHPNDWIRVESKEKVFEGYFRKFDRAAGTINIAYHDMNINIGKDGLYRVGIKTAKGLSKFHVDLLGGLHLVRKEFRQPLQRKF

SEQ ID NO: 7981 - protein, 1228 aa, unidentified
  REGION 1..1228: note = Description of Unknown: Cas Enzyme sequence
MKKILGLDLGVSSIGWALIEENDSSKKILGMGTRIIPLSPDDKDEFTSGNTISKNQKRTLKRTQRKGYDRYQLRRENLQKALRWKNMLPESDLINADKLLIWKIRNDAVSYKIGLKELGRVLLHLNQKRGYKSSRSEANLDKKDTDYVAEVKSRYEKLKKSNETIGQHFYREITADPYYRIKDQVFPREAYMEEFDRIIKKQQEFYPEVLTPEFVNKLRNEIIFYQRPLKSQKKLVSLCEFEKRQVVTDDGKGGKTKSYKGPRVTHRSSPLFQVCKIWESINNIKLKNKYGEELEIPLEKKRQIFEYMDNNEKLSFKELLKILELKKNEEWTGNSWLDKGLKGNTTKIKIAKCFDTPAYAEGLTGFKLNLIQSGKITERIDCKTGEIQSIPEIIISPLFEKQPLYRLWHTIYSINDETECRNALVKNFGIPEVTAEKLASIDFTKEGFGNKSSRAMRKILPWLMEGFVYKHALQLAGYDHKIPEIIDLIPLLEKNSLRQPVVEKILNQMINLVNAIILEYGKPDEIKVELARELKQSREERQNTFKNINQRERENENIAKRLVEEYNQRATRNNILKWRLFHYVKGDDSKVNNICIYCGKSFGISDALAGAEVDIEHIIPRTLLFDDSENNKVLAHRKCNQAKGNMTAFDYMKSKGEHDFKDYLERVNQLSSQKIINRIKRDRLMTPAEKIPKDFIQRQLRETQYISKKAIEILTTVCRDVHPTSGSVTEFLRRLWGWDDVLMNLQIPKYRETGLTEWVEVESNGQIHKKEVIKDWKKRLDHRHHAIDALTIACTKQGYIQRINTLSSDITREEMYKEVSETDPRRAGWKTLLEKYIAGKQPFTTAEVEKQAEKILVSFKQGKKVATKGVRKINIHGKKKIVQKDIIVPRGPLSEESVYGKIRVIEKNKPVKYLFENPHLIFKPRIKKLVEERLARFEGNARYAYLSLKKEPIFLDNEKTVRLEYGTCYKEEYVIKYPLNSFKAKDIDYVIDENVRQILRNRLGEFAGKEKEAFRNLENNPVWYNQDKKIPLKTVRCFTGLSSVEPVKYNDKKEPIGFVKPGNNHHVAIYVDGEGVKHEHVCTFWHAVERRKHGLPAIITDPRLVWDEIINQNNNLPDSFLKKLPYDGWKFVTSLQQNEMFILGLPEEEANRAIKENDTAVLSNYLYRVQKITESDYYFRHHLETEIIDDENAKIMRKYYRIKSLKAFFNLNPIKVIISLLGTISKSD

SEQ ID NO: 7982 - protein, 1031 aa, unidentified
  REGION 1..1031: note = Description of Unknown: Cas Enzyme sequence
GENMSKKILGLDIGSNSIGWALLESNNGQPDKILDVGSRIFTKAVEEKTPTPKNAKRREARLARRVIQRRARRKQRMLNYLVSLGLLPEDLKRHTQPETILNELGDPYLLRAKALDRPLTPYELGRALLHLVQRRGFLSNRKTLIGDMVGDPDMQDVLNELEGEADTSSESAKEETTFKKDIAELRKLVDEKHCRTLGEYFAKLNRHQCKRNRTHNGGHLRTDRQMYREELDQIWERQNQHHTVLTPDVKEQIEHIIFHQRPLKLRSDRIGKCSLEPSRNRARIARLEYQRFRYLQDINNLKYFDPYREKWTEIDEQQRYKLVEFFEHNASITIPRIRKLLGLDKSIELNLEQGNKKLKGNITSCTIQKVFPKWDEYSTTDQTALLEDLLTINKKSVLKNRLMQHWRLSAREAIELCLLDFEPGHGNLSLKAINRLLPYLEKGQLYSDARVSAGYTYEEEDVEEKNSLDQPPETNNPIVNKALHELRRLVNAVIAEYGKPDIFRVEMARDLEMNTKRYKNFLKQQKDNTKANDEAVEKYRDIAKQTPHLKLSEYPSRADKIKYRLWKDQDSRCAYSGKTISPSILFGPEIDVDHILPYSMSLDDSYMNKVVCFASENRYKGQRTPIDAFSDNEERWNQITQRINHWDKKLRSKRDRFYQTADDLSERDFISSQLNDTRYISKLALEYLKPLGVDVTTSKGIITAWLRHQWGLDDVIGNSIEKDRVDHRHHAIDAVVTACVDRKFYNTLVSAAKAHERSHPELRLRDLHVDPPWDNLREDLKSMLDSVIVSHAPQKKLSGALHEETGVGYIEGVGNVVRKQLNPDFKQVDKIYDAGVREAVKSHLNKFGNDPKKAFADEITVFHLDGKTPIKRVRIQQSNTTLEKVEQTKFGVKNKEGEVFKWLAYGNLHHVEVIRNTTTGKYSGRFVTMMEANHRAKGIGMEKQPIIKADHGSEYDFICALHLNDLVRVDGGDIYRVRKLGQLNQGEQPRPTLNGHLDAQTDINEISDSIRNLMTGRKLELVKVNVLGKII

SEQ ID NO: 7983 - protein, 1076 aa, unidentified
  REGION 1..1076: note = Description of Unknown: Cas Enzyme sequence
MLTYGFDLGTNSIGWVVIDQSKKEKILGAGVNIFPEGVNRDTKGAEISKNEKRRLKRQTRRQFFRKKLRKAKLVELLVRHQMFPDVEALYQTTFDKPVPKFKVALFELLNLETLPEPLLDYFFNNGQNNPYLLRDKAVKGEQLTKQQLGRVFYHFAVRRGYKESLQTPLEDGKTLKTGDKKTGKIGIDATQELVNEHQYFGAAMYSIDPENPENKNKYVEDRIRNRYTLRNWFVAEFDEIWQQQKAFYPNLLTTQFKNELDEHVKNIIFFQRPLRNQKFLLGSCIFEKQKPKCRKSALHFEEFRMHQTINNIKIKDKKLNEEQRLILKDMFYTKKDFKKEDILKKLKIDKEDINLAEKQAVKGNETHIGFAKLFKKDVWKKMSDTDKEHAWHIKINADDKAKTIKYINKKTEWNFNEKQFKQFFDLRLNKDFANVSTKAINHILPFLKKGYLYNDAVLLGGFVNALGKEEWNSWDNELRKATEKEIVELIKNPTGETIKKKLQEFCLERFSFTSKQLEKLYHHSDLELTKTTGALPEDDELINKVRNPLVANALFQLRRLTNALVKEYGKPFEIRVEMARELKASLNQRDEIRFGQLKNEELNNKAKATLDEYNLPHTGKNIRKVLLFEEIYKQNGQAINPFSLGEGKTESFSVSDIFHKMQIEHIIPYSRSLNNSMGNLTLCDPNRNRNKSDKTPFEYAMAEGKDWETIKNHIFKVLPYKKAKRFISEENIVDESFISRQLNDTRYIAKFAKEYLKHICTKVNITQGGATAYLRDIWGLNSILNKTFLVEGVYSDGTEYYAALNEADELIESSLTEWQYSENDKENKKTQQQLLKQGKVIQGVIRKGKFIPKKVRDDHRHHAVDAIAVACTEKKFLQEISYMHGQYERGDQAKKAISNFPEPWLGFYQDARKAINNILIHYVVNNKVLSKSRKKVFDKKTARHASVNGKKIYGQGLTAQGQLHEETIYGKRKAPKEQNAGFHIRKNLADLTSAMLDKIVDPVARHQVYEFAANHPNAEWDAKGKLNIKKVEFFKFDEAENISKPLVFMPQKTDKKTGELKPKRPIKKVRIRQESS

SEQ ID NO: 7984 - protein, 901 aa, unidentified
  REGION 1..901: note = Description of Unknown: Cas Enzyme sequence
VKENNKKILGLDIGIASIGWALVEDSDILDMGVRIVPIGKQGEKFSDGFTAGISAERTQKRGIRRGYQRKKLRKENLKQVLQKAEIYPSKDLIHIDALTLFRLRAKAAREPISLQELGRVLIHINQKRGFKSNRKAVDKEVETTEFYNKLNQSSEFLKGRTIGEAFYDEFKKYYDAAKDKRGLMPTVKHIPFKRDKYEDEFEKIWQIQSNEYTDILTPELKYEIKNRCIFYQRPLKSKKSELSKCEFEPNNRVVPKSSPFFQSFRIWQKVNDVTIVDDEGREFKLTDKDRKKLVSFLDIKEGTGQDEEQGIKADSVLVLLGYTPTKKYSIKKFQKLPTNQTKARLLKAFDDSNIRNKKLLEFDIFAKNPEDYDYYKLWHLLYSAEATGETTHLRDTLMKKFDLSEHQANTLIKVDLEDDYSRLSTKAIKKILRYLHEGYDYYHSCEQIEADLEADARKTGKPRGKSNYKNTASKTKEEAEKQEKREYLSEVKRNELRNPVVEKILNQVVNLVNEIIEVHGKPDEIVVELARDLKKSQKQRAAKKKKNDRNEASRKDATKEIKKQCKWMTHVSKKDIQRYLLWKESNRQSLYTGKMIQVCDLFGGERKYDIDHIIPKARMFDDSFLNKTLCESTINEEKGDSTADDYIKTRFGEEHHRQYIQRIKACKTMSPQKKKYLRMGVEQIPDDFINQHLANTRYISRETLKRLKQICNIVRPTTGQLTSHLRNIWGLNEVMYEAFRKSGDKSKKPNKRIDHRHHAVDALVVACTTNKIIYKLNTLNAREVRSERAWYIAPPWNTIKQDTKKALSNILISFKNRKRLGTIAKNKIKHPDKNYKPRATFTPRGSLHEDTIRGSIKWYEKRSIFDALEVIGTIQNETIKEELQEILNDHDGDIKQAKKFL

SEQ ID NO: 7985 - protein, 1087 aa, unidentified
  REGION 1..1087: note = Description of Unknown: Cas Enzyme sequence
FMKKVLGLDLGPSSIGWAIIHQPEVAGEKYHIAGMGVRIIPMSKDDADEFTKGNAISKNANRTLKRGIRRSMHRYKMRKQFLTAVFNGLNIMPQKELFALSAIDLYGLRNKAVKEQITLQELARILFHLNQKRGYKSNRKANNDDEGNVADTKTNKNSDDDADTKKPKKKGYLDLISDREEFVKEQTIGQYFYQQLLIDPRYRIKENIFMRKSYQAEFDRIWETQHVFYPNILTEGNKNKIRNEIIYYHRPLRSQKGLVSVCLFEGKKYSDKRSNYTKQVFSGPKVIPKSSPLFQVSKIWQELNNIEITNFTTMKSRSKTALGNPPETGFDQYGKRKLTQTEKQQLFEALNWGEKLTPKQILQKLGYSSGYSEYKINLRNEKFMEGNRTLTDIKKVFDKFNVNLAELLQFDLEVETIGRVDKETGEVFYRVKDNFETQPLYRLWHLIYSIEEIDLLVNTLQRKFGLSKDIAEALARLDFQKAGYGNMSARALRNILPHLMDGLNYADACAKAGYNHSDSLTSEEKAALKLEDRLELYPKNSLRQPVVEKIINQVVNLINELIDEKNGFVTYDERHARDKFEIRVELARELKQSAGERNDAFSRTTQQDKRHKAIVEELSQYGFNRVSKNDIERYKLWEEFDRVSPYEPTKVISLMELFNKVPGVLYDIEHIIPRSRLFDDSFSNKTICPHKINKDKGNQTAYDYMKMQGAQAFHNYLEFIKQHADKKGISKSKFKKLMMPLDTIPDDFIDRQMQETRFISKEVKGLLQKVCRNVNSSTGTVTSRLRHLWGWDDVLMNLQIDKYRAVGLTEEISYITNGQTHTVEKIRGWSKREDHRHHALDALSVACTRQGFIQRINHLNAQHTRDEMLAETQAHVYAEKLTLLEKYLVGQKPFDTATVQNSAAYILVSFKPGKRVAVKSINKIKKGHQIIEYRPALTPRGFLHKETVYGQIKQFEKVKLSTRFDNLADITNNKIKQQVTAHLSNFENDSAKAFNNKGLAKFIELYKYNEVSIYKNEAVVKYKLNGDFKEKDITSIVDSGIRQVVKNHLAKHNNNPKIAFNAENIVWMNEEKGIAIKSVRCKTGSTS

SEQ ID NO: 7986 - protein, 1401 aa, unidentified
  REGION 1..1401: note = Description of Unknown: Cas Enzyme sequence
MKKVLGLDLGTTSIGWALVNEAENDNETSAIIKLGVRVNPLTVDEKTDFEKGRPLSTNADRTSKRGARRNLQRYKLRRKNLVEILIKNGFISEDTPLTEMGKDTTFETLKLRAQSASQKINLDDLARVFMAINKKRGYKSSRKTTNEDDGQAIDGMDVAKTLYETSQTPGQYILTLLKEERKYIPDFYRSDLQAEFDKIWDTQKTYYPTILTLELYKALQGKNKGTTWAICKEPFNIVGVKLDGKASEKKLKKYELREEGLANKLELEHLAIVLQEINNNLNQSSGYLGAISDRSKALYFNKETVGENLYKQVLKNRHTSLKKQVFYRQDYLDEFEKIWDSQSKFHPELTEALKTEIRDVIIFYQRKLKSQKGLLSFCQFESWEQAYIEKATGKSKTRIIGNRVISKSSPLHQEFKIWQNLNNLEFKNKERREVIEVAKLDNEIREVIFNELNIRGDLKATNILKLLSKYLKIGKTTEWKCNFEKIEGNRTNQALYDVYQKIAEYEGYGFNWSKKTALDIINELKIVFKEIGIDESILDFNTEIEGVDFDKQTSYQLWHLLYSAEDDVKISEDDKLVYGNTNVALKKKLHTKYGFKPEYAPMLANIALQKDYGNLSSKAIHKIITSLKSGNSYSEACAIAGYNHSNSLNKEDLKNRVLKPKLELFKKNSLRNPVVEKILNQMVNVINQIINTYGKPDEIRIELARELKKNAKERGEMTRGIAEATRRNLDIKKTITKDFGIPNPTKNDVVRYRLWLELETRGHKSLFTNEYIPKAKLFSKEIDIEHIIPKALLFDDSFSNKTLAYRTVNLKKADRTAYDFMSSDYQSDFENYKERVESLYNNGKGAISKAKRNKLLLSRAKLPEGFIERDLRNSQYIAKKAKQLLFEVFREVISTSGSITGKLREDWDLINVMKELNMPKYRALGLTEIEVRKNDKKVEVIKDWSKRNDHRHHAMDALTVAFTTHNHIQYINHLNARRDEHHEMHKVISNIQNKITCRNKEGKLKFKKPMPDFRKQAKIHIEQILVSFKNKNKVVTNNINKSKLNGKDNYHRKLQLTPRGQLHKETVYGKSKRQQEKPTKLNKRFTKEQAKFIINVPQRNAVINHLKKYDDKNELAFDTKTLKKDPLLYKDEPLKEVLCFEEIYTIRKDISADTFKDVKSINKVIDLRVRQILLDRLSEYNNKPKEAFSDLEKKPIWLNETKGISIKRVTISGVSNAEPLHYKKDHLGLEILDNDDKNQPVDFVSTGSNHHLAIYLDKDGKLQDNIVSFYEAVVRSNSNLPIVDKTLNQDLEWQFLFSLKQNEMFVFASENFNPQEVDLTDKTNSTIISEHLFRVQKISKVKAGNRFVRDFVFRHHLETNVKEDKILKNVTFKSIKSLPYLQDIVKVRVNHIGEIVQIGEY

SEQ ID NO: 7987 - protein, 1248 aa, unidentified
  REGION 1..1248: note = Description of Unknown: Cas Enzyme sequence
MKRILGIDVGVASLGWCIVDVHEKTPSKSKIENAGVRIIPLDERNNKKAAEDFSAGRSVATNTKRTQARGTRRNNDRWKLRRKHLKRILSEHKMLPDDTLMKLESDPYNLFRKYTKEVGIDTNKNSEKDKTPPLPSGLGMYYLRKRAIEEKLELPELGRVFLHMLQKRGFKSNRKSNSKEDTDLVGTMKRNSQMLGRETPGQYYFKQFEEYYKNLLERKKRDKAALLMEMPRTKTDVRFKEEGKKKDDKRDKENRTFLRQTYIDEFNAIWEKQIEFHGEKILSKDLKRAIGDRCLFYQRDLKSQKSKVSRCQFEKGYNVAPKSSPYFQEFRIWQNINHLVVSDDEGNHYKLAREETNAESTELIKRQQRRDLYNFIHQKVGEKKLRGDISKTDTIKILGYKPTRKFSLNFDGVLRDTTRALWLRVFNEHDLFTEAADPEKGILNFDPCSENAENSTAYQLWHLLYSVENPDFLVNAIDKLLTKAFKDKKHDVSKEKIHALAEDLTGNIAYQSAYGSLSTKAIKKILPHLREGYQYSDACKMVHEAEQAKGRNIDYLHSHYKTVEEVEAKRERMNEEAFEPRQVLKRNSVRNPIVEKILNQLINLVNEIVKEHGRPDEIRVELARDLKRGAEARKDITQAMNKTKNRHIDIKQRLKDEYNLQRVSRNDIIKYKLWEETDGIDIYTGKCIKLSNVFGRNPEILYEIEHIIPKSRLFDDSFSNKTLCESEFNKQKDNETAHDHINDNYSAEKYQQYIQRVSQIKSQSKREKLLMKGKDIPTDFIERQKRDTQYIAKKAIEILEYYCPKITTTSGQVTNVLRHHWGLTDMMKDLNYDKYKAMDRIRYIDTRSGKRIMQIEDWSKRDDHRHHAVDALVVASTKQGIIQHLNELNKNLKERETLKQKAIDFPLPWENFRMDARQAIDNILISIHAKKRIASKKKNPYRYSKTKPTQITLTPRAQLHLETVYGKIKLQNDEKTPLNPKFKLETLEYISHPKEKMAVEKRLAEFDNDPKKAFANLGENPIYHVGSKKTLTAVTTWRTAYTIRKPLKNLEKGQIEKIIDKKVREQIQDRLEEHGGNLKKMFSTLEENPIWMNEKAGIKIKSITIRSRLTTPQPLRKNEKGELIDFVALSSNHHTAIYKDQNGKYYDEVVSKWEAFERYKTQWDERKDLSKSERKGPIQIIKKDNLPEGHEFVVSLIINEMLVKDLDPDEIDFFDPNNYALISKHLYRVQTVSSKDYKLRHHLATTIQ

SEQ ID NO: 7988 - protein, 1283 aa, unidentified
  REGION 1..1283: note = Description of Unknown: Cas Enzyme sequence
MRKIGYDLGSSSIGWFIREGSNVIKHGVVTFNSGMSKGKSGAYSSPTKDRREDRSKRRLIKARKYRKWALLEILIKNNWVPLEQGELEKWSKYQKGVERTFPENPNFLKWLACDFSYLEDGFNYNNPYELRVKAIDEKLHPHEFGRSLYHIVQRRGYKDIGETDKETKNQIERRGNSGFDKAVKENRTLAEALNNEFLKKGKRARNEYPYRDEYESELETICLQQGLNTSKSNEGKYTNESYQSIWKAIIWQQPLKMQKGNIGKCTLEPTKPRCPNSHPIFEIFRAWQFINTIKTINDSGKKTPLSQEYRNLLFEKLFLKKDKFQFEEIKKLLDKQFAKPQKYNYPISKKTGLYESNVSGMPICKELVKILGNDSIAYLTDLYKYNIGNAPKILNGYSIYDIWHLVFDSQPEYLEKIAKDKMGIQNISRTRKGKTIEENPLVKLKAMMASGYADLSLKAMRKIIPFLIDGHIYNEAVLLAKIPEYLQTEWNDAKSLISKLTKQASKEYKNGKTIIDITNNLINNYKGLPPTDVFAHKDFTYELASSDFLKIKETCIGYFGEKTWQELDSKDIILEDVQSEYQAFFNDETRAYRRSESSTNIFANLLNENGINFQGELYHHSNKKNKYGKTKEYVDSDGVLHDILPNPYIDSIKNPMFNKAMGMLRKLTNELIINGYIDQDTDVTVEVARELNDNNKRIAIERYQNERKNNREKFRQFLQQYKSEQQISINVEDNISVFEIWNEQNEDDEINFKDILKEKDGVKRYELWKEQKGQCLYTGLSISISQLFSNNIDIEHTIPRSILPDNTMANQTICFAKYNRNVKNNRIPSHCPNYDKDVNGVGSAIAPRLEKWVAIRDNYKTLYEKVKKPRGSEDVDAKNKRIQDKHYLKMHFDYWSDKIRRFTATEVSDGWARRQLVDTQMVSKYAREFLKVYFKKVSVQKGSVTADFRKIYGFQDIDKIKNRNKHTHHAIDAAVLTFVPTNSSYRDKLIKLKNELYEKTKKQFTTKPLGYNNFKAQELISFIENNTLIVNHSKDRILQQTFRNVRKRGKQQYLKKDNQFVLDENGEKILLMAKGDTIRSTLYKDTFLGKIKDVERDENGIAARENNDWKYKTDADEFIFVERKPIKTALTKIDDIVDPVIKELIQKQKNNDVQLDYQGNVIRHVRVKVKVRNGREVKERLNYKSKHDYKNKYYAQAGSIPYAIMLERYSEDKIERKMLQVASFEIAKVFKKHKKFTADYYLEMFHPRITNFPLKRLLKVGQKVLVLTNDLDIERKGEFSFQN

SEQ ID NO: 7989 - protein, 1367 aa, unidentified
  REGION 1..1367: note = Description of Unknown: Cas Enzyme sequence
LILNLKIIMQKKTILGLDLGTNSIGWAVVQKDIKIESGKTVELNEGEIFGSGSRIIPMSQDILGDFDKGNSVSQTADRTKYRGSRRLNERNLLRRERLQRVLNLLGFLPKHFAEKLDNYGKFQDGIEIKLPYSQFNETSKKWDFIFKKSYLEMVDDFRKNQPKLFFTKANGEESKIPYDWTIYYLRKKALSQKIEKDELAWVLLHFNQKRGYYQLRGEDEVKNENKLEEFYNLKIIDVVETGKGKNDGEIWYNVILENGWIYRRSSRIPLYDWINKNRDFIVTTELNADRSIKVDNDGNEKRSFRAPKDDDWNLLKKKTESDIKVSKKYVAEFIYDTLLQKPNQKIKGKLVRTIERNFYKEELQKIIATQVNFHSELQDRNYYKKCCDALYENNEMYKKSIANKDFNYLIVDDILFYQRPLKSKKSEISDCSLEFRKYKLNGEEKIQAIKCIAKSHPLFQEFRLWQWIRDVRIFERNQAADIPVTDQFLSDEKAYEKLFEFLNERKEIDQNGFLKYILEPQKLKGKALNEMVAKYRWNYIDDNEKTYPCNETHNNFKNRLNKVDNVPESFFTQENEIKLWHILYSVRDKHDIIKALKSFIIKYNETNNTQINHVQFVENFQKYPLIKSEYGSYSEKAIKKLLPLMRLGKYWNETDVINNIATYQNNIEAVFANINKRENTNSKVKDELLQLDGTLDLYKGLRKEIATYLVYQIHSESSDKTKWENPGDIDLFLKDFKQHSLRNPIVEQVITETLRVVKDIWVKYGVGKIDFFNEIHIELGREMKNNAADRKAITEMNLRNENTNLRIRAILAEFQNIGVEKVMPHSPYQLDAFKIFEDGIIKSYSETDLKNEKLDGLDISILEMSKKSNPTAQEILKYKLWLEQKYRSPYTGAIIPLSKLFTSAYEIEHIIPKSIYFDDSFSNKVICESVVNKRPYKDNQFGLEFIKNQGSTIVTELSTKDKTVTIHTEEQYRKFIETHYSNNKAKAKKLLLVEVPEKMIERQLNDTRYISKIVKNMLSKMVREDKDDDGVTSKNVISTNGTITSILKQDWGLNDVWNDLMFPRFERLNELTKTNHFTYYNEKHQKLLPTVPDELRKGFQLKRIDHRHHAMDALVIACTTRSHINYLNNQTALDKGKNKNEKQISREDLKRKLCFKTKPDANGNYNWQFYKPWDTFTQDAKGNLEKVIISFKQNLRVINKTVNKYYSYKDESGNLRLDKNGSPKKELIKQTKGDNWAVRKPLHKETVYGQVIVKADFGKIMSINNAIENWQLIIDKKIKTLIKNKLKENDNVLAITKKYFKENPITIEGKIIEKVNVYEWVKGTANRASLDDSFSETKIKEKITDSAIQKILLNHLKKYENHLDDKG

SEQ ID NO: 7990 - protein, 950 aa, unidentified
  REGION 1..950: note = Description of Unknown: Cas Enzyme sequence
LKELDKSLRQQYADRGFHLSGIDAIRGIAYFLRARALDEPLEPYALGRAIYHLAMRRGFLSNRKAPMKKDEELGAVKQGISELEREMKQCQARTLGEYFYKVDPVYEKRIRKRWTARQMYKDEFDTILQQQVKLGAIRDDPKFFRKLRKAIFRQRPLKSQCGLIGPCQFEKNEKRAPWHNLLAQEFRLLQKINDLRLIDPSTREERPLNAEERKILYDWLMEHGEATFAELRKKLGFNPRDGQKFNLEAGDETRLKGNEVAARLIAVLGEERWRGITDQKKAQLISELNSDITEERLRYRAKKVWGITDPERVDKLVKLTLPKGYCSLSKKALKKLVPLMREGKDYVTAAREVYGDLQYKNQTFDRLPPFLKVDRTLRSPVVIRTLSETRKVVNEILRVFGRPDRIHIELAREMKQSRIQRQKRYQTMRDREKMRNQARQSLQAELGWDPNDIKGRDIEKWLLAEECGWVCPYSGKPINYHNLFGEKAEFDIEHIIPYSKSLDDSFVNKTLCHREWNQKKGNRTPAQAFKNTPEWETMLQRVRAFKPLHAVHMKKGESSKHNPKYDLFCMEEIPPDYVDNKLNDTRHAAKVAMGYLGLLYPKEERLKRVKAFAGGVTGELRKCWKLNSILGDPDSVEPKKNRADHRHHAIDALVLALATPGMVQYLSKAAEQQLACQRSIRGYQKFMEDPWPHFLEDVRKAVNAIVVSHRVDHRLQGRLHNDTLYSPPRVDENGKTYHVVRKPLDGNFKKVGDIEDPEVRRIVQEHLAAHDGDPKKAFNDPDKHPKINDIPIHAVRVRDYVKPEKIGKDFCPRYALTDSNHHMEIIEEKDKKGNPRWTAVVVSRFEAMQRKIRGEPIIQRNHGEGKIFVCSIATGDMALVDLEPTNPNVLVRVRGISFNEVSLVRANDARQKKEIVSSGDFIRKTPLMLQKMNFRKVSVSPIGEVYPAND

SEQ ID NO: 7991 - protein, 969 aa, unidentified
  REGION 1..969: note = Description of Unknown: Cas Enzyme sequence
MEDQISNPKYGPKLAERIKEFNSAFKLGIDLGTKEGGIALVKDNQVLFAKTFLDFHKENLKDRRTHRRNRRSRLAKKRRVAILRSWLLRQKVNGKQLPDPYKIKDIPLFKRANGAKNWIDAVISKQDTSPEAFVRALATVFKKRGQSYEEMAKQIEDMTYRELKDYINSLGSITEEEYNALSEEIKYRSEISEKSSEKNRYASLLESLKTKLSNKGDVKNRREREKELEQIVKTFCGANNVHESDKWIGQLKLLLNKPIRKARFMNRIVIRCNVCDKPTPKKSRQNIRELLCMDAIRNFLRAGRIDPNEEVINHYKTLYEKAAGIRKSIIKKVPLTDEQKKLKKELSKQLKKHINKDYRTDAQKKMLEQIKVLMFEKLSGRSRYCTEHLKARAKGEDVEAGYHGHIQKRHDMNIAQKNHDKRVINLIEYMLFRRDESLAKELKDRGIMYITIEAPEPDTKRAKKGEVTKRDERNIKEKLLDEQFDVDGKRFICIYTGEELSKARLNEYEKDHIFPESRDGPSIRENLVLTTKEINKEKGDRTPWEWLHEDPVKWQEFKNRVMRLYSSGKITERKKELLLNENPEFPMDNPTELARAGARVNNFIADLNELLKKHSLPEAQTLFENDKPIVQVVRGSETQLLRRQWNAIDPRFIPLKDRAVSFNHAEDAAIAASMPPTFWRSQIYRYTWHFTPNKERPDFVLPNIAPHWEDFITKRNSPIIAALGKTKYSWKNSGNIFDDTLYKEYNDRSFFKELYKQPKTKEKDDNKSNQPTKPIPINEHKMDPNYKYYHIKVDNKRFLLKSQKGGSLITIKPKHTLWPRQIQVNPAYRSLVLTKEDKGKIELHYIPISPITSMYKQGIILDIDERLKRALSDKIRHEGPKRELRVHDIIYLPATKRHGEGYFLVTKLGKSGVKAVPEDRLKIRYTKQNGKDLDSESEKDKAKDEKVEIGLNKEDLLYLYNNPDSIHIR

SEQ ID NO: 7992 - protein, 1019 aa, unidentified
  REGION 1..1019: note = Description of Unknown: Cas Enzyme sequence
MERQFILGLDLGPNSVGWALIEERIDGNDRAWPVRLVDAGVRIFPEGVEADKSESKNVARRRARAMRRQHDRRNRRRDALRHCLQDARLLPRDDTQLKAELLKNPYELRARGLDNRLSPFEFGRALYHLGQRRGFKSNRRTDKKSENTGNKKIGEDIKAEIGRPEQSIKDCGARTLGEYLNSNAVDGRTRRLHTSREMYEREFNALWNAQRAYHSNLLSDELRQKIHHIIFFQRPLKVQKYLVGACALEPRRKRSPKGTWYAQQFRLLQDVSNLKYSDRSAGEWRALNDDERTKLVTELQKRKEMTFDRIRKTLGLSDSQKFNFETADHRGKLKGNQTEWRLRSVLKKTYDKLTAEMRDEIVRDLLFLDNEEREETLRRHAKERWGMSDEEAQKLLTVDLEPGYLHLSEHALRALIPYLEQGLPYMDAVAKAGYQRPDQRQVKVREQLAREDMPELRNPIVTSALNQMRQVVNAIVREYGKPTKIRVEMARDLKVSLKKRGEMLAEQKENQRAREEAADTLKNEFGRSNPTDDDLLRYRLWKEQKQTCPYTGQTIPQNSLFSPDWEIDHIIPRRRSGDHSYMNKVLCAAQANREKGNKTPWEIWGGDEKRWGEITQRIDTLHLPSAKKHRFLTRKVDDEFLDNFISRQLNDTRYIAREARAYLETLVGKDNVQIARGQVTAELRRRWGLNNILSDSKEKSRADHRHHAIDAVLIALTTPKILKKMSQLSASGWRLEQARFEPPWENFREDVKRRIETILVSHRVIRKLHGALHQETNYGILDLKDEKGQALFAVRKELKDLTQAELERIADSRVRNIVIAHLRRYGADPDTPRAEGTSQWKKAMNPDTPPCLPNRNGAPVPIRRVRLHKPLTNAITLKNRAVNSGSNHHIVIFEHTDGKKKGKWDGEVVTMFEAARRVRPPKGAPRAQPLIQRNLGDGKRFVMSLAINEIVKVNENGQPAYWRVQKIDAASCNVTFRLHTASGLEDNSTRRIKSPEPLRQLGAVKVVIDLLGRERPAND

SEQ ID NO: 7993 - protein, 1077 aa, unidentified
  REGION 1..1077: note = Description of Unknown: Cas Enzyme sequence
MPNHDQGLYTLGLDIGMASVGAALLTDTRILALHVRTFDKAETAKEGDPLNQTRREARLTRRRIRRRAFRLLRLRRLFKRCELVASSSTTEDFSLPGQKPWELRAEGLDRLLLPAEWAAVLYHLVKHRGFQSNRKSEAKADEKAGQMLNGVLRNKALLQEKGYRTMGELAARDDAYAQAKRNKGGDYSHTFARADLEQELSLLFQRQRELGSANANTNMESQVHELLLARKPTLSGDNLLKMVGKCSFEPAEFRAPKASYRAERFVWLGKLNNLKVSGAGELRSLTETERQQIMELPYQLAKLTYKQVRKALGLPEHMRFNLLAYRGGDKEEDAAFFEAKAFHELRKAYEAAGLKAQWQRDALDPDRLDCLAYAQTCFKDDKEAREYLLLQDIEPAIIDANLELSFEKFINLSQKALIKILPFMEQGQRYDQAALNAGYHHSQNDNAAIKTRFLPPPDRDLIRNPVVYRALNQARKLVNAIVREYGPPAAVHIELARDLSKPFDERRKIEKEQKEFQVEKTKSREAFADLFGREPKALDLQKWRLYREQDGQCAYCQKAIDINRLHEPGYAEVDHVLPYSRSYDDSQSNKVLVLTLENRNKGSRTPYEYLDGAGESERWRRFEAWVHGNKKIRLAKRNRLLRKNFGKEEAGEFRERNLNDTRYICREFKRTVEAHLQWHEQSQGKERCVVMAGQLTSLLRARWGLIKVREDGDLHHALDAAVIAAANRKLVKRMADYSRQGELAQVREPYVDYETGEVIGKSELHHLEEKFPTPWPHFRQELLARLSPEPLSALSALPEYRAEIGQALLPVRVSRAPTRRGLGSAHQETIRSVGKEGRLLKDGLSAIKTPLSQLKLKDLENIEGAEDPRNAKLMQALRERLEAFGGDGAKAFSANQPPLFKPSGEGKIAPIVRSVKLLTTQKSGLPVRNGVAANGGMLRVDIFTKGGKFYAVPLYVADAVKADLPNRAVVAYKPEEEWPVMDDGYIFLFSLHPNDWVSIKLKEGNKSGYFSGMDRSTGAVSLWAHDRNQSVGKDGQLRGIGMKTALAIEKSHVDLLGRLHKVHHETRKPLHQRRARS

SEQ ID NO: 7994 - protein, 942 aa, unidentified
  REGION 1..942: note = Description of Unknown: Cas Enzyme sequence
KTKNEQRRGYRGASRMRYRFKLRRNNLKEALSSLGMLPDYSKLIKPISKKDKKSIPNFLRGQSYNLYKLRAEAINSENKIELTEIGRIFMLLNKYRGFKSNAKNKKEDKETGVIKKGIKELEEFIQKNNAQTIGQYFFKMHEKAKKLWDENKWHNFNEPLDERAFINDDEFILFNSNGIRRHYGRSTSREMYIHEFDIIWDAQKKYYPEILTGSKKEYDDILNLPYSERIIALKEFKKTNYWHIKEYCIYYQRPLKSQKKYVSSCQFERGSYEVKKYTVIENDTEKIKEKRIWKSKAKKACPKSHPLFQEFRIWQKLHQISYSSLEEGVYKKPLKTQWLLEIASYLNTNYDIYLSETKKARTENKFWISKLLIEKGLLNAINDCSFYIDKSDEDVDGDDKSENKIAGNTTFARFREALGNDTFNKIKNGNCNWILKDKRIANLEDLWQQLYFAKDGLLKEEDWLKSILTEETKWGLTIEQANNLIAKGLVENYGSYSSKVLKAILPFMRKGMNEYEALKATNKGYINEDNTVGKKIQLKDKISQLSYQELRNPVVERALSKTIKLVNALLEKYQNEIDRETFEIRIESTRQLRKPRQEREAERRKNADKDRLREDYAAYLTKHKTKLGFSKDIHKYSPLVAKYELWLQMNMNEDDETFINEFKAFDKITKQEDRLKHKLWLECGRRCPYTGDVINFTDCFSSDVEIEHIIPLSRSLDDSFNNKTLTYRATNARKGSMTPLEFMEKEGGNAIKEFRKRISGRGNTNSFSDEKTKLFLATEIPQDFSSNQITNTSYIATYTRDKMKEVCRNVQFTNGSATAELRNKDWGLSNLLDKIRYEEDYQINIDEYYRNYYSIKKDFLKWYERKYQTTDFTIKWNQLDDNNDVKQYIAETNNDILFWNKGIEGFNDFRNKSGKKDRSDHRHHAIDAFVTACCSPKIIKEL

SEQ ID NO: 7995 - protein, 1080 aa, unidentified
  REGION 1..1080: note = Description of Unknown: Cas Enzyme sequence
VEQSPQNLTICYEKQIGSDQLPWHNLFHSQCDVKRMKGIQMDYILGIDMGVASIGWAAVFRDEARIDCGVRVFPAGVDNFNSAKEKHPNQDRRAARCMRRRIRRKAQRKQAIRNALQETELMPTDPHELDAWWHMDVYKLRHRAIQEKLLLTEIGRIFYHLNQRRGFLSLRKKDEAPSRTPKEKGMLEQISELQRDIDESGYKTLGNYLFHLYESHAEKVRLRNRHTRRSMIYDEFCAIWNEQNKYYPDLLNNTLRYGEIGPNPKPMAVVKPLPRSPKTLLEQFGLENIIFFQRAVYWEPASIGFCELEPDEYRSPIADRLFQRFRMLQEVNNLRVVDPSQEQVKERPLTTEERNLIVKYLERKKESDFDSIRKYLAKKLKNDDAHRLQFNLEQGGRTKISAMTTDYLLASTKAYGKDWWTLQDDLRNQIVGILYKPAVTDDDIEAALNELDIDQTIIQRLVHTHLPTGYSHLSIKALSKLLPYMEQGFIYHTQDKERSALHAAGYIRRDEVLNKARNILPAYDDEGLRLPIINSPIVIRALTELRKVVNGVIRKHGKPSRIHIEMARELKMGLNKRKEVNRENHARAEERAEARKALEKLNIIPNREAENLYLLWKAQEEKCAYSCKIIGIHQLFSGEIEIDHIYPFSRSADDSFMNKVVCLRSENRDKMNRTPYEWLAQSDPEKYDRIIQQAKHWPYPKRTRLLAEKIPEGFIQRDLNDTAWMARAAQQYLACLFDKPHHVQGTKGAHTALLRDHWQLHGLLRNDAVNLKNRDDHRPHALDAAVIALCDQNTIANLAKVHHFGLDLQPVGNNWYRVSYHDVDRNRLPEPWNGFREVLKESLNNIWVSHRPRRKISGKLHDETYYGKTPDGQLVVRKSVSNLKDKMVKNIRDSFIRTLIENHLAKGGSLQETILMPSGIPIKKVRILVKNPSIAIRDGSTHVQSAATHHLAIYKLPDGTHHFEGNTLMEVMRRLRNKEPIVRKVLPTLAEGASFLMHLCPGDSIMTTLNGHDDLFIFNTMALTSKQIWFTHHADATPGHKDRETKSSLLISCMPSSFDKKFPMARKVSILPSGEIRTAQ

SEQ ID NO: 7996 - protein, 1455 aa, unidentified
  REGION 1..1455: note = Description of Unknown: Cas Enzyme sequence
MPLKAILGLDLGTNSIGWSLIQHDSEKNTGNIIDMGTRIIPMSQDIIGDFEKGNSISQTADRTQKRMARRIRERFLLRRERLHRVLNILGYLPAHYAAQIDFDKRLGKFKPGTQPKLANNKNVFLFKDSFNEMLQDFKSLQPDILLNEKGESRLIPYDWTIYYLRKKAISDKIDKEELAWLLLHFNQKRGYYQLRGEEEEDNSGKSTEFHSLKIIEVTADEIQKGKTDRWYSLLLENGWIYRRSSKTPLFDWKDKTRDFIVTTDIDENGQPKLDKDGNEKRSFRAPDENDWTLKKKKTESDINKSHKTIGAYIYDNLLLNPNIKIKGKLIHTIERHYYRNELQIILKKQSEFHEELKNSKLLSASINELYPQNIGHQAILEKKDFLHLFIEDIIFYQRPLKSKKSTISRCSLEYRPMKNKNGTLAKDVNGKQIIQGIKVIAKSNPLYQEFRIWKWIHDLSIYTKDSDQNVTTNFINSVSDKEKLFEFLNRRKNIEQKPLLKFLLEKSGLKGRALTAEIEKYRWNFVEEKAYPCNETFSLIQSKLEKTIDLPADFITNENINSIWHILYSVNDKAEYEKALLTFATKNNLHKDSFLEAFRRSVLTENDYGAYSEKAIKKLLCLMRAGIHFKKEAFDKSTNERINKILTGEYDEKIGDRVRDKAISLTDVNHFQGLPEWLAKYIIYDRHSEGAQTGKWESSEELLHFLKEFKQHSLRNPIVEQVVTETLRVVNDIWNYYGGGVTGFFSEIHVELGREMKNPKEERERMAVQMAENENTNLRIKCLLAEMLNYSEVENVRPYSPSQQEILKIYEEGALNADENIEDSILKISKTAQPTSAEMKRYKLWMEQKYRSPYTGETIPLNKLFTPAYEIEHIIPKDRYFDDSLSNKVICESAVNKLKSNQTGLEFINNHHGEKVQTGMGKTVRIFEPNEYEDFVKRHYSHSRGKRTKLLLEEIPAQMIERQLNDTRYISKYISAVLSNIVRADSNDDGVNSKNIVPGNGKITASLKQDWGLNDVWNDLILPRFERMNKLTGASDFTVWNENHQKFIPTVPLEFSKNFSKKRIDHRHHALDALIIACATHDHINYMNNANAQSKGKSTEDNKKLRYDLRSKICFKAYNKSDKQDYQWKFSKPWPGITTDCKEKLNSIIVSFKQNLRVINRTNNQYWKWVEEDGEKTKKLCKQTGTNWAIRKPLHKETVSGIVELKHIKVPKGKILTATRKNLDSTFNLSAIESITDTGIQKILKNYLASKGNNPELAFSPEGIEDLNKNIRAYNDGNYHQPILKVRVFETGSKFQLGQSGNNINKYVEAAKGTNLFFGVYSDENNKRSFDTIPLNLVIERQKQGLNPVPPEDEKNNRLLFYLSPNDIVYLPSEDESTNTGSGILLTPELNPEHIYKVVSFTGNRAFFISCNVSVSIVNKQEFTSLNKIERSIDGRIIKESCIKLRIDRLGKLVS

SEQ ID NO: 7997 - protein, 1198 aa, unidentified
  REGION 1..1198: note = Description of Unknown: Cas Enzyme sequence
MINCKNMTKKILGLDIGVSSVGLSVIEENENSKEIKELAVRIVPEDPDFHGKFYSGNTASKNLNRTIQRGIRKNNQRFKIRRDELYKILKENNMFPSEKDFNLNSLELYGLRAKAVSDKITLQELGRVLILLNQRRGFLSNRKSQTEEENSTDYKKRISELESELNGKTIGQELYKELCEEKNINSVLLRERTYLRATYVEEFDRIWDCQKEYYPETLTGGINDEDNKETLYNTIRNRIIFYQRPLKSQKGLISNCIFEKHHKAITKTSPYFEQFRIWQRLNDLSWKTTDGQLFTPTQEQKEKLYNELFFNVEQKSKYKLTISRIKSILGYSTREKIYLNFIELDGSRTYSILKSALLKAGIEQPDKYLSFNLEKDDEKGGLLELWHITYSLPTESEVINTLEKRFPFTKEQATIIAKEVGYGSDYGSLSTRAIRKLLPHLQKGLGYSKACDVVGYDHSGYKTTIELQDKLEFIPKNSLRNPVVEQILNQVVNIVNLAIKKHGKFDEIRVELARELRNSAKTRKNITKQNANNKRENDTIRFTLQNDYAFKVVNGRDVKRYTLWKETGYQCLYCNNPISKTEFLNGQADIEHILPKSRSFSNSMSNYILAHRKCNADKNQMTAFDFMQSKPIDIFNQYIERVNTFYADGKGSITKSKFDNLMCSGTDIPSDFVERMKKDTQYISKEAIKMLKKICENTYTTTGQVTDFLREKWELKNVLEELTFDTYKAIGQVETKEFKDKQGSIKSYEAIKDWSKRDDHRHHAVDALICALTDQKIIFKLNNLNKLYQYERDALSKEEIDEIEKIIEGKLNLKSFADLSDNWLNEPIKNLRSEAKNHLENIFISIKKSSSKVLSKNINEAKNIKPQTTWTPRGRIHEDTVMSQTKRIAEKKAKLNAGFNQLNDIVNPEIKSLISIHLKTYDNNFKTAFDTKTLKKSPIIYKDKEIKEVAVYEYVCTKRVGVSENITPAQIEKITDKNIQAKIKERISEYGNIKKAFSNLVENPIWMNQEKGIKVKSITVYDESKVEILRNGFVKTGGNHHALIYKDENGKYNEKVVSFWEAIEIGLENIRHHEKPYPIINRDNNAMLGNFQFSMQINDLFVFDLKHSEIPQEENEINFLDKKNRKLISKKLFRIQKLSKNTVGQFQVDFRHHLETTVNRNEATLRGITWERFQANSHLARITKIRINHLGEIIKIGE

SEQ ID NO: 7998 - protein, 1093 aa, unidentified
  REGION 1..1093: note = Description of Unknown: Cas Enzyme sequence
MAKILGLDLGTNSIGWAIVDDSNNKIIDAGVRIFPEGVKSDTIGKGDKEESKNAKRRASRQTRRGFYRKRLRKIKLLRTLINFNMCPLNHEDLDVWSKWDKIKKKEGRMSPELFLPDNHPYCIWLKQNPYELRNKALSEDLTIFEFGRVLYHLIQRRGFLSNRKGKDDGKIYKGKDGVKGIEDTQKEIQNSTLGKYLFDILPKEGEPFKIIQDENGNELRVRSRYTLRDMYISEFEAIWDRQSPQLGLENIDYLNEKKILLKGGLKNKRNKSKIEHLKKIKGFDNVKIIEIKDELSITDKEKFILKVISKMPLKEFLGGRIEKDEEGIIKFKSNESVLFWQRPLRSQKKSLAKCRFEPDLKDDNGKFIQKGKTPCHLSHPLFEEYRAYGYINNIEYGKKQKLEETQRMQVLELINSKDNNFKFSEVKKKLKLEYETFNFDDDAPVNGNYTTKHLNSLFPQEILEKEYVINVNNIDVVEYGYERIWHLFHYCDDNDVLIEKLQKEYGLDEKNIEKILKVNLKEGYSNVSLKAIKNILPYLKDGKRLSDAVILGGVRNAFGKKWELYSEDHKELEKDLLKINQEKSNKEGEAIEKIKHYLIENKYGFIVNDIRFKKLYHHSQEVVVVSQKDKIEEIDNLRNPIVQQGVNEVKRLVNELIDTQGKFDQIRVELGRDLKNNKTKRQELTYKISQNTAKNENAKQLLTEYALRHSRENIQKVLLYQEMQERGTIAVCPYTNKTINISDVLGKANKIQIEHIIPKSISLDDSFANKTLCDSKFNGLKGERTPYEFYQINKDVNLWGGAKTWEEIERRAFSVLPYPKAKRFTSKTKFDKNDFIERQLNDTRYISKKTVEILSQVCSDVRVMPGSLTAELRRLWGLNNILQPAFTIDIPNLHIDENKYIPHYVVLDKDKNPIASQRIYNSKPELKPNQTTLYGNVDKGVFKSKEQYVKFQVDTPDLINGEYWAKLLLSNPKSIVRVFKEKPETTEDEIVVRGKIEKEKFKHEGLNIINAQGQDNGTYWAKLTIGKKEFKKPIKEDQPKKNGKQILLFGEVKEGIFSSYVYQCDAEKEEDGKYWLILDIDFEKVDFEKALND

SEQ ID NO: 7999 - protein, 938 aa, unidentified
  REGION 1..938: note = Description of Unknown: Cas Enzyme sequence
GLDQPLPLAHLGRVIFHLDQRRGFKSNRKSERKDGESGLIKQAEERLREEMAAARARTLGEYLLRRRHRGETVRVRLKGAGAKASYEFYPSREMIAKEFEVLWAAQARHHPSLTEGVKASLHRIIFHQRPLRSPPPGKCALLPARNKDDIEGYRAPRAHPLAQQFRIWQEVRNLRIAITGQPERKLTREEADIVARALLAANSLSFDKIRKLLKLPAEARFNLESEKRDKLKGDETAEKLAAKKVIGPDWRHFPPEKQYAIVDRLLNEEDEPSLIHWLVTEAGLSEAAALAAAGTLLPEGYARLGLRALRDLVPAMAGGLSYDEACTDVLGKSHSRKDRGERRSRLPYYGEWLQDDVVGSGDPLDIPEKRFGRLPNPTVHIGLGQLRRVVNALIERYGPPQRVVVEMTRSFKLSPLQLAKVEKEQADNQRRNDFRRAQLLDLGVAVNARNLLKLRLWEELNFRDHLDRRCPFTGEVIGIERLLSDEVEIEHLIPFSLSLDDSAANKTVALRHANRDKGNRTPWQAFHNNPRYDWEGIAARAAALPKNKRWRFGPDALERFGDEEGFLARQLNETGWLARMAKDYMAAVSPDVLVIPGRMTALLRAKWGLNDILPDHYFSDAKNRLDHRHHAIDALVAALTSRRLLQKMASSYDDERDKILIDPPFDIRPKLLQWRDRVTVSHKADHGRAGRLHEDTAYGLVRDPAAEDGMNLVYRKPFLSLTEPEIARIRDRRLRDLVAAHWAGMKPLGMKLADALSQFAQEIKGPHIGSGIRRVRLLKPNQPEYLVPIRDATGTPYKAYAAGKNAFIDILATPDGKWIGEAATLFQANDPAWRPAWQDDPSLTFVMRVFKGDMLRLEHDGRHQIMNVKQLDASANRLKLAGHTEAGSLQDRHDNPLDPFRWLMASYSTLQAKGAERVRVDPLGTVWRVDPDEDSNRL

SEQ ID NO: 8000 - protein, 1160 aa, unidentified
  REGION 1..1160: note = Description of Unknown: Cas Enzyme sequence
MQTIWSFDLGKASIGEAVRDLRDHSFPHKESLLIPEDFAETQTAATRRRMKRTRDSHKAREGWLDGIWRAAGLTPLIGRRVEKVDGKWRPVTESKEQKDLRALLEREFPKKGDETCYNSALLRIKLLRGEPLAEWQIYKALHSAIQKRGYGRVPWASKEEARSGKTEEEIEKELQKKDPGYAAAAGAWGVFKKGTADPSCHFPCYYDACKMGLWDQARSDVLLDRIDCHAASTRRVRFDRADVEKEILLLANNASKQLPSLSDAFKKWQKEGCTVSWEFSTPACQITFGKLKHSVRSKHFNVQASDFGSFLLHGPVGGLPAVNQTDFAAYLDYRSKSGIHPGSTDDWMGATAQKTPRFDNRIINDCALLDGMQVCNVTVRHDKKNNCPYPESLLSSEVTFLMKLKNTLVAGVKGQRKLTAKEIKSIFELISAKAAKKEGGLKDYSTSVIKSYSLTESGWNGKGIKELSLVPLPGHEVIKAPKTEGRSRFSRPALRLIRELILSGDKPSAFKERLLRRDTQLLELIGLDLLDEAPAPQGKGTKDSGAPRRPWILKRHLKFLDDLIRTGDSWERIYIPEQRLDALEARHTDDGIVDQDAAIRDLIGGINDPVVRHRLGLFAKRLKELHAKFGMPEEIVLEFVRTDFMGEKAKTALAAFQKKRAQARSLAVEQAGKSDALKYELAAAQAFECLYCGKPLFATKLESYQIDHIVPSKKGGPDAMVNYVLAHQECNSDKSNRTPYEWLSHSQGWDAYVKRVESRATELRNKKVQLLLREDALELVDRYTALAETAWISKLAHKIVGLHFGWRNGIDQKGMKRITVISGGLTARVRRKYRLNSILSPCPVGEDPVRWESSAEKNRDDDRHHALDAMVINFLPQWARDAQKEHFFRFPDPIQKNAKSFFEQQIREVMPRNVAFEKVSLAETIYGARGMGGASTIVQRVPIVELAMKSVGPNKKAFDAAYLLKQLKSVREPLVVEKINEWFEDSKTEADWKIFCDNLRLHRRDGTHGPRVIRVNVDVGSPTEYAEMSKDQTGSYRKGKKGHRGQVVFKLKTEKKGSPCESIEVRPVYVHESHAKVATRLRDEYGDNILLYGFFQSGCHIVTEKETTHVRTPLAPGIYLLNTIRSDGNVQLTTREGITYPSIPFYSLKNLVSAGLCRAN

SEQ ID NO: 8001 - protein, 1501 aa, unidentified
  REGION 1..1501: note = Description of Unknown: Cas Enzyme sequence
MKKILGLDLGTNSIGWALTTQDFEKKTGGIDGIGVRIIPMSQDVLGKFDAGQSHSQTANRTSYRSVRRLYQRSILRRERLHRVLNILKFLPTHYKESIDFEKHFGQFKKNTEVKLNYKLNDEGKHEFIFMESFNEMVAEFKAAGQETKIPLDWTIYYLRKKALTKRISKEELAWLLLNFNQKRGYYQLRGEDKDDDIDKNKTFEALFVSEVKDSGDVIKKTGEPLFDIYFENGWKYDKQTTKPESWLNKKKEFIVTTKELKNKEVKRTFKLVDSEKDWIAIKEKTQQEIESFNEEKNLVGVGQYIYETLLEKPTQKIRGKLVKTIERKFYKEELQKILGTQIKFHPELKDRELYNACLNELYPRNEAHQNNIKDNGFDYLFLDDIIFYQRPLKSKKSTISNCPYEERVFIKDGVRNIQNVKCIAKSNPLFQEFRLWQFLKNLKIHQKENSENKKIDEDITDAIFTCDNDWVLFYEFLNDKKEVEQKHVLDFLVENKKIAKSDKKNYRWNYVEDKKYPANETRASFLSRLKKVKNYNESGFLSKEKECALWHIIYSVKDKKEYEAAIKTFALKNDLDKDSFSEAFIKYPPFKNDYGAYSEKAIKKILPLMRMGAYWDETKITDTIKNRIKRIHERLESIDYDKEVFKGDEKDRLKTIVDDEIPKQFIKSFIEYKDRNSLTGLNTYQACYAVYERHSEAGIIKPWKSPNDIDTYLNEFKQHSLRNPIVEQVVTETLRVVRDIWKHYGKGKTNFFNEIHVELGREMKNSSGKREAMSKRNIENENTNERIKSLLKELKNDSSNDIRPFSPSHQEILKIYEEGVFQNPDVSFSKITEDDISKIRKSNSPTKSEINKYKLWLEQGYLSPYTGEIIPLSKLFSIHYQIEHIIPQSRYFDNSMTNKVICESEVNQLKDNKTAYEFLKGEGGRLITLSNGDTVELLDIESYEKHCKQYFKKNRTKLNNLLSEDIPEGFINRQLNDSRYISKVVKTLLSNIVREDGEKEATTNRLLPVTGSITSKLKQDWGLNDKWNELIAPRFMRLNELTNSKDFGEWDSKINAFRTKVPDEISRGFSKKRIDHRHHALDALIVACCTKKHTNYLGSLNSERENYSLKSSLLIKNKEGDFTKHFQIPWPKFSIEAKQNLEKTIISFKQNLRIINKTNNKTWQWDPQSDGTFKKILKKQKDSTNSANKTNWAVRKSLHEDTFYGKITENDYLGKLKIRTIVDESFNEIKIKEKVYNKSISRILLNHLKQEKYNEKLDAKGKRINPNILAFSNEGLNEMNKNIPKLNNGKFHNKIKKVKIIHENGKKFSVKTILRNDTKYAKSATGTNMFFCIYENKDRIKTYYTPNFEELIEIQKQEAKIKYKDKQNVPKSIFDKYNNELNLKFYLQPNDLVYLPSEEEKANSHLVILENLNKSQVERVYKFTNCSGVTANFVPFNISKVIFNLKKSEQVKRKISFPIQNELGIGSLQSKNQKSINGIMIKENCWKLKVSRLGKIIRVLK

SEQ ID NO: 8002 - protein, 1003 aa, unidentified
  REGION 1..1003: note = Description of Unknown: Cas Enzyme sequence
YKSDLQQEFDKIWKFQKQFYPTILDIELYRILQGKNKTQTWAFCRIPFEIVGIKLSEKGEQLKKKKIEFRVKGLMEKLELEHLAIALQEINNSLNKSSGYLGAISDRSKELYFKNETVGQNLYNQIKENKHTSLRNQVFYRQDYLDEFEQIWETQAEFHQELTSDLKEELRDIIIFYQRKLKSQKHLISNCQFEKHHKALPKSSFLFQESKIWAILNILEFKNKETKEKQILGDEIRQELFDELNISKKLSEKELLKLVGLSNKVWKSNFPEGIEGNKTNEKLYEVYHKIADNEGYGENWNTKTASEIKEELKAVFTSIGVQIEILDFDTNLEGNFFDKQKSYQFWHLLYSSEEDDKISQEDKMTYGNSNVSLKKKLHFKYGFQPEYANMLANISLQSDYGGLSARAIKKITPFLVEGHNYAEACELAKYNHSNSLTREEQENKTLKDKLELLPKNSLRNPVVEKILNQMVNVINQIVDEYGKPDEIRIELARELKKSAKERASSAEYISKATLENEKIRTILQKEFKIKNPSRNDVVRYKLYKELESNGYRTLFTSTYIPAEKLFSKEIDIEHIIPKAKLFDNSFSNKTLAFRNVNLAKADSLALDFISNKYNSDLEDYKQRVEGLYKSGSIKAGKYKKLLLSEKDLPEGFIERDLRNSQYIAKKAKQILEEVFRKVTPTIGNITDKLREDWDLINVMKELNLPKYRKLGLTKFEERKNDKKVEQIIDWTKRNDHRHHAMDALTVAFTTISHIQYLNNLGAINKSFKDKKDLDKSFLFGIKEKVTKVYKDKKGRGKRKFIPPSDNFRAEAKDHIENILISFKAKNKVVTKNKNKIKIGGKDNYIIKPQLTPRGQLHKETIYGRIKEDVIKVEKVNAKFTKEKILEVTRPVYREALLKRLKEFNDDAKKAFTGKNALLKNPVYIGSDKLVPEQVKTKTQNYIYTIRKEVKPDNFSNLKSLQKVIDIGVRKILEKRLEGFNGKAKEAFSDLDKNPIWLNKEKGI

SEQ ID NO: 8003 - protein, 1008 aa, unidentified
  REGION 1..1008: note = Description of Unknown: Cas Enzyme sequence
MIERILGVDLGISSLGWAVVEYDKDNETNNKIIDCGVRLFTAAETPKEKESPNKARREARGIRRIIKRRRVRMNEIKRLCQKYELIDKIDLLDNEGMFHSNQNRTDVWELRHDALYRTLTGKELARVLIHIAKHRGYKFLGDDESDDESGKVKKAGAALKDKFYATHCQSIGEWLWKERGKNGKKRNKSGDYEISIPRDFLVDEIQTIFDAQRCFGNCFATQELQQAYTDIAFYVRPMQSIEHMVGKCTYFPEEPRAPKASPTAEQFVALGKFYTTVVIDKEHKEQKISELTPVKELMEFAISKEKLTYKELRKFLALDDKHIFKGLAYKPKKAKKEEDKPQEWEFDKAEAEKKVWINLKGHAKFKETLGDGKFLELLKTQDLADEVAKVLTYHKDERAKKEELAKLHLEASTIEKLSKISFTDFNQLSLKAMKAILPEMQKGKRYDEAIGILGKPTFEKSRFLPPLKETNIAILNPTVIRAFAQFRKVANALVDKYGAFDKVHFELAREVNTKGDIEEIKEAQRKNEKERESAKVWISENFGASIPVTRKNILKKRLYEQQDGRCAYTGEVIALERLFDEGYCEIDHILPRSRSGDDSFANKVLCLATANQNKRNLTPFEWFGNDTAKWNYFEARISSPSNFAKMGKGKISRLLKKNFDENSQKEFLARNLNDTRYMSKAIKTYCENYWKLSNDDDKLRIQVRSGKLTSTLRHQWGLDSKNRDTHTHHAMDAIMIAFSTQSMVKKLSDYFAKKEKKDEKEKPVMPTPMNFFKEEVEKATALERQECIQTKAGESKILNRLLISRPPRASVTGAAHKETIQSPKEYKGRGVKVNEGKGMCDNGDMPRVDVFLKDGKYYLVPIYVADFAKGELPNRAIVALKPYEQWEQIDESFEFLFSLHKEDLVELKTKQTPSRPSVIAKGYVSQVVSSTAQIIIENPDNIENEIFSRDKDKNGNIKGDSIARYGTKTLIYLKKYTIDPLGYYHEVKGEKRLGAIPQEAKKHPKRHK

SEQ ID NO: 8004 - protein, 1184 aa, unidentified
  REGION 1..1184: note = Description of Unknown: Cas Enzyme sequence
YEKDGITLKKDKNGDVKRSFRSPSEDDWGLRKKRTEQLLDSSKMTVGAFVYDHLLAEPSDKIRGKFIRTIERKYYKKELYAILCEQSKYHEELCSGDYLNKCAEELYKNNQPHRNSLLTKDLAYLLLEDLIFYQRPLKTKKSLIAECPYEAYKYVDKETGEIKRQEIKCIAKSNPYYQEFRLWQFISNLRLFNKADDKEVTADYLPTQDDYVRLFAYLNDRKEINQETLLKEFFKLKKITVNSEKVFPIRWNYIEDKEKKYPCNETRHELLLALDRAGIDHSWLEKPGQEYRLWHLLYSVESKEETKEALRKLKDDDAFVESFLKVKPFKREYGAYSEKAIKKLLAVMRMGSLWRETDICDTTKGNITKILQGDIDEKLKEKISASVSSYNQLSDFQGLPVWLACYVVYGRHSEAAEIQHWETPESLLAYINGFKQHSLRNPIVEQCILETLRTVHDIWKEAGHIDEIHVELGRNMKSTADQRARISENVLRNENTNLRIKSLLLELKNDPNIKDVRPYSPMQQEKLRIYEEGVLQELTKDDKDFTEITKISTMAQPSAKELQRYKLWLEQKYRSPYTGKSISLTKLFTSAYQIEHVIPQSRYFDDSLSNKVICESEVNSLKDNMLGYEFIKNHGGEIIHCTMLGDVKVLSESEYKAFVNDHYAHNKRKRENLLLEDIPQEFLNRQMNDSRYISKVVKALLSNIVRAEGEEEATSKFVVSCSGGITDRLKKDWGLNDVWNKIVYPRFERLNRLTGTEAFGQWENKDGKRVFQTAVPLELQRGFNKKRIDHRHHAMDALVIACTSRNIINYLNNESANNPKKREDLRQKLCDKNRTIRKPWETFTQDATAALEDVIVSFKNYVRIINKATNYYERYGVEGKKVIAEQRSDDMWAIRKPMHEATYYGRVNLRRKKKVNLRVALENISSICDNKLRIYINGLVEKGFNTKQILDKFKNTNDHFSMQKIDKVEIWQFTNEEEKLVATRKPLDTSFDSKKIASITDTGIQTILLNYLETKGGDSTIAFTPEGIVEMNQNISKYNNGKEHMPILKVRLYTKLGKKIPVGQTGCKAKQFVIAEAGTNLYFAIYEDEEGKRSYRTIPLNEVVERLKQGLSPVPEKNDKDVHLKFYLSPNDLVYVPIEDEHESLAKDHIYKFVDSSGTTANFIPHRSANVIFELNKKDAERFC

SEQ ID NO: 8005 - protein, 1331 aa, unidentified
  REGION 1..1331: note = Description of Unknown: Cas Enzyme sequence
MKKDWYLGLDIGTNSIGWAATDTEYKVLRKSKRKLIGVELFDAADTAEERRLARNSRRVLGKRKWRLSLLKSLFEDEIKKVDSDFFLRLEESKYHLEDKRVNSKYLLFNDKNYTDVDYNKQYPTIFHLRAALMTEENPDIRKIYLAIHNIMKSRGHFLFEGLSTENVSFEDVLESLLSKLGVSGLDTTKIKAICTSKGNTTTKTKEFKELTDDVRVQEIFRLIFGGSVALEKIYGIEEYKELESNVKTISFKNKVYDEVRSDYEVILGTDIDLLDSIKRVYDSLILMGIKKEGMSLSQSKMVVYDKHKSDKALLKEVIRLDSKLSDKDKKELIDKVFSKDEKGLDNYVSYTRNSGINKSCGGEAFLKFVVKVLDELQETEVIKGIREELALGLFLPLQKVKDNSVIPNQLHREELIAILENVSKYNSFFTDELKTKVIELFDLKVPYFVGTLNAKSKYAWAVRNEGYENVKITPWNYKEVINESKSAAKFIDSLVGKCTYLEGELVLPDNSLLYSEYKVLNELNALKVDGDRVSIETRNLIIEELYLNSIGVVTKAKIKKLLVFKGIIDKDAELTGISNVLGSKLKSRVDFTNILGANFDEDDVEKMIYWLTVYGDAKYLIRDRIIEAFGDKYTEQEITAILKLNYKDWGRLSDKFLKGIYSKCFVDTTTGEMLNIIDIMRSQTIILMELLGNAYDLTEAVNTHNAKVVGVVSEITPALVENLYVSPSVKRAIWQTIKLVERLKKLIGCEPKKIFIETTRTNQAPKVETDSRYKALVKKYAALKSKDFEKFDIDVENLYEMLKNEDPSALKSKRLYHYYSQLGKCLYTGKTIERSQVDSIALYDLDHIYPQSKVKDDSLDNMVLVCRVANGYKSDTYPLSEDIQKEHKEIWSVLKAYKMISDTKYERLVRVDGFTTDELTGFIARQLVETSQSVKTISKLLGKLNKTSRVVYSKAENVDQFKHNFGKIKDGNRKSTSKEKILKVRELNDLHHAYDAYLNIVVGNVYDVRFTSNPRNFVSNKENRNYSLNTLFYYDVKGAWVMGETVKMVESVINNPYVQINKMAVRKTGKLYDATIYKANKAKPESYHPIKTKDGRMLDVTKYGGYSSVSISHYVFVGYTLVKPKESIASTYLVPIRICDVAKLKTEVDLLEYAKKVIPCKAKESIEDLHIIRDNITTYTKVKLGNIPVYLGGKTGNYITYRSALQIRFDVESTKYMKTLTNYNGWRIANRSCEVWNSITLEKNLKFYDKILEKMQTRVIHELNPKKFDALLDNKYRELFAALDLIDQTKVILELVNLMTQRLVPNADVLKLIDFKASVGRISLANPGIKV

SEQ ID NO: 8006 - protein, 1162 aa, unidentified
  REGION 1..1162: note = Description of Unknown: Cas Enzyme sequence
  MOD_RES 148..151: note = Any amino acid
VCALCHDVRMSTYSANVQRRRYRIGIDVGLKSIGFCAIEVDERGTPIKLLNSTVHLHDGGAEPGDRKEASRKKTAGLARRARRRGRSNKRRLKELDSYLSEQLGWPLPDLEEFTDQHEPWHVRAELFDSYVSDPAERAEMLAIAVRHXXXXAARPSGGRRGWRNSYISVASLARATYPSKALITVNERVCEALGVTIDAEATQGQLASAYVTDERYTLQALRGTQGLFQGRQYQSDTYHELTRILELQQIDHAQINELTDIVFRVTHPRNGARRNMRVGHDQLPGQESKWRAEIAHPAFQKFRIVAALANLRVRSGRQERKLSADELQRVTHYVLDSALKVEDVEWFDIAEQLGIERDCLTGTAKAVFEGEPALRRPPTDSVSVIIMSSKLTKLKRWWKSANEEDRADLVKFMANSTLAEGEEFENDEVDGFLASLTDDDLAKLEELALPSGRAAYSLDSLQRLTDRMLADGCDLHEARKREFGVGDSWAPTPDPIGDPVGNPAVDRVMKEVNRWLKMAVDRWGVPEAVNIEHTRSGMMSAEKARELDNANTNRQRRIEELAQELGAQTCAGGKLNQVTKIRLLAIQRQGCKCLYCGDAISFETAEMDHIIPRSGLGSTNDRNNLVAVCRECNESKGKKLFSEWAKSGGRKDKVSIGDVIERVWSWERDPGVSPKQQKKFQAAVVARLKSKAPDQEFDARSMESVAWMAVELGKRIRGYFASAYSADEEAVVPSVGLYRGRITAAARVVSGFERSVCLTGGNGKTRLDRRHHAMDALVIALLDDRIAQLLALRENLRFTQLLTSGVDEWRLYLQSHPSENTLMHSWSQRMRVAAGKFNEALATGKVRFTTNLRLSLGSSRAHMDSVTSFEHAYLDRDSDRKPKVDKNGVRKVKEHGEFRLLSDPLPVDLIDRAETPALWAALVKDEQFDPQKGLPADPKRTIMIHGRRIGPMERIRFFGATPAGKWSAAIAVRGGYVSISNTIHHVRIYKLAEKPAKYGMLRVFQVDLRHARGADLFSFSIPASSISMRTADKAIREALRDGSKKPLAWLVAGDELRVNPKFYDTDKIGEFFKKYPEAVEWRVVGFEGPTKLNLRPIRISEEGFDEETPKEIRDIAGSSRSWRVAISALLEPGGVAVIRRNVLGEERWKSKDDRLPCSKVFE

SEQ ID NO: 8007 - protein, 1393 aa, unidentified
  REGION 1..1393: note = Description of Unknown: Cas Enzyme sequence
MKKPYSIGLDIGTNSVGWAVVTDDYKVPAKKMRVSGDADRSRIKKNLLGTLLFDDGNTAESRRLKRTARRRYTRRRNRILYLQEIFTKSMNEIDESFFHRLDDSFLVPEDKRGSKYPIFATLEEEKEYHKKFPTIYHLRKHLADSKEKTDLRLIYLALAHMIKYRGHFLYEESFDIKNNDIQKIFNEFISIYDNTFEGSSLSGQNAQVEAIFTDKISKSAKRERVLKLFPDEKSTGLFSEFLKLIVGNQADFKKHFNLEEKSPLQFSKDTYDEDFENLLGQIGDDFADLFLVAKKLYDAILLSGILTVTDPSTKSPLSASMIERYENHQKDLAALKQFIKNNLPEKYEEVFSDQSKDGYAGYIDGKTTQEAFYKYIKNLLSKFEGADYFLDKIEREDFLRKQRTFDNGSIPHQVHLQEMNAILRRQGEHYPFLKENREKIEKILTFRIPYYVGPLARGNRDFAWLTRNSDEAIRPWNFEEIVDKASSAEEFINKMTNYDLYLPEEKVLPKHSLLYETFAVYNELTKVKFIAEGLRDYEFLDRVQKKQIVNQFFKEKRKVTEKDIIHYLHNVDGYDGIELKGIEKQFNASLSTYHDLLKIIKDKGFMDDPKNEEILENIVHTLTIFEDREMIKQRLAQYDSIFDEKVIKALTRRHYTGWGKLSAKLINGICDKKNGKTILDYLIDDGKINRNFMQLINDDGLSFKEIIQKAQVVGKTDDVKQVVQELPGSPAIKKGILQSIKIVDELVKVMGYAPESIVIEMARENQTTARGKKNSQQRYKRIEDSLKNLAPGLDSNILKENPTDNIQLQNDRLFLYYLQNGKDMYTGKPLDIDQLSSYDIDHIIPQAFIKDDSIDNRVLTSSKDNRGKSDNVPSLEVVQKRKAFWQQLLDSKLISERKFNNLTKAERGGLDERDKVGFIKRQLVETRQITKHVAQLLDARFNTEVNEENQKIRTVKIITLKSNLVSNFRKEFGLYKVREINDYHHAHDAYLNAVVAKAILKKYPKLEPEFVYGDYQKYDLKRYISKSKVSNTIDKATEKYFFYSNLLNFFKERVRYADGTIKKRENIEYSNDTGEIAWNKEKDFATIKKVLACPQVNIVKKTEIQTHGLDRGKPKGLFNSNPSPKPSEDSKENLVPIKQGLDPRKYGGYAGISNSYAVLVKANIEKGAKKQQKTILEFQGISILDKINFENNKENYLLEKGYIKILSTITLPKYSLFEFSDGTRRRLASILSTNNKRGEIHKGNELVIPEKYTTLLYHAKNINKALEPEHLEYVEKHRDEFAKLLDYAYSKEGHTLYNFGKEGVSYTMVDGKPTYTDELLKNPNLSITHAMAGHVRANYNGPFVQDEGYILQYWTLDEQKKALDLWTDTNMVKHVVPPVTPTAEESKEMARIM

SEQ ID NO: 8008 - protein, 1135 aa, unidentified
  REGION 1..1135: note = Description of Unknown: Cas Enzyme sequence
MSTDMKNYRIGVDVGDRSVGLAAIEFDDAGFPIQKLALVTFRHDGGLDPTENKSPKSRKETRGVARRTMRMNRRRKQRLRDLDKVLENLGYTVPEGPEPETYEAWTSRALLASIKLASADELNEHLVRAVRHMARHRGWANPWWSLDQLEKASQEPSETFEIILARARELFGEKVPANPTLGMLGALAANNEVLLRPRAEKKKKTGYVRGTPLLAAQVRQIDQVAELRRICEVQGIEEQYETLRNAIFAHKVAYVPTERVGKDPLAPSKNRTIRASLEFQEFRILDSVANLRVRTDSRAKRELTEGEYDAAVEFLMGYTAKEQPSWADVAEEIGVPGNRLIAPVLEDVQQKTAPFDRSSAAFEKAMSKKTEARQWWESNDDDQLRSLFIMFLADATNDTEEAAAVAGLPELYMSWPAEEREALSNIDFEKGRVAYSHETLSKLSEYMHEYRVGLHEARKAVFGVDDTWRPPLAKLEEPTGQPTVDRVLTILRRFVLDCERQWGRPRAITVEHARIGLMGPVQRQKILNEQKKNRGENERIRNELRESGVENPNRAEVRRHLIVQEQECQCLYCGTMITTTTSELDHIVPRAGGGSSRRENLAAVCRYCNGKKDRKLFYEWAGPVKMQETIDRVRQLKAFKDPKKAKMFKNQIRRLKQTEADDPIDERSLASTSYAAVAVRERLEQHFNEGLAPDDKSRVVLDVYAGAVTRESRRAGGIDERILLRGERDKNRFDVRHHAVDAAVMTLLNRSVALTLEQRSQLRRAFYEQGLDKLDRDQLKPEEDWRDFIGLYPASKEKFLEWKKTATVLGDVLAEAIEEDSIAVVSPLRLRPQNGSVHKETIAAVKKQTLGSSWSADAVKRIVDPEIYLAMKDALGKLKELPEDSARSLELSDGRYIEADDEVLFFPENAASILTPRGVAEIGGSIHHARLYSWLTKKGDLKVNVLRVYGAEFPWLMRESGSSDVLRMPIHPGSQSFRDVQEETIEMIEGGFAKEIAWITQNDELEFDPVEYINLPGRSDKLTRFLNYMPETRWRVDGFPESRNLRIRPLMLSQEDLPSEIKKHKEEKQLSDEEKLLVEALEKGLIITSSKLLGLKSIKVIRRNNLGFPRWRGNGNLPTSFEVRSSALRALGVEG

SEQ ID NO: 8009 - protein, 1185 aa, unidentified
  REGION 1..1185: note = Description of Unknown: Cas Enzyme sequence
MIKGDYYLGLDLGTNSVGWAVTDLEYNLLRAKGKDLWGVRLFDEAQTAANRRSKRIARRRIERDKARKALLKEFFADEIEKIDPVFYMKMNESFFKLKDRSMENQQPYSLFNDFNFTDKEFHDKYKTIFHLRSDLIHSDKTFDVRLVFLAIYNMFSHRGHFLNATLDAEKNDTGFKNAYVEMIEVLEEHEFGIPSNIEVDAIEKILSDNKTSRTNHFEQLLALFNIIKKDKRNCAVIRLLAGLSINLKDIYDQELDKESDKKFGFRESNYEEVIEEVYNIVDEDYKNIIEKIKMVHDAGLLSKIMIGCEYLSDARIKIYDMHQKDLKQLKALLKKYNKEAYEKLFRTIESGTYSAYVGSVNSHGKIERRQGKERGKDVLYKSIEKAIKDIPDDDKDKIEIKAKIEAEIFLERQLTNKNGVIPNQVHSRELRAILNNAEKYLPFLSEVDNTGYSIKEKIIQLFEFQIPYYVGPLGREFNGKKGYNCWAVRKASGRVFPWNFDEKIDKNASAEEFIKRMVRKCTYFNDENTLPKNSLIYEKFMVLNEINAIRVNGCRLDTETKQAIYNDLFTSGKKVNKKKIKEYLVSINKMDNESEISGIDTEWSKNLTSIAKFKGVFDGKIETNKEIIEDIIFWSTIYSGDKKLIRSKIETVYPNILNENQLKKILGFRFTGWGNLSRHFLEGIMGKDKNGNAENSIIGFLWNEQITLQELLSQNYTFREIIDEQFLGVEKPLSSWEIEDLDDFYLSPSVKRMTWQTMKIVEEIQRVLGKPPKRIFVEMTRSDGKKERTVSRKNKLISLYKSLGKEGKEFLNEIDGKDENFFNRRKVYLYYLQMGKCMYSGEIIDLYKLINGNDYNIEHIYPRCYIKDDSLENNLVLVKTEENQTKDDNPITIDIQKKMYSYWNILKKKGFISNEKFTRLTRKNESFTDDELTGFINRQIVETSQASKAITQILQQSMGDNCKIVFSKAKLISEFRQKFDLPKSRIINDLHHANDAYLNIVVGNAYYVKFTGNPYKFIKNAIKNQELNENKYHLSNFYKNDIYNKNEVAWRSEKNENPTITTIKRVINKLTPIITRKVEVEHGEYFKETLNSHLESKKGIYIGQKTHNSVLCNVEEYGGKNKIKIQGYALIEYKKGNDTIRMFKAIPWLIGNIKNIDEHKLIAYIIDDLQTEDVNTDIKDLRICK

SEQ ID NO: 8010 - protein, 386 aa, unidentified
  REGION 1..386: note = Description of Unknown: Cas Enzyme sequence
MSIINFQRSRLMETQTSNQLITSHLKDYPKQDYFVGLDIGTNSVGWAVTNKSYELLKFHSHKMWGSRLFEEGESAVTRRGFRSMRRRLERRKLRLKLLEELFADAMAQVDSTFFIRLHESKYHYEDKTTGHSSKHILFIDEDYTDQDYFSEYPTIYHLRKDLMENGTDDIRKLFLAVHHILKYRGNFLYEGATFNSNAFTFEDVLKQALENITFNCFNTSSAISSISNILMESGRTKSDKAKAIERLVDTYTVFDEVNTFDKTQKEQVKEDKKTLKAFANLVLGLTANLIDLFGSVEDIDDDLKKLQIIGDTYDEKRDELAKVWGDEIHIIDDCKSVYDAIILMSIKEPGLTISQSKVKAFDKHKEDLVILKSLLKSDRNVYQRVT

SEQ ID NO: 8011 - protein, 985 aa, unidentified
  REGION 1..985: note = Description of Unknown: Cas Enzyme sequence
MFTKGLHNYVHYIKQGRTEETSCSREDFYKYTKKIVEGLADSKEKEYILNEIELQTLLPLQRIKDNGVIPYQLHLEELKVILDKCGPKFPFLQIVFDGFSVTEKLIKMLEFRIPYYVGPLNTHHNVDNGGFAWAVRKQAGRVTPWNFEEKIDREKSAAAFIKNLTNKCTYLFGEDVLPKSSLLYSEFMLFNELNNVRIDGKPLAQGVKQHLIDSIFKQDHKKMTKNRIELFLKDNNYITKKHKPEITGLDESKKMLRETLRNKFGSQLNDETIKKLSKLRYRDWGRLSKKLLNGIDGCDKGGNGIPETIIELMRNDSYNLMELLGDKFSFMECIEEENAKLTQGQVVNPHDIIDELALSPAVKRAVWQALRIVDEVAHIKKALPSRIFVEVARTNKSEKKKKDSRQKRLSDLYAAIKKDDVLQSGLQDKEFGALKSGLSNYDDAALRSKKLYLYYTQMGRCAYTGNAIDLNLLNTDNYDIDHIYPRSLTKDDSFDNLVLCERTANAKKSDTYPIDNTIQTKQKSFWAFLKHQGLISERKYERLTRIAPLTVDDLSGFIARQLVETNQSVKATTTLLRRLYPDIDVVFVKAENVTDFRHDNNFIKVRSLNHHHHAKDAYLNIVVGNVYHEKFTRNFRLFFKKNGANRTYNLAKMFNYDVKCTNAQDGKAWDKQTSMDTVKKMMASNDVRVTRRLLEQSGALADATVYKASVAAKAKDGAYIGMKTKSSVFADVSKYGGMTKIKNAYSIIVQYTGKKNEVIKEIVPLPIYLTNRNTTDSDLLDYVKSVIPKAKDITIIYRKLCINQLVKVNGFYYYLGGKTNDKIYIDNAIELVVPDDIAMYIKLLDKYDLLRKENKDLKASNITTSIYNINTSTVVSLSNNVGIDVFDYFMSKLRTPLYMKMKGNKVDELSSIGRSKFIKMSLEDQSIYLLEVLNLLTNSKTTFDVKPLGITGSRSTIGVKIHNLDEFKIINESITGLYSNEITIV

SEQ ID NO: 8012 - protein, 1164 aa, unidentified
  REGION 1..1164: note = Description of Unknown: Cas Enzyme sequence
  MOD_RES 785..788: note = Any amino acid
MTEKSSYSPKKYSLGLDIGTSSIGWAVLDLDKKRIHDLGVRIFERPEDPQNGDSLAKPRRDARSARRRLKRRRQRLNHLKQFFIDQNILTKDQVEEVLDYRSDFNKLDVYELRAKALTEELSPEELLKVLYQIAKRRGFKSNRKVVEESDKEGGRVTSALEANEKFLADNNYTTVGDALSRDEKFALHKRNKRDDYTNSFARDDFLRELEFIIKTQRNYALKNIPEQAINELIYGIDDGQVTNVNAIMYQRPFMTKELIERMVGDCTFEKDEKRAPKASYSFEIFRLASDLSHLVFIPRDASKRQAKRENLEIRLSPEQISKVIDLAKNQKNLTYKKVRNTAGISEDYVPKDVRGKKKEGDEFGEDNAFGGLKAYNDIRSALKDLPEDWAKIDNESAINQIAYILTTQKADEGIRAELNTLPLSDKAKEAIVKIKPTNFKAFGHLSIKALQKITPHILEGMTYDKACEAAGYDFKKQSASLEQITNPVVKRAITQTLKVVRAIERKYGKPYFIKVETARDLAKNFKDRNAIKKENEENQGYNEDIRSIITDGYEASPKTKGGKQLLSHLRELNVRLNKNADFNGQQIIKVKLYREQNGVCLYSDKEIDFETMLRDDNAYQVDHIVPFSRSNNDGITNKVLVLTEENQKKGNQTPFEYFGADEKRWKEYVARVESTYQTREVKKGDKDAGANYKYNGYAMKKKQNLLLQDYKNDSWNVRALNDTRYITRFIQNYLRQNVDFAEGEEKQRVIAPNGTTTAYLRKRWGLAKDRAEDVLHHAKDAAVVXXXXAVVAAIDPKIVYQANLFSKEQEMKLYLNNAKTIDEKRQILLQSTDENTGEITDEVAFTRAQKELAQAEYFKLRSDEETKNRFPSPWPDFSKEIMKRTLNTDITTLQNELCGLDNYDEEFRLSVKPIFVSRMPRRKAVAQAHKETIRSPKVKDNDQRTVRMPLNKVKRKDVENSVLKESDKWLYDKLLERLDAHDDNPEKAFAEPIYKNDKKFDKNGKQLSPVSTIKVYSTQPSGFYINDDKAFVNNGSMVRLDVYQKPNKKGKIEHFFVPVYAHQIGKNKPAPTKILPAPKGFTDVDETFTKVCPLYPNDYVRCYFGNEIKEGYYVSFNINNGAMQVMSHGAVNKSNDSLIQISPRSANLIERYDIAILGDNYRWL

SEQ ID NO: 8013 - protein, 1092 aa, unidentified
  REGION 1..1092: note = Description of Unknown: Cas Enzyme sequence
FYNKHRDDLTKLKNLVKNDSKLSEDKKVELYAAIFKEDKDKGSNYVNYIRKSDEGKGCNYEDFKNFLVKELAKLEESATKEEILRDLELELFLPLQRTKDNSVVPYQIHKEELVRILDNAAKYHNFLDEKDESGYSIREKVIQLLEFRIPYYVGPLNSSKKAREDGFAWSVRNKGYENTPVTPWNYEKVIDESASAEKFITNLTNKCTYLKGEDVLPKSSLLYSEFALLNELNALKYDGNRISLEARNAIMEKLFKQQGKKVTKTSIKNLLKAEGYIDGKGEITGIDITVKNDLKSYRDFKKILGNKFNSEHVENIILWITLYGESRKLIKAKIEAVYGDIYSKEEIAKMSRLVYKDWGRFSRKLLTDLVSKKVYNEETGECLNIIGAMRQNNILFMELLADRFDYSQQIIDYNKELQKEVTEITPEILDDLYVSPSVKRSIWKTVRIVEELKKIIGCAPAKIFVETTRSNQGKKEPTSSREKQLKLAYKAVKKDVKDLEKEIGSLNFDVLNERLSSVEPSKLKAKKLYLYYTQLGRCMYSGKQIDLENLYTPEYDIDHIYPQSKTKDDSFTNTVLVKRECNAKKADRYPLGSDFQTPSNRRLWKFLKEKGLITDEKYNRLVRTEEFSDEELSGFIARQLVETSQSVKAVASILGELNPETSICYSKAENVSSFRQNFGKIKEGNRDSKNGDQLIKVREINDLHHAKDAYLNVVVGNVYDTKFTRNVFNFIKDKKDGRKYSLNKVFYENVSDSKTVAWEMDKTIHQVKKVMNNNNILVTKRTAVKKGKFYDISIIKAKTIKNQIDKSVKNFKKYYPKKEKNLVINNVVKHGGYTSGNISYSSIVNFTVENKGKKKTLTRVIPISIKDSILIRDINTLEKYLLSKIEKEKYGKLIEFQLLYAKFKENTLIKKNNYIYFSGGRSNDTFYYNNALQLLLDSESEKYLKILFKYKNDREIEKNTTGIEIPKKITHEKCNKLYQILIEKMNSDIGKLKYPNKYNELSLENTIEKFISLELNNKVYVLLDILDMLTNKINKYKYCGDLLGVKYSRAQQSYDLTKLNQFSIIEQSVTGFYEKEITIIGDKGNDMENNNC

SEQ ID NO: 8014 - protein, 1155 aa, unidentified
  REGION 1..1155: note = Description of Unknown: Cas Enzyme sequence
MTQKSSYSPKKYSLGLDIGTSSIGWAVLDLDKKRIHDLGVRIFERPEDPQNGDSLAKPRRDARSARRRLKRRRQRLNHLKQFFVDQNILTKDRVEEVLNYKSDFNKLDVYGLRARALTEELSPEELLKVLYQITKRRGFKSNRKVVEESDKEGGRVTSALKANEKFLADNNYTTVGDAPSRDEKFAPHKRNKRDDYTNSFARDDFLRELEVIIKTQQNYTLKNVPEQAISELIYGIDDGQVTNVSAIMYQRPFMTKELIEKMVGSCTFEKDEKRAPKASYSFEVFRLASDLSHLVFIPRDASKRQAKRENLEVRLSSEQISKVIDLAKNQKSLTYKKVRSTTGISEDYVPKDVRGKKKEGDEFGEDNIFGGLKAYNDIRLALKDLPEDWAKIDNESAINQIAYILTTQKADEGIQAELDSLPLSDKAKEAIVKIKPTNFKAFGYLSIKALQKITPHILEGITYDKACEAAGYDFKKQSASLEQITNPVVKRAITQTLKVVRAIERKYGKPYFIKVETARDLAKNFKDRNAIKKENEENQGYNEDIRSIITDGYKASPKTKGGKQLLSHLKEFNVRLNKNADFNGQQIIKVKLYREQNCVCLYSGKPIDFETMLHDDNAYQVDHIIPFSRSNNDGMTNKVLVLTEENQKKGNQTPFEYFGADEKLWKEYVARVGSTYQTREVKKGDKDAGINYKYNGYAMKKKQNLLLQDYKNDSWNVRALNDTRYITRFIQNYLRQNVDFAEGEEKQRVIAPNGTTTAYLRKRWGLAKDRAEDVLHHAKDAAVVAAIDQKIVMQANLYAKHHEIKALLAATKTMEEKTDKLTGEITDEDEFDKAQRRKAAILVLSSKHFPQPWDNFGKEVMKRTLNTDIATLQNELRGLDNYDEDFRLSIKPIFVSREIRHKIRGEAHESKLRSNRNRNGQNIIRIPLTELTLQRLENSLVKEEFDSQKNSNGSSLYEKLLARLNECNGDAKKAFNPPFKLYKGPKQDKNGNPISPVAAVKVYDKKGVVSVGRKANAPVALAEMVRIRVYKKDNQIYMIPDYRINILENKETMELLKPLKKVSKIDNSFNFIGYLYKGDLITIQKDSQTFVGYFVQFEGDNRITIKSHLAADSSRNSKSTVKRESLSGINYLKIHKVDILGGVNFSEGIVWPGAS

SEQ ID NO: 8015 - protein, 1002 aa, unidentified
  REGION 1..1002: note = Description of Unknown: Cas Enzyme sequence
MKKFGDYYLGLDLGTSSIGWAVTDEKYDILRFNKKFMWGTHLFDTGNTAAERRIFRTSRRRLKRKKNRIELLQTLFSEEISKKDFGFFQRLKESQYDIEDKTVKNKNTLFMDKNYTDKDYHDEYPTIYHLRKALIDNEENAFEIRKLYLAISHILSHRGHFLFEGELSDNFEFDDIFNEFVKYLNEELNIEFRIKLDVSLQEIKEILTDKMLNRTRKKEKLSELLEEEKNKIYQEIWKLLVGNEAKMSIIFDNKEYEETKISFSKGNYDEKEEEYESILGEKIVLIQKAKAIYDWMLLQNILKEDKYLSYSKVKLYDEHKKDLKVLKDVLKKLDKKAYKEVFSEQGLYENYAKKNEKEEFYKKIKSYFNDENTNEIVKNILNKIELDSFLPKQKIKDNGVIPRQVHQKELEMILKNAQKYFTWLTEKDETGLSVSEKIMKIFKFKIPYYVGPLNSKSPFAWIERKEYGKILPWNFEKMVDVSKTAEKFVKRMTNKCTYLPEKDVIPKNSLLYTKYMVLNELNNLKIRGEKITVDLKQKIYIELFQKNKKIGMKTLVEFLKSQNIIVTKTEITGIDGTFNTSLGSYIDMIKIFGEENIVKDTYKKMIEDIILWITLYDEEKKLIKTKIEEKYSEKVTAEQIKLILKLKYKDWSRLSKEFLTEIETMDEEIVKEIKKVTNKSPKKVFIEMARDTQTEKKRTEKRKDKLLELYKNIKNDDSVKELEKNLKDKTNDELKSKKLYLYYLQLGRCMYSGEVIRLEDLMNDNLYDIDHIYPQSKIKDDSFDNTVLVKKQINADKIDVYPIDKSIQVKCKALWTSLKEKGLMSNVKYERLTRTEEFSDDELAVFISRQIVETRQATKVLADLLKTIFGSDTRIVYVKAGLTSDFRQKFGIYKFRELNDYHHAHDGYLNIVTGNIYNTLFTDNPYNFIKDRKKDNRAYNLNKVFERENNVWNPDTMITKIERYIYKIRPLFTRASYEQKGGFSDQNISSEKDKLRPLKLSG

SEQ ID NO: 8016 - protein, 1324 aa, unidentified
  REGION 1..1324: note = Description of Unknown: Cas Enzyme sequence
MASEIVLGLDLGIASVGWALVRREDGESKELIGLGVRVFEEGVSNKGQGDKEESHASARRQKRLARRNLERRARRLNRVYNLLAKVGLLPVLPEHLSHPRTPSGEGSAANRQRLVDETKRARHEALQTLELGAKDPDTGRRPAAADPNCLVGKYRRDDLPVERFLPYFLRDRAIHCALEPHELGRALYSLAQRRGVWWNRADDNPKAEENKPEEKKSKRASKKDDDSKSESGKVKAAVAEQQVKLNKFGEARKLERPATLGEFYAAILTGDSTALAIDSEGCKPEEYQLRVRNRAKVYNRCTTREMLKAEFNLIWESQLKHHAGNAAMLAILNSTVDVPPRSEKVIERNGRPVVKYPGRPGKTVPLREAVFKAIFHQRKLKNASHLIGACELENHTKHRRECDGGKNEISRSRPLQYDRKRAPAGHPFATRFKMLKMVNETRVFRRRSAEQDYTPVQLDPSLETGLLPESLRAKLVALLSGQESLRWQQAREELSLNADTAFNWELQTGNKATKGGNQKKEKGSFTPAHKHFIGDVTAAKFSEIFGAERWQRMCQTKAPSGMTEAEEVFWDWYACQDPEALAFIGAVRWKLDGMTVANPGGLLPSQIVEECAKLRADAVKRGRENPSNPGKSAMQLAQERFGKVSFEGPAKAFGDLKLPQGYARYSTAALKHLLNHPTWGMERGHTEGTARDMLYVARKVAMGPGTTPQLKPLVEVFPTLNNPVVKRTLSQLRLVVNELIKVKLGGTPPHLIRVEMTREMQTNREGREAIQLRQDMNRKANENAAKLLGLDPETTSSELKRKVQLAQEAGWHCPYCGLGYEAQDIHSLEIEHIIPTSILPDNSFANLTLAHKACNILKGGRTPFQARHDFKRNWHDILNHVAVFRSTEKYFDSTKEERWTPSERPPEPKPENSATGKRRKTLPKAAQAKEGERHERGHPKLRLFLMDDAALEEHKKRFTNADLTQTGYITKVALGYLATLYGSSPDKPHEIPTGRVRHVLQVSNGSITALLRDELGEPCSQCQIKHAEPDKGKVIDGWISVNHVLRDGGSREPGDGRNPLSGERRKKERKDHRHHAVDAAIVAITDPNKLVGRLQEAFRQSRRQDQEKQRYSWGRVQAEVLPQWPTFYRDLYEFIHVKDQFGHGFKGVVVSHAVERKTTGPLHDETFRPKAGFQPIRDGAGRVLIGKRPVSVIEIGTGERARLAQPGDNHHVGIYQDSDENWLADRPASFFDVATRKRLGKPIIRKDAFANGAIKFRFALMKRDALHLADGSIRVVRGFSAENKPSGPYVRIKHVAHTDARDDMSIPEEESPRDPISTLFKERG

SEQ ID NO: 8017 - protein, 1113 aa, unidentified
  REGION 1..1113: note = Description of Unknown: Cas Enzyme sequence
MAVTLTFDIGYASIGWCVLSAEPETQHPEFLGTGVVTFPTDDCLASQRRNLRRTRRHIRSTRHRIERMKRWLVHRGFIGREEADLPGDASPFFLVAHALQGGRILSALELWSVLRWYAHNRGYDGNSRWSREEADPDDTEKERNAMALMEQAPATSTMAETVCKILNIDPANPKKRSSEKPYKTLNAAFPRSVVVGEVKELLRFHLDKLEGLDAKTVRFLMAESPLTKEDRAELEAADIRLPKRYHGGLLFGQLVPRFDNRIISRCPIMWADEYGKAKDAGKSDEEARKLADKFAKVPAAKCPEFLEYRFARVLANLKADGEPLSKELRRHLFDRAKERGRFTEAELRKEIEAQLGKIGTNLEAYFKIHPDAEKQLVIDPAVVLPHSSRVLKPIWPLLGEPARNSALRLWSRGKAVCPAQLLELAHNGGDPEQAETVLREHFAKLPKKEANAASFDAFLLKPMRADYGSGRAPYSRVVLKRVVEEVLEGCDPTKPARSDAKLDGEDKSADGVLYPLMDPSSRVRELMAERPLDQLTNNHLVRHRLLILGRLLDDLLHEFEIGAEDETQVVVEVARELKEFSGMTVKQITTEMNSRLKNFKDAVAYLEDNAPNLLQESSGRGGIIRKCRIAMDLDWRCPFTGEKYDAQDLPKMEREHIIPYATRNTNALHALVLTWPEVNRMKGKRTAKQFILESAELPSREVPNSKRRLTLFTPKQYETFVEGLETRGHPDDARRKRARKALLDTAEFEDKDLGFTEGQLTQSSQLMKLAMGEIKRKFPQALVDPVPGPVTAEIRKAWKLTGTLALACPEVLDENGNVRPKDEIRGLTHLHHALDAAILALAAHYLPFRSRGKDQKGKIWQALLKRNQNDEEKRFLMKFECCVEIPKTGKNAGTVVGLRDLDANVKNALGRSLAEGRVMQHVPADRSGAKAELTTWRVLEIEGEGEEARVKLRQRSSEVKEGVRKVSIKTPPPKRAGKLIGLNPKGGHGKLKSIKGAVVIEENYGLALDPKPTIIPFFNVSARLRDQFESNGCNPFRILRSGIQIILQGQGERNGIWTIATVQASLKIDLVRPGTVGCPKKGNSVWREVAVKGLLAKGIEILPLKYTAYPSER

SEQ ID NO: 8018 - protein, 1038 aa, unidentified
  REGION 1..1038: note = Description of Unknown: Cas Enzyme sequence
MPICKGLITVFGTKAKDAIMEIHKYNIGTAHKIHNNYSIYDLWHALFDFDEKFLERFAIEKLGIANTKSKTEEDNGNPFAKLKRLIVSSYADLSLKAMCKIIPFLQEGFLYNEAVVLAKMPELLGQRWEFEKDKIILNIRLANQLYNQQKLIAGITNNLIDEYKALEQDIYGYKDYNYELGDLHDDEILKVCKGYFGEKTWDNKQNKEDIFQNVKKQYQLFMYDSKRAYREAPNFSDILTENLKSSYINIPGKPYHHSKRDNLYLKKYKNRDSAKTILPIHRKSGKEILPNAVIDSIKNPMFNKSMSILRKLVNELIIDNLIDSDTEIVVELARELNDNNKRAAIERYQRLREDNREKYRQFLEEFKINENSGIDVEGNIPKFELWTEQIFDTTKDENGKEVYVRTKILKEKDALKRYELWHEQKGQCMYTGNMISVAQLFSNEIDIMHTIPRSLLPDNTMANMTVGYSRYNRDLQQQRFPKECENYFRDVDGWGTRIEERLKSWIETRDNFKGLYESRLKPQGGEDEAKKNKRIQEKHYYKMHFDYWNDKVERFEATEIKNSWARRQLVDTQMVSKYAREFLKTYFKKVSVQKGSVTAEFRKMYGFQEQDEIKSRNRHTHHSIDASVLTLIPSNSSLRDRLLKKMYEMYELENRQFTYSPYPGFNSQSLINQIENNTLIVNYAKDTILKKTSKNVRKRGKVQYVKNKKGEFIVDKKGNRIIKVAQGDTVRSTLFKDTFIGKIKDVERFADGKPKRENGDWKYKKGKDEFAFVVRKPLKDVLGKIDDIVDPVIRAIIKTQKEKAVDPQGNKIRHVRIYTTSGQKVKERLSYRSLHDYKNNYYAAAGSLPYAILFQNSSNNKVERALIPIASFVIANNIDTNEKFNIEEYVKKEHIQFKKYDSKKLLKIGQKVIVFKNDSEYEHANNLEFITKRLFKITQFKYDGSKIMLQYHLEAQSQGEIDEQVKSYKDNILKQKEIELGIPLIMENELILDTVLRKKDYKKRVEDFSTRLKIIAQNSSIEESDSIKKRIEEFKTES

SEQ ID NO: 8019 - protein, 1518 aa, unidentified
  REGION 1..1518: note = Description of Unknown: Cas Enzyme sequence
MSKIFGLDLGTNSIGWALRNPALTENQIEKFGVLTFNKGVGLGKTGEYSYAAERTKKRSTRRLYQARKYRLWATLEVLITEGYCPLTINDLNKWRHYSKEEARKNNNAGRVYPVWNMAFDAWIKLDFDNDGKPDYSSPYQLRKELAETKLDFTQEVNRYKLGRALYHIAQRRGFKSSRKGADDAKEKETNDSEVMDLQYSEKKKNKVIAELFEKYTDAKTIGWLFALLENDKIRIRESIAQYAIRENYKDEIKFIFQFQGLKFDHSLYTKLVETGKNKNDGSIFYKRPLRSQKGLIGLCTLEQETRIDKKTGKQVQVGKYRAPISHPAFETFRAWAFLNNIKNKENNEWKQLPLELKQEIYAELFFRKSKGYFPFSEISAFLKKRGKDWQLNYSLKTTVTACPVSARLKDIFGDDYLTAQIKKDQKSKSGKDYYDIEDIWHVLFSYEDQEYVAEFAECKLKLDADKIKQFVIAWNALPVGYGMLSLNAINKINVFLQKGLIYTEAVLLANIPEIIGRDLWQQKERLLLNSISGVIVENRQQKTILNIVNSLVSKHKNLKANEKFGHKDNNYKLIESDFNDIQIAIEEQFGSNKWNGFSEDEKKTISATVKDCYQAYFSKQGIVRNNDNEERVVTIQSGNKKYHKTESDYYRLPKLIDTLKEFLQDNFEHLDEAKLSKIYHPSEINIYPPAKEIEGVIKLGNPKTGSFKNPMAMRTLHELRKLMNYMIETNQIDSETRIVVEVARELNDANKRWAIETWQRQREAENQEFAEAIKQLLSENKNIKVSAESNEDIDKIRLFYEQNTEQTLPPVIEDKEDENEDGKKKSKKKKKEDIAKDKAERWSGHGKKLIDKYRLWKEQGYQCLYTGKYITLTDLFDENKIDFEHTVPRSKSFDNSLANLTVCYHDYNRTVKKNQIPTQLLNYDKEYDFGGNIGKCSTITSRLEAWKDKVGRIKQQIDFWKTKSKKAADKSWKDDAIRQRHLWQMELDYWQNKLDRFTIIEITTGFKNSQKVDTQLISKYAFHYLKTYFDKVDVQKGSITAEFRKIYQLQVLDEKKDRSKHSHHAKDAAVLTLIPVAAKRDAILEKYYEAKENRIDFKVEPPFTGFKREFVWSIDESVLINNINNNQALTLARRKVRKRGKEVFIEKSDGAKINKWATGDSIRGQLHQETFYGAIKPAQKGENGNLLKDENGKFKQEEKVKYVVRIPFQYKKDTNTPGFKTIDEIKKQVVDEGLKAQIEKQVNEAGGIKEAFEKGMYLLDKEGKPHGNKIRHIRVWASVSEPLAIKKQTNLSDKEYKQSYWAANGENIICAYYENDTTGKTGKIKKDRELEIVNLFDAANLKKFGLVNGKGALQLFRKDKSNQVIIDDKGNKQTPHAILKAGMKVIFYDEKVEELKKQENEKDSDYNKRISYRTYKIVKFTGGRLTFQHHLEARNDKELEKAYPENTPFKTDEKNKEVTYGGRGTSGFTEKVSDALKFNSHNNFEPFPKLLYSVNWLDFAVEGYDFEIKMDGTIRWIK

SEQ ID NO: 8020 - protein, 1048 aa, unidentified
  REGION 1..1048: note = Description of Unknown: Cas Enzyme sequence
MGKILGLDVGYASLGWAVIDTNRQDVAAMGVRIFTEGVANINSNQEQSRNAQRRMKRQMRRQYERARERRLQLRKYLLSMSLLPSDGEELQRLFATDPYALRAKGLDHPLTLHEIGRVVDHINARRGFRSNRKVAKDDEEGTIYEGSNDSGMVGINEINKSLVPALCKLKSYALVAEEYARMQGPSPHGFRTAGEYLASLNPHQVRRRKRFLLREHLEIELDLLLRKQAVYHTQLTPDVIARIARLVFWQRPLKSVRHLVGKCQFEPGKKRAHKSHPDYQRFRMLQQVNNLEIYGPGRVLDDDRVLTPKEREKLITYLTTEGKSVNLSKDRSKIYKTLGLTTKGDYTFNMEVLNACTTMKALREVFGADRIVQMTRDEINEIWNVFNMAEDNEWLEEYARTTWGLNSEQAKYATSLKLEDGYGSVSLRAARRILEHLEEGWPYHEACARAGYHHSKPDVPDENNLEPRVRALAQNENRNPIVQRSFSEMRKVVNALLKEHGPFDSIRVELGRELRKPSKERVDIDKRNKKNRDDNDIIREKLKKECGLEKVTRADLERYKLWEEQNHRCIYTGESISLNQLFGGEVDVDHILPYSRTLDDSRSNKVVCTRTANAQKGNLTPAEACGRGIFDAHRLKEHVEALARSLKIDKRKASRFFLDDEGMTKLYGDDFTERALNDTRYVGRLTSTYLRYVCKDVIVTNGTMTDRLRRRWELDAVIPDLAKIGRAWLDEKAHSNGQKSRADHRHHAIDALVVALTDRSLIQRLATMNARDDGNGKRYNDGRVLLPDCPIPGIKKLATDCVDRIIVSHRVNRKVRGQLHEETLYGRLRDALGNPRLNENGIQLYVVRKQLTSITLNEAHDILDPVVRRLVLERIEAHGGHKDNKLHPNTFLAPLYKERRDGQQGPQIKRVRVAKASSGMQNIRNGTVFVETGSNDHIRLHPFDAGGKKRPWRVYTLFESAKAATIDPDKDFVSFRINELYVHDVPKPGEELDPWKVYRVQKVNVKDGEVTCRHHAAASIDNNLARLIKKPNTLKGAKLIVTAVGQAV

SEQ ID NO: 8021 - protein, 1103 aa, unidentified
  REGION 1..1103: note = Description of Unknown: Cas Enzyme sequence
MATTLGLDIGTNSIGWCLVEDGKKIIGMGSRIFPVGVKEDSYAKSGTEESRNAARRTARGIRRGYDRYKQRRAKLEALLTEHGMMFDKKVSLPTKKLYGLRKEALDRKLELEELGRIFFLMNQRRGFKSNRKEAAKEGDDEKKLTAYKQAMSDFEAKLKASGLRTVGEYLASLFDNQPANWHNENEPRERIREHQRIKRELYQQEFDMIWAKQSSYYPTVLTAELKEDLRDKVIFFQRKLKSAKHLVSKCRFEPNKRVMAKSDPLFQEFRMWQRLRDIRVTYGDRVNEFLTNEERGTLAADLGGKASLSKTEIKDLLGFKRSATFNDIGEKVLGNITVARIKDAVGEDWYWKQEPEKRLKLWHTLYFAEDEGWIEAYAQKSLGMSDEQAKRYAEVNLELDYGSISHKAARKILPFLIDGFDFATACAEAGYHHSQRDLDKADRTLDAKLDTSKMDPIRNPLVQMTVNETGRLVNAVIEEHGKPDLVRVELLRDLKKPKAMREKMRNSMRDKEKLRDEYRAFLQARKVLPEIRMSDIKKFELWLELEYSESDLGKLAPAMDLKAFKKFAEAVSPKDREKFHLWLECERISPYTGNPIALNKLFTEAIHVEHILPYSRSIDDSFVNKTLCEDHVNDAKGNLTPLEYFEQKRTPAELKAFKQRVKNFSQGKLDKFLATEVKDDFLNSQFTNSAYIGTEVRDLLRTTCKDVRVTNGQLTGLLRNRWSLNRLLNNEADQKNRDDHRHHAVDALVIACTTQSLVQKISSESKFDHTGWQKLPDIGLPWTNFRTDAGEKLSGMLVSYKGGKRLLSSKLNKYRHSKAHEGKPENYQKTVAVRGRLHEDFLYGEINNPWTGEPTYVIRKPLNSLETFEQVQKIIDPAIKKMLVTQLEPAIRAADEADLKDKARKAALAKAVKALVAVPQFMPTKAGKESLRVPVKSVRMEVNTEEMIELRPRTFVEPGSNYCIAIYESPDGERTYLTVNFLTATKRALAKRKDPLDSSGLFPAEHEGKPLLMCLQQRDLIVLYDKHPEEIQWDSSNWMAQHLYMVRKFDRNGNLGLVLHKASNVVLTKPKDYPKGTMYLKTFNTIKGIPVSVNRLGVIQKRS

SEQ ID NO: 8022 - protein, 1125 aa, unidentified
  REGION 1..1125: note = Description of Unknown: Cas Enzyme sequence
MSMTYTIGLDIGIASVGWCVLGETHIIDLGVRAFDKAETAKEGESLNLARRSARLMRRRLFRRAWRLKKLARLLKSEGLIADTKAFQPEHTFTRPLWQLRVDGLDRSLNDEEWARVIYHLCKHRGFHWISRAEAKQAEGDSKSEGGKVKQGLAGTARLMAEKGYRSAAEMVLGEFPEAQRNKQGEYTKALARELLAKELALLFEKQREFGNPHASSALQTAILGNGDKKSGLFWQQKPALAGADLLKMLGTCTFEKGEYRAPKASFTAERHVWLTRLNNLRIVTDGVTRQLTEQERQLCLPLPYQQAGDLTYKQLGTALTKAGLLEVGSFKFTGLAYPTEAQKAEGKAKDPESATLIKIPAWQELRQTLAKAGLDDEWKKLSGDALCGQPEIFDQIAWVLSVYKDDDEVRAELAKLSLPNHDALIDALLNIRFDKFHALSLKALRAIVPPMEKGLRYDEACVEAGYHHSQLFSSTDDKEVYLPPFYEQSRGHKRGEEGKMLFSERLDEEITGGIPRNPVVLRALNQARKVVNAIIRRYGSPSAVHIEMARDLSRPLDERNKIKKEQDEYRARNQRDRERFIELFKRPPKGNEFDKWRLYHEQNSQCPYSQKPLAPSGDVAEIFLEGSTEIDHALPYSRSFDDSKNNKVLVLTRENRDKGNRTPYEYLGGAENSERWQRYVAFVEANKAYRLAKRTRLLRKDFGEKEAEEFKERNLNDTRYICKFFKNYVERYLKLADGSHDKQCVVLSGQLTSFLRARWGLLKIRSDSDRHHALDAAVVAACSRSMVQRLSNYSRTRELEQIRDGFVDIATGEIINPAMHQQLREHFPDPWPYFRHELEARLKIDSPELLREEMARLGSYSEEELATLKPLFVSRAPQRRNGGAAHKDTIYGQPEKFKEKGSVTQKVALSSLTLKDLDSLADPHRNTKLYGAIRERLEAYGGKGDKAFPASNPLRKPDKDGNPTGPIVRTVTKVIDKLSGIPVRGGIAKNDTMLRVDVFTKAGKFHLVPVYVHHRVTGLPNRAIVAFKDEEEWTLIDESFEWCFSLYPNDLVQIKLKGEFYLGYYAGCDRATGAIGLWVHDRNANVGKDGLMRIGAKTASSVEKFHVDTLGNIYPAPPEKRRGLA

SEQ ID NO: 8023 - protein, 1367 aa, unidentified
  REGION 1..1367: note = Description of Unknown: Cas Enzyme sequence
MPVQHLLGLDIGSNSVGSVWIDLGCGQILTGTSIFPAGVVESDEKRGDPKNAARRMARRARITLRRRAQRKRQLRLRLIGAGLLPSTAEGWKTLLGGTDPWELRRVGLDRALSPHEFGRVLLHLSQRRGASGLATTGPLDGDEPGGATQEDGEVIRAIGEVQAKMLAAKVRTFGEFVASQREQRVHRLPGAERGPSGGRREYRDRVRNTRDVYEHCADRAMIREEFGRLWAAQKRMGGPTAALLTDELRLALDDPDRTALDKDPTATEEQRRAYKQMFKEGGLLFGQRRATWDAGMLGRCDLEPTERCVPHADRHASRFRVVEMVNNLRVIERGKPVRPLTPEEREKVLAYLSGPLGMTPARTVKGKQHPPRPKQSVSVTDLRELMGWGRATKNTPVRFSIESDENREINTDWFAREIVHGAIGVEAWSGMSESLREGINRVLLKRDPAEGADEAALRAGLLSWGGLSATQAGAVIEAWKRRPSIKSKRLKLGRRAVRNLLTVMDRPEPWPDPHCPSSYRWLTQIEARKVLAEDGDFRDVTTGEPMDAITRRRYATGAKGATARDRHYMGKHVLMKDGRPVIGPDGRPLAEPPPAPLIANPVVRKAIHEVRRHLVEFMTTFGRKPDQIRIELSREARLGAKDADRALFRNRLRDRIRRDIIEHFGLDGRTPTQQEAATLRVVLWAQQGGRCPLCGGTSGTLTPRAAADGEGCEVAHIIPRGGGGDNGQSNLVLSHTECNREMARRTPREYWNATLPGGFAEGYARVEGLYGEIARPRPTDAVRKAGGAPLWACYFDVRDDRRKLEQFAKDVKDIQGMTPRQEAATRYAARQVMAYLADALYDGKGLPERSMGEGDPEGQRRIFTTDGLWTGRLRREWGLFFDAHGAAAKGLEEQEEHRRKQKNRGDHRHHAVDAVVVALSTRAVQLAWDERERAAEAAGINTADAEAMERYRRANPIPPPEPFGTREEFREAVRRAVFGDGSTPRPICHRPVKRKLIGPLHKPTMYGPVLNPDGTRHPSFVTVRMRIADLKPAHLRVPPGWDELTARFHAQNVPISERTRLRASLAALRDPAPGPGLVRDRTTRDFLRRWLRDTGLSLGVAENANYRVRGGFTDADLRRVLPRDQAIPTPSGVPLRTVVVIRAIAEPPDIPRRRWDPKTNEEIKESCAAAVRLYDLQNNHHIEIRMSTGRTRKTKWTGTVVTAYEAAMRKLARLKQFKAVGVPKPDEFRCPGVMSEADKRSWRPIIAAIERAHPIVNRADDEALGGRFVMSLCEGETLYMRHKWTKEPGYFVVAKLDKPQSVVLVPDWDARAAGPRKDSSGKPVPDSQRESFTATPSDLASLAPPGHPHAVKVRVSPLGVVTVLHRD

SEQ ID NO: 8024 - protein, 1295 aa, unidentified
  REGION 1..1295: note = Description of Unknown: Cas Enzyme sequence
MNKILGLDLGTNSIGWAIRDIAQTGNQIIDKGILTFEKGVGEEKGVEFPLVQKRTESRSKRRHYQAEKYRKWSLLQTLIEHNMCPLTIEELDKWRKYTKGQSRRYPQSVAFINWLRFDFDGDSKPDFERLGFSKHESHYLFRALAVSDDPTHRNIFINNPHLLGRVFYQLVQRRGFRGRDDDEARTILQGSKDGKTAGAEAISLLIRQYKTLGAALYHLQKDKGERIRKRYNLRADYAHELQQICEIQNIPDSVYKRLEKAIVWQRPLRSQKGLVSVCTFEQNKPRCPISHPFYEEYRIWININNLKIQLPDGINKQAYIQEKIYPLFYRKDRDFKLSAIQKELHKVGGSLGSKFKDDTKIPSATLLNTFKELLGKDWKDHYGWEPALQNQFKPVSYSFEDIWHVLFTFDDKDRLMLFAKEKLSLDEEKAEKFSKIKLQQGYATLSISAIRKILPYLKAGYLYSHAIYLANLHKVLGKNTLSPSDAQAFSTILKDIIDQHRSEQSWIAVVNGLISDQLNSNTRFGMDPAYQLDADDMNDIEKKLEEEIGEYSWKKKSEEDKQVAIGFIAEKYLSFLRKAIQYSKEPVYNKLPRLHDRILSHLRETYDVQVNNEKHLWHPSEQESYPAAKYENGIPILGNPMPISRGLKNPMALKTLHQLKKLLNHLLKVQKIDEDTRVVIEIARELNDANRRRAIEKWQRQREKENDEYRKRIEENPELKGLLLDVKSKDIIDKYRLWIEQNKTCLYTGNIISLYDLFSGKFDFEHTIPASISFDNELKNLTIAESLYNKQIKKKLFPTQLPNYEKEITIDGIVYAAIKPRLEFIIKKVEELETLRDEWTNKTRFASTKEIKDACIQRRHIIGFDLDYWRKKLNSFTLTEYKAGWRNSQLRDTQIITKYALPYLKTVFRKVEVEKGTVVSDFRKIYNIQPKSEKKERTRHSHHAIDAAVLTLIPPAVIRDKILERFNQPKDQHADHTYHEPVRNWTDFSAAHILSIEDDVLNNFLPKQRTLTKTYKNVRKRGSKQFVKEKHADGKWQYKLDTKGKRIPLVAKGDSIRGQLHKESFFGAIKLNGEKYLVERYPIADFTSINDCKHIVDDFVRKIVKETLDQRVKEGQSFDQAKIEPVPFPNGKTVIKKVRCRVAAGRGYLTPEKALEVNKHDFASKHDYKQSVYAQNEENTLCLFYEGLINQKEERAFNIVSLFDLAQLKISKIEHIRSEKYFQAAEIGRGKKKVEIPLSHIITVGKKAIPFKSNKEELKDLPRKDLLKRIFRIYKFNEPSSIYIYLQNHIEARSN

SEQ ID NO: 8025 - protein, 1049 aa, unidentified
  REGION 1..1049: note = Description of Unknown: Cas Enzyme sequence
MKRIFGFDIGVTSIGFCVADIVADKDHGAIVHMGVRIFPEARDPEGAPLNQLKRAKRMARRQLRRRRDRRRQLAEALASFGLLPLYNTPEWAAVMASDPYALRKRALSEAAAPWELGRLLYHLAKRRHFKGRDLDDEADKAEEDGADEKAAKTNREATLRALKDGAATLGAWLADIPADQRKRGRHAVRSVVNDEFHKIVSAQAAHHPILRQDGVAATLEDAIFAQRPVFWRKNTLGSCRFIPGAELCPKGSWLSQQRRMLEKLNNLALAGGNGRPLEAEERAAILAALQSQASMSWGGVRKALEPLFKAQGASAKHLKFNLELGGEDKLPGNVTEMKLAQVFGPAWAEHPHKQAIRDSVPERLWRADYSEIGHPRTGVQRVVIKGEAQRRVARQAAADSFIADFAVTPEQAQALAALTFPAGWEPFSNAALQRFLPRLAAGARMGTLLNSPDEEKWRADTFPDREQPTGEVHDRLPSPKPGPQGQAERERIKKLRNPTVVRVRNELRKVVNNLIAVYGKPDLIRIELARDIGLSKREREEMLEGMRQREKQRKAAIKDLQAKGIAEPSPQDIEKWLLWKEARESCPYTGDKIGFADLFADNKYEVEHIWPRSLCFDDGFRNKTLCRKDVNIAKSNQTPFEYFQTRPAKEWEDVKQRLEKLTKKKADRDGLSPGKVKRFLREAPLDGDFTARQLTDTGYAARQAVEFLKLLWPDEGIAAPVRVQTVSGRVTAHCRKYWGLNHILADDGEKTRDDHRHHAVDALVVACVDPGITGRLSRFFQQKDDPAAQRPQLSPPWPSIRADAQKAVEAIIVSHRVRKKVSGPLHKETIYGDAKIVEKTKKEEYRLYVTRKKVEALSKGEVFDAAIRDPEVRRIVKAWVEAHGGDPKKAFADGYPRMSANGPEIRKVRLLVKRQPKLMAAVSTGFAQLDENHHIALYRLPGGKVDFEAVSLLEAARRLAQRQPVVCRDRPGAEFVMSLSKGDVVFFPDGARKGLWIMQGVWASGQVVLWRAEDARGATVFYPQAASILRDGGRKVQVDPIGRIRPAND

SEQ ID NO: 8026 - protein, 1549 aa, unidentified
  REGION 1..1549: note = Description of Unknown: Cas Enzyme sequence
  MOD_RES 1496..1527: note = Any amino acid
MKKVLGLDIGTNSIGWAFIETNAYENPDTLNGKILQLGSRIIPMDGDAMSKFESGNPESKAAGRRQARSARRLNQRYKLRRTRLIEAFKILDWIPKNFPTEFKKLTKHNINTFLPFSESLKKEAAEYFNITGKKTTKGLDYEISDDWLIYFLKTKALHAQVSLPELARILYHYNQRRGFKSSRKDNKLSEDSGEKKYPLLEKWVEIITVTAIEEKGKGEGKDKEYTFYEFTCKTPRLEFKAIKKRKNPLDWLNKNIEVEITKKTTKDLSVNYTIAEVDPKAWESRKAALEKDIEKENLFISEYYLKNIKADRNYPIKQRIVDRAFYQKEFQKIWQAQSIYYDNEFNDKNKIAVIADTFYVHNKEKNKELKGKDLFHIFFNDIIYYQRGLKSQKGLLANCQYETKSYKTKDDNRKEVGVKVVSRSSPCFQEFRIWQTIHNLKLIKKEEVINGKLRLNIDVTNQFLTEENKENLFELFDSAAEVSHDSILRLLGFKKDYLEAGEKTFAYRLNYPDDKGFPGNETKALFKRVFKKHGFEIDGEKYLTDKTLFNHLWHVVYSLPEEKDIVNALRNKTYFDFPEEVITHISKLPEFKSQYASLSSKAINKLLPLMRLGKYWNNAFDGSTLERINKIIDGEFDESISDKIRDEVVKLKLDKLEDFRGMPTYLAAYIVYGRHSERANEAKYETIDELKIKELIPYNSLRNPVVEKVIRETLSLVKDIWKDEKLGRPDFIHVELGREMKNNNEERRKISETNTKNRVERERVIALIKELKYPNFSENSISDLEKFRVWKDNGGKEAEEHFEGLFKSNKAEFVKDVEIEKYKRWAEQNYCSPYSGKAIPLSELFTEKYQVDHIIPRSKFYDDSSGNKVVVESEFNDRKGNRLAIQFIEDFQGREIHLSNGEKRTVLSLDDYKAFVDKVFTSKKKKRYLKLYEVPEDFVERQMNDTKYISRTVAQFLRPIAMGNESDEGVVYTSGGITSDLKGKWGLHKLWKELLRPRFERLEKILDEQLIFPSEEHEGDYKFGKDYKRVDHRHHALDALVIACTSRSHIKYLNSLNSLSNNKGDIAKYGEWAKWRYLLNKKKQLENKENGMTEFGAPWDNFYIDAKNAIESVIVSHKPSAKLVSKAINRYYKWKEVEPGKWEKKIHYQENPKDDDKYWVAVRQSLFGQPYGKIHIAEYKKGVDIKAAIKTQIQFLSREEYKWNTEDWRIAKSSIMKKADALIRQFNRDEKKILKQIESNPLTDEAGNKIEKLDLLQFKKYASKRVAIDESFTSDKIKNMPFAGLEKNWLTRLLKEHLAEYGNKPNDAFKGEALEMLYKKAPFPINKVTRKEGGEKIEKNNKLLDGDKGVNQYFIVEIRNEINKKTGEEKVVRKYSTPNFLDCIERLAKGLPIHDDSPNSRYIVLSPGDMVYVPQDGEDIGSIDWHNRKAIAERVYIMKSSESSSCYFLPAFVSSLIAKYDAKLKGKGEFGSQNKSEKTMDDLHTIKENLIKLKVXXXXXXXXXXXXXXXXXXXXXXXXXXXXXXXXCYPSPYWANVESGWPFPSKSEI

SEQ ID NO: 8027 - protein, 1107 aa, unidentified
  REGION 1..1107: note = Description of Unknown: Cas Enzyme sequence
MKKVLGLDIGTNSIGWAVIENDIEKQDGKIIKLGSRIIPMEGREKDFEAGLSVSKNADRRLSRGARRLLQRYRLRRTRLINVLRILEWLPNNFPTDFKQIQKFNINEYLPFESNTIDEANKLFNVTNISSDWLIYYVRTKALTHKISLTELARLLYHFNQRRGFKSSRKDIKEVEASDQVKYPIKEKYIDFLTILKIIDTKENTKYGKIFSVIAKNNLNEEVTAKIIRKSIPDWEGKVIEIEVTKTTTKNGDVTYEFRLPDRTDWEKMKLALEQELVNSKQHPGEYHFHNLLVDRNYRIKDRIIDRKFYKDELLAILETQAIYYPFLKEKNVKPEVIDSLYKHNSQKRKELTSNDLIHLFINDIIYFQRPLKSQKHLIAECQYEKKADPNGNLFGVKVSAKSSPIFQEFRIWQDIHNLKIFKVYNKIVNGKFKNDEDVTNTILTTEAKEILFDLFNSKTNITNQDILKNLSFGENQLDTSTYRTNYPPEKEFKGNETKTVFRRVFNRHNYKVEGEKLLQNRDSLNLLWHIVYSLDNEKNIYSAIKNNFNFPEDLTAHISKLPPFKLEYGSLSAKAMSKLLCCMRCGKYFDSNNINADIAERIEKIIDGEVDDTIPLKVREYFNNMKFRRIEDFSGLPPFIAAYLVYGRHSERENSEKFENGSEIKLLEPNTLRNPVVEQITNETLQLVKDIWKSFGRPDEIHIELSRDLKKNASERQKISKQMMQNENDRKRVRAILKELNNANADSPSDMERLRLWEETGNRFAKESLPKFSKEPSKQEIDKYLLWGEQNHISPYTGRVIPLSRLFTSDYEIEHIIPKSRFFDDSFANKTICESKVNKFKDNFTAMELINEYSGYKIPNSEFSLFDIDSYTQHIKATFFGKKRKNFLSDSIPEDFVERQINDTRYIGKKVAELLYPIAKDSVIFSSGSITSELKEKWGLHRVWKTLLKPRFERLEALSGETLIEFDKEHNDLRFKKDYKRIDHRHHALDALIIAATSREHIRYLNSLNSASNKEFLNRKYRLVKSGIREFNLPWSSFTKEAKESLESVIVSHKNRVRVLSKGFNLYTKWVYENGKWIKKSVKQENSNLFSIRKSMFKEPLGLIKLA

SEQ ID NO: 8028 - protein, 1047 aa, unidentified
  REGION 1..1047: note = Description of Unknown: Cas Enzyme sequence
MTSELVFGFDIGTTSIGSAVVRMDAAAGSGEILHMGVRIFPEARGPDGIPLNQERRKRRMMRRQLRRRRDRRRDLNSILSQSNLLPPFSKEKGSPWAAVMARDPWQLRKQAISEALSPHEVGRALYHLAQRRHFRGRDLEDAAGEVAHNAEAQVADEQRAASQRERDRSDLSASGLTLGAFVATIPERSARRRGHHFAREDVASEFQAIIEAQSQHHAKLRDQDFITVLEQTIFDQKPVFWRKATLGACRLMPREELAASASWAAQEKRMLEKLNILRIEEGNGRPLDDEERAAILKLLRKQDSVTWAGIHRHLKLYWRTHDLPEKPNFNLQRGGEKGLVGNRLENRLAAIMRPRWDAEPDLRDRLRREIHARLYAADYGQIGGRIVIRREAERRQARQQVRDALLSDFALNNEQADELAALSFATGWEPFSETALWAFLPRLEQGAVFGKLLSGPDEEGWRNATFPNRVQPTGSWVDRLPTPGNSREEIDRQKSVRNPTVLRAQNELRKVVNNLIAIYGKPDRIRVEVAREVGKSARERAEELDRNRKREKVRKEAVVDLQSNGIAQPSRDDIEKWLLWKECRHICPYSGAEIGFVDIFGRTPRFDVEHIWPRWRSLDDGFANKTLCRKDINLRKSDRTPLELYDGDADALEQVVARVKNFDDRYGPGWRKARRFQEPVPQDFAARQLTDTGYAARQAVGFLKQLFPELGQTGEVRVATLTGRVTSRLRHNWGLNNILSDTGEKTRADHRHHAIDALVAALAHPGYTQILSRWFQARDAATRQHDEPALAPPFPDVRAQVECNLAKIVVSHRVRRKVSGPLHKDTTYGDAGPANGSGGIAYRWFVTRKPVESLTKSLLADDDAWPDAHVRDQVRTWVESHGGDPKRAFVDGYPTVSNGGAPIRKVRILFKQQQKLMAHLKNGYADLANNHHMAVFRNADNRVDVEIVSLFEAADRLRRRQQVVSRARTDATFVMSLAQGEAIAFPDGERQGLWIVQGVWSSGQVVLWRAEDAEGVSVFRPTASSILSSGGRKVAVDPIGRIRPARD

SEQ ID NO: 8029 - protein, 1066 aa, unidentified
  REGION 1..1066: note = Description of Unknown: Cas Enzyme sequence
MGSGLRFSFDLGTNSLGWAVFRDLALEAAQGERRLEPSEIAAVGTRVFSDGRNPKDGQSLAVMRRVPRGMRKRRDRFLQRQRKLIALLEAHGLLPVDKAEQKALERLDPLQLRTTGLDAPLPLIHFGRALFHLNQRRGFKSNRRTDGKNAVSGAMAEGAQRLREAIQTNGARTLGEFLYKRQSEGSPSRFRQAAGATPGKVTYDLYPTRKIVEDEFDALWAAQAIHLPHVLTESARTAIRAAIFDQRPLRPVKPGRCTLVPEEERLPMALPSVQARVVFETLNALRFGEGLNLTQSLDLAQRKVLAQTLMAGKDLSFTLIRKTLKLGSTVRFSLEEGGRDRIEGSKTAKALSRDSGFGKAWQQMQVSKQEQIVRVLLEEDDSDAAVAWVMAETGLDETHAAYVSGVALPEGYGRLGATANALIVQELAADVITYDEAVRRAGEKSGLFQHHSDFRDGEIFPRLPYYARVIERHVGFGSADPDEKDEAKRFGRIANPTVHIGLNQLRRVTNRLIQRFGHPDEIVIELARDLKRSSRQRDEDQRRNTQNRKQNDIRRKKLGELGLPENGLNMALLRLYDEQMAGGVVRCPYTLRVIGVHELFTEAVEIEHVLPFSRTLDDGMANKVLCFREANRKKRNQTPFEAYGATPDWPAIAANAETLPPYKRWRFREDAMERFDNRERDMLARQLNETRHLARAAKAYLSKVCGDENDVWVVTGQLTALMRRQWGLDSILGDDNRKNRNDHRHHAIDAATIGCISRSMLQRVAREAARNEETGAARVVAGFGEPFPGFRDRLRDLVRTMIVSHKPEHGKGGALHEDTAYGIVKSERDKAIGNLVHRKPLDSLNPNEIERVRDPDLRAALQQVVHEVTGEGGKPDPKALSAALLAWAKADAERIAARTGKLRNPVRHVRLLKPKANAVPIRDRRTGRPYKAVVPDENWCLDVVSFRDGKGGQIWKAFAASLFEVNQRDWRPLWEREKLGGKLVMRLHKGDLLEIDDKDGVRRVKRVVRLNAAAERLYLVQHCEAGDFQKRHDDPEDPFRWDLAAISGLSVRNAEIVCVDEAGLRR

SEQ ID NO: 8030 - protein, 954 aa, unidentified
  REGION 1..954: note = Description of Unknown: Cas Enzyme sequence
MTTILGLDLGTNSIGWALIQQDFENKQGKILGMGSRIIPMSTDDKDEFTSGNTISKNQKRTSKRTQRKGYDRYQLRRKSLTNLLLKNEMFNDALFKLQPLELWGLRAKAVNEKIELKELGRVLYHLNQKRGYKSSRSDANLDKKDTEYVAEVKSRHQEIKEQGITIGQKFFAELQKDQYYRVKQQVFPREAYIEEFEAICKQQQKHYPQIITDEFIAQLRDEIIYYQRKLKSQKGLVNICEFEGFSTKNKEGKDAFVGPKVAPKSSPLFQICKIWEGINTISLKNKSGETFEISIEQKQELFKHLDNHEKLTSTDLLKILNLKKNDGWYTNKQIERGIQGNITKTQFLKYLPQDNELLTFNLTVKNSDKETYLVDRKTGDVKGSKQHLIIDADIEQQPLYQLWHTIYSIADVEECVNVLIKKFNLDREIAEKLANIDFTKYAFGNKSSKAIRKILPYLMQGDVYSDACSYAGYNHSNSLTKDENIKRILLDSIPNLPKNSLRQPVVEKILNQMINVVNAIIEKHGKPDEIRIELARDLKQNKEERNKTFTDLNKRERENETIRKRLTDEYKLRATRNNVIKWRLFHEINNEESKLNAFCVYCGKPFGITDALSGNNVDVEHIIPKSLLFDDSQSNKTLSHRSCNEAKGNKTAYDFMSSKTSDELNTYIERVDNLFKNKLINKAKRDRLLMPEAKIPKDFIDRQLRETQYIARKSKEILEQVCTNVWSTSGTVTEYLRRLWGWDDVLMNLQLPKYRELGLIEWKEWETNDGQKHKQEVIKDWSKRDDHRHHAVDALVIACTQQGFIQRINNLSSQGNRDEMYAEVGTTRKGSLLENYIVKHRPFTTKEVENKAAEILISFKAGKKVASFGKRKIKKDGKKQVVQTGIIVPRGALSEESVYGKIKSLDKNKPLKYLFENPDLILKGYIKKLVKERLAKHENDSKKAIASLQKEKIY

SEQ ID NO: 8031 - protein, 1001 aa, unidentified
  REGION 1..1001: note = Description of Unknown: Cas Enzyme sequence
MQRWLRYAFDLGTNSIGWAVYRLSGDPATSSTTVCELLGAGVRVMSQGVAEAGRDVKGASLAEARRVPRSARKRRDRFVMRRATLIKQLCTLGLLPGDHEARRTLADLDPYRLRAEGLDRRLEPHEIGRALLHINQRRGFRSNRRADRKAKDDDKGKIATGVNRLSSELAVSRSRTFGEYLWRRHGGTDGKATPRTRQAVRIRMEGEGTKSLYAVYPSRQMLKEEFDSLLAAQTTHHSELLKPEVIADIRETIFHQRPLKPVEVGRCTFVPEERRLPKALPSVEARVIYETLNALRFGTGLKLEQRLSTEHRDALAVTLMRGENVTFRQLRKKIGVRDDVRISLEEGGTKDMDDYRACSAALAWRKLKGKERQELFGERWFAMSLVERDEIVNCLIDAEDEKEVVDWLTSGYKLSDSAARGVAAWMPPDGHARLGRTANDAVLAELKASDLPTYAEAVKRAGWHHSDERDGVIELPLPYYGQVLERHVLFGSGKPEQDPIQRYGRFPNPTAHIALNQLRRIINLLARTYGAPSQIVLELARDLKMNKEQKDEAKKRNRDNRTIRDRHRAILTEHHQHETADNFLRLRLFEEQERAGGGVARCPFSLKPIEIAQLFSPEVEIEHVLPWSRTFDDSAANKVVCFREVNRSKGKRTPHSAFGDDTRWSDIAANALALPRNKRWRFAPDAMERFENEERNFLARQLNETRHLSRMARIYLSRACDPDRIYVTTGQMTAMLRRRWGLNSLFRDHNRRPDEAGEEAGTLTAKARDDHRHHAVDACVIGAIDRSLLQEMSRRAGQAETEGRERVVMEAADEAGPFPGFRDAVRAAIEKVVVSIKPEHGKGGALHEETAYGLVTNEVEAKEIGNLVYRKLLKDLTAAEINRIRDVRLRAEVQAATANTRNDEKALAAALAQFADQKDQPGREKGVRRVRIGKVKAGEVPIRDRRTGAVYKALLPGENHHIDIVQMREGSWKGFAATVFEVNQKGWRPRWERDKLGGKLV

SEQ ID NO: 8032 - protein, 1436 aa, unidentified
  REGION 1..1436: note = Description of Unknown: Cas Enzyme sequence
MKKNILGLDLGTTSIGFAHVIEDEQNEQSEIIQIGVRVNPLTTDEQTNFEKGKPVSVNADRTLKRGARRNLDRYQDRRSNLIHALSKANIISSDTKLAEDGKQSTFETWQIRSKAVTERIEKNELARVFLTINKKRGYKSSRKAKNEDEGQAINGMEAAKRLYEENLTPGQLVYQLLNEGKKNIPDFYRSDLQAEFDTIWNFQKQFHAQILTDDFYKALQGKGQKASSALFWTTYQFNIAEYKSKSRDEKKLIAYKWRSSAVSTQLTKEEVAFVITDINNNLKNSSGYLGAISDRSKELFFNKLTVGQYLYIQLQKNPHTRLKNQVFYRQDYMDEFEAIWKEQSKYHPELTQELKTEIRDITIFYQRKLKSQKGLISFCELESKEIKLEKNAEKVKKTIGLRVAPKSSPLFQEFKIWQRLNDVLIRKKGSKKRTTKNENGKMELFDVEKEIFVLDKETKEKLFKELNVKGNLSASKIIEYLGHKPSEWELNFNELEGNRTNQALYNAYLKILELEGYNEDLLKLSEKDDINVAELKTSAKDIEKMVQQIFEVLGINTRILNFDAELDGKEFEQQASYQLWHLLYSYEGDDSASGNEKLYELLKTKFGFKKEHAVILANVAFSDDYGNLSSRAMRRIYSYLKENKYSTAAELAGYKHSAASLTKEEIENRKLETHLELLKKNSLRNPVVEKILNQMVNLVNALIEKNSEKDEDGKIINHFKFDEIRIELSRELKKNAKERAEMTTNINASKIAHEKIFKLLTTEFGVKNPTRTDIIRYKLYEELKNNGYKDLYTNTYIPREILFSKQIDIDHIIPQAKLFDDSFSNKTIVFRKDNLEKGNRTAFDFIQSKYGEPGIEDYLKRIEHLFELGKKSKDDTSAGISKAKYQKLLKKETEIGDGFIERDLRDSQYIAKKAKNMLFSICRTVVATTGSITDRLREDWDLVNIMQELNFDKFKKLGLTEMVEKKDGTFKERIKDWSKRNDHRHHAMDALTVAFTKHSHIQYLNHLNARKNEADKWHPVISGIEHKETEMVLDDEGNAKRKFKKPLPNFRQLAKEHLEKVLVSHKAKNKVVTKNKNKTKSKTGEKVKIELTPRGQLHKETVYGKYQYYESKLEKVSAKFDETTIGLVANPSFKKLLLQRLQENGNDPKKAFTGKNAISKNPIYLDNSKTSQLPEAVKLIWLVNDFSTRKDVTPENFKDEKTIDKILDKKVKEILLNRLKQFGDPKKAFSDLDKNPIWLNQEKGIAIKRVTISGVKNAEFLHYKKDHFGKAIIDKNGKPIPVDFVSTGNNHHVAIYRDEKGNLQEKVVSLFEAVQLVNAGEPVIDKTYNQGIGWQFLFTMKQNEYFVFPNEQSGFNPNETDLLNPANKKLISPNLFRVQKLASLQYWFRHHLETTVDVKPELKNIAYYPQLGLNGIKEIVKVRLNHLGDIVKVGEY

SEQ ID NO: 8033 - protein, 914 aa, unidentified
  REGION 1..914: note = Description of Unknown: Cas Enzyme sequence
ENGEKTYSYKLNYPDDKNFSGNETKALFRKVFKKHNFAEEGEKYLSDKTLFNHLWHVVYSLPEEKNIISALQNKKYFDFPVAVITHISKLPEFKSQYASLSSKAINKLLPLMRIGKYWGKSFNEETLVRINKIIDGEFDENISDKTREEVQKRNLVYIDDFKGLPTYIAAYIVYARHSERANEAKYETIDELKIKELIPYNSLRNPVVEKVIRETLSLVKDIWKDEKLGRPDFIHVELGREMKNNNEDRKKIAETNSKNRIEKERVAALIKELKYPQFNENSLNDLEKFRLWKESGGKEGDAKFEELFKSNRSEFVKDADIAKYRHWAEQNYRSPYSGKAIPLSELFTKKYQVDHIIPRSKFYDDSASNKVVVESKLNDLKGNKLAIQFIEDAQGRDIGVQTLDEYIKFVDEVFTNKKKKRHLKLYEVPEDFVERQMNDTKYISRTVAQFLRPIAIGNETDEGIVYTSGTITSDLKGKWGLHKLWKEILKPRFERLEGILGEQLIFPNESHEGDYRFGKDYKRIDHRHHALDALVVACTSRSHIKYLNSLSSLSNNKNDIAKYGEWAKWRYLLNKKKQLENKEVGMTEFGTPWDSFYADTKDALNSLIVSHKPTSKLISKAINKYYKWEEIEPGKWEKKIHYQEKPKDDDKYWVAIRQSLFGQPYGKIHIAEYKKNVDLKAAIKEQIQFLNREKYSWNTEDWRIAKSSIRKKVDSLIGRFDGHTKKLLKHLDTNPLMDEAGNKIEKLDLLQFKQYASKRVVIDESFTKDKIKNMPFAQLEKNWLTKLLKEHLAEYGDDPKLAFKGEALEMLYRKAPFPINKVTRKENGEKIEKNNKLLDGDKGVNQYFIIEIRKETDKKTGEDKLVRKYNTPNFLDCIERLAKGLPIHDESPGSTYIVLSPGDLVYVPLEGENI

SEQ ID NO: 8034 - protein, 1337 aa, unidentified
  REGION 1..1337: note = Description of Unknown: Cas Enzyme sequence
MKQSYSIGLDIGTGSVGWVVINEDFSLRRHKHQNMWGANLFNEAQKAELRRSFRSSRRRLARRKRRITLLQQIFNNEICNVDPNFYLCLTESMLYIDDKSSSLDLDANILFSDHTFTDKTYREKYPTIYHLRSKLFHNPEKQDIRLIYLALHHIIKYRGNFLIEGGVDGVISSFDSQNLQKFMEFIGAGDKEAKQIKSILLNQSQTRSARKSSIIQLLQPSADNKSIISEAVGAAIGLKWDAGKLFDDKSLEIKGEFSDKNYEDQRDDIVAAIGDDRYELIETLESVYQWTIFSQFIRKDSCLSDIMVEKYNAYRQDLSDLKGLFRDFLSKKEYKSFFHGDASKFDLYNKHKIDTDDLYKSIKKHLGESAKDDVRYQRFEKRAELGEFLSRQRIRDNGAIPHQIHQYELEKIIDNQAAHYPFLAQNRDKIISIFTFKLPYYIGPLKTGGDFAWSIKKKDGVIYPWNFNEIIDDEASAEKFIERMRNKCTYLPDKDVLPKNSLLYQEYECRNELKNVTVNGKRLSLDVQNRIIDELFTKEYSVNYKKLAKYLYDNQIYNTSSLVISGTADDKSFMSSRKSYIDFTNKIGIEITPENKAAIEEVIKWITLFEDKKILAKKLQKYSDIFSKDQIDSILKLKYTGWGRLSSELLDGIAAHTRYGKMTVIEVMRQCSDNFMQIIQSDRYEFKKIIEDALLKDTTSEITYDDIKNLAASPGIKRALWRSIRIIDEIVDTIGYSPKLISIEMARSEEDKVRTKNRYSQLEKMYKELYGREYNKSDIKPQLENYKDCLDEKKYYLYFLQNGKSAYSGKKLDIENGLKDCEIDHILPRSLTKDDSLDNTVLVLREENQLKLDDYPISPDVQKKMLPIWMSLKNVKFMSQLKFQRLTSQKQLSDDQIYGFINRQLVETRQITKHLARMLTEKYKNSSTEVFTIRAGMSSEYRRIHDLPKCREVNDLHHAKDAYLAATLAQYVKVRYPKLDKEFIYGEYKKFKSDKKKNNREYGSFILSSMKYDFTNTNTGEIVWQGKSSCEIIDKTMKYNDCLITKKTEIGDSQFYKQTIYSKKSTDPKPTIPIKANLPTNRYGGYSGVQAAYFAAINYLKPSGKKESPVTEIISIPTQIYTLEKTHPGSIDKYIQDNYKDAVVLLPKVPINQKIEYDGNEQFIVGSSEVTNAKQLKLPYDIEYAIAIALKHGVPRVTISEEQADEDDKLRDKRNRQIEKRAKVIDGINRFWKVYSDKLANQYQQFGKAGDNARNAAPEYDKLSIDDKIKAIKLALRATRAGSERADMQTNFPELKLPNGFGRMQKSLNPAKLTFVYESITGLHRRKLDGKSLGHKR

SEQ ID NO: 8035 - protein, 1132 aa, unidentified
  REGION 1..1132: note = Description of Unknown: Cas Enzyme sequence
MIDSSENVPGIRYRVGIDVGLKSIGFCAVEVDRNDQPVRLLNSMVFIHDAGVDPNENKAAKSRKLTAGVARRTRRLYRTRHQRLVNLDRVLSSEFGWPLPDFSSFKYPTEPWHVRARLLDGYIADEDERKEALSIALRHIARHRGWRNPYAKVETLLQPSEPSDFLKGLNERISTALKRTFPADATPGQLVDAYLAHPDYVKAPGTPKLRGPEGILAGKLHQSDNAEEIRRICDAQKIAPSERDRLIRAVFEAKSPKGSAKERGLVGYDELPGQGKHVRAEKAHPAFQKFRIVSVLANLRIREGREERPLTPDELAGLVDFIDQVSLKQEVTWQDLADNLGIERSDLRGTAKASFDGGPVLRNPPTDVTTEKIMACKVKWLKEWWKNADDEQRGYFVDAFSNSGGSEDGTDVNDEVAELLEQATEEDQLEFEKIALPQGRAAYSLDSLRRLTHRMLSEGVDLHTARRLEFKVGDDWKPAVEPIGAPTGNPAVDRVLKQVSRWLHAATERWGEPTVINIEHARDGLGSEKVARELMRDNEKRRKANAAAVADMAQQLGLSGKVRRSDQIRYFALQRQNCQCLYCGAPITYTTAEMDHIVPRADGSSTNDRSNLAAVCRTCNHKKGKIPFAAWASSGKANEGVSLTGALERVAMWERDNGMSPKQFKQLQREVKARLKSRKPDEEFDGRSMESVAWMAVELRTRIEGFYRSRNEEFVPSVGVYRGQLTAEARKASGFENRVNLIGGRGKTRFDRRHHAMDALVIALMNPSVSRTLALRLNMRDAQRLTGIEETWKNFYGKPGEASQRFESWRESMLSGVELFNIALSENAIPFVENIRLRVGSSVIHDATVHSFCPPKTPEGQQIMTKGYGEQHTLGSALPVELIDRAETPALWTALTRCPDFDPKKGLPENHARIISVNGTRVGPSDLLNFFEFSNEGIKACLKVRGGYVELGSSIHHARIYRIDGKKTAYAMVRVFQVDLMRMKHQDVFTTPLKPSSISMRTAEPKIRKALADGTATQIGWLVRGDELAVETGAYSEGKIAQVMEQYPELKHWKVAGFPEPKKIKMRPYLLSKEGLDDDEQGPIRTVLDIKGWITTVHKLFGAGGVRVIRRNCLGEERNCSSASLPVSMLLE

SEQ ID NO: 8036 - protein, 1346 aa, unidentified
  REGION 1..1346: note = Description of Unknown: Cas Enzyme sequence
KKHLRRKKMDQEYFLGLDMGTGSPGWAVTDSEYQILRRHGKALWGVRLFESALTAEERRTFRTARRRLDRRNWRVQILQELFAEEISKVDPGFFLRMKESKYYPEDKRDITGNCPELPYALFVDKDYTDKDYHREFPTIYHLRKKLMETQETPDIRLVYLAFHHTMKHRGHFLLSGDISKIKEFKGTFLQLTKNLKDEELNWTLELSDEDIQFIEQILKDKTLTKSTKRSRLIKELKAKTGCEKAVCNLISGGTVKLSDIFENDALDECEKPKISFSDNGYDEYIGVIEADLGEQYYIIESAKAVYDWSVLVEILGDSSSISEAKVKTYEKHKADLQYLKKVVREYLSPEEYKRIFVDTEEKLNNYSAYIGMTKKNGKKVDLQGKQCNKDEFYDFLKKNVVKKITDKDVVTYLEKELDQGTFLPKQVNKDNGVIPYQVHLYELKKILSNLEDKIPFIKGNAEKIIQLFEFRIPYYVGPLGKNEEGTAGKFSWAVRKSDEKIYPWNFNDVIDVEESAEKFIRRMTNKCTYLVGEDVLPKDSLLYSKYMVLNELNNLRLNGEKISVELKQQLYTEVFCRYRKVTMKKLKNYLIHEGVTDKKVEITGVDGDFKAQLTAYHDFKEKLTDISLSQKGKEEIILNVVLFGDDKKLLKQRIKKLHPELSEKQIKSICTLSYKGWGRLSKTFLEEITAPAPETGEVWNLITALWETNDNLMQLLSQKYLFMKGVEEYNSTQKDTELSYKTVEALYVSPAVKRQIWQTLKVVKELQKVMGQAPKRVFVEMAREKQESKRTESRKKQLIDLYKKCKDEEKDWIAELNKQEDHQLRSDKLYLYYTQKGRCMYSGEAINIEDLWDNTKYDIDHIYPQSKTMDDSLNNRVLVKKEYNATKSDTYPIKESIRKDRKVFWKSLLDEGFISKEKYERLIRNTELSADELARFIDRQLVETRQSTKAVAEILRQVFPNTEIVYVKARNVSRFRQDFDLIKVREMNDYHHAKDAYLNIVVGNSYYTKFTKNAAWFVKENPGRSYNLKKMFVDKDIVRNGEIAWRAGNSGTIVTVKNVMRKNNILVTRKAYEVKGGLFDQQLMKKGKGQIPVKGKDERLTVAKYGGYNKATGAYFMLVKSKDKKGNEIRTLEFVPLYLKNQIEKDDYAAIEYLKNERKLMKPEVLLKKIKTDTLFSVDGFKMWLSGRTGGQLIFKGANQLLLSEENAATLKKIGKYVQRRKENKDTTLNIYDGIEEGALEKLYDTFLEKLEKTVYRIRLSAQAKTLTDKKEKFMQLSKEEKCMILSEILHLFQCQSGAANLKAIGGPGSAGILVMNNNITKCKQISIINQSPTGIYEEEIDLLKL

SEQ ID NO: 8037 - protein, 957 aa, unidentified
  REGION 1..957: note = Description of Unknown: Cas Enzyme sequence
RFLPKQITGANGIIPNQVHRKELKKILENAEHHLDFLKEKDESGYTVSERILMLFSSNIPYYVGPVGSGSKTGWAKIQESGQVLPWNMEQKIDMEQTSERFITNLIRECTYLSGEKVLPKQSLLYESYCVLNEINNLRIHGKRIVPELKQDIYREVFQGARLGKKVTKKNICTYLINRGLITEESEVSGIDKEINAYLPSYGKMYGVFGERLREEAVQEIAEKIIYYGTIYGDAKAMFRKKLNQYVSDGWMTESQAKRVSGYKFKDWARLSRSMLCLSGCDKSTGEKISLIRAMWEHNLNFMELIYSEDFTFQKELEERRKALGKTLQEFQFEDLDEYYYSAPVKRMIWQAVQALKEITQIMGHNPKRIFIEMTRTEEEKGEQGRKNSREKRLLKLYESIRDERNWAAEIKNANASGKLNSKKMYLYYLQMGRDVYTGEPIDIDDLFYDSRYDIDHIYPRSLTNDNNIENNLVLVSKTINQNEKKNDYPVPEKVRTNKKVRDLWHTLHKMGFMNDEKYNRLTSTEHLTDDQLAGFIARQLVETAQGAKGIAELMKAMLTGTDIVYAKARNVSDFRKEYKMLKSRLVNDYHHAQDAYLNIVVGNVYFTKFTRNPVNFVKKEARRDGRNYDYNLYKMYSKDIIRNGEIAWIATSEQGPGTIRLVKETMGRNTPVITRQAFEQQGELFNLQPVGKYSAKKDNYVPLKINDEKVQDVSKYGGYTSLNPSYFIFIEHGPEKKRKKCFEVIQSYYSARIKTEKDLIDFLVQKGYKNPKVINAGIKKNALIKYNGYFLYIIGMDARKNIEFSNATAMCLKNNYIQYVCKLEKMNKAILLSEKQKTNLHWDERITCESNLELYRELTEKHLHSIYQKHPKSIGNCLAEGEGAFKLLDIEQQVKILCDIVQYTSFQRGVFSLKVLGGPKEVGRIRISGNVTEAKECKLINYSITGMYKTEMDLLKK

SEQ ID NO: 8038 - protein, 1228 aa, unidentified
  REGION 1..1228: note = Description of Unknown: Cas Enzyme sequence
MKRILGLDLGSNSIGWALVQQNFENKQGQIMAAGSRIIPMDQSILGDFEKGNTVSQTAERTAYRSTRRLRERHLLRRERLHRVLHILVFLPPHYDSQIDFSKRYGKFIDDAEPKIAYNKGNFIFMDSFNEMIEDFRKHQPQLFYKKSNGEESKIPYDWTIYYLRKKALSQKITQQELAWLILHFNQKRGYYQLRGEEETEKPNKEVAFHSLKVVKVEAETPNKKGETWYTIHLENGWIYRRTSKISLEDWKGKTHDFIVTTDLNDDGTIKVDKEGKEKRSFRAPDENDWNLLKKKTEHDIDFSGKTVGAYIYDHLLQNPNQKIKGKLVRTIERKYYKDELKAILAKQIALQPEFFTENLLADCIRELYRKNQTQQQTLLSKDFLHLFVEDIIFYQRPLRSQKSTIANCALEKRSYIDKETNERKDVPIKVCAKSNPYYQEFRVLQWLQNLRIYEIETDREVTAEFIETAQNYEALFNFLMSQKEIDNEGLLKYFLLAKNPQIKDKVAKSELRKWITTYRWNYVYDAADNSSKKYPMNETGYELQRYLQKVEGLPANFLTFDITYQLWHLLYSVKDKVEFEKALKKFANKNQLDETSFVESFKNFKPYPNEYGSFSEKAIKKLLPLMRFGNHWDFSCIDVSTQKRIDDLINGVANDEIRTIIREKAEKFQLNNEISFQGLPLWLAQYVVYNRHAEATNIEKWTSVSDLEAYLEDFKQHSLRNPIVEQVVTETLRVVKDIWQQYGEGQANFFDEIHIELGRELKNTAEERYRASKQNQENENTNLRIKKLLAELKEDASIQNVRPYSLVQHDLLKIYEEGVFSSTDEIDEDIQKIRKKAEPNKTELQCYKLWLEQKYRSPYTGEVISLTKLFTEEYEIEHIIPQSRYYDDSLSNKVICESAVNKLKTNQLGLEFIQNHHGEKVRIAGNKEVTIFTEEQYKEFVKKHYAGNSAKQQKLFLNEIPEKMVARQMNDTRYISKYISEILSKIVRSDEKDEGVNSKNVIPCTGKITTALKQDWGFNDIWNELILPRFERMNQLTQTQLFTSYNDRLQKNLPTVPIEYSQGFQKKRIDHRHHAMDALVIACATKEHINYMNNQHALDKSKDKKEKQQSRIDLRTILCEKKNNNWQFKKPWGTFTQEAKEVLEHIVVSFKQNLRVINKATNYYEKWEEKNGVLVKKKVKQEGTNWAIRKPLHKETVSGKIILDRKIGKDKILTATRKAVDITFTEKI

SEQ ID NO: 8039 - protein, 1354 aa, unidentified
  REGION 1..1354: note = Description of Unknown: Cas Enzyme sequence
MRRSLQRYKLRRNALLDLLREQGWITEKTILAEQGNFTTFQTLGLRAKAATEEISLEEFARVLLSINRKRGYRSSRKVQGDEDGKLIDGMDIAREMYETGRTPGEYVFSQLSSDINYRIPDFYRSDLQNEFDRIWTAQKAFYPDILTDELKEGLRNRNEKQTWAICQEPFALEGIKRVAKGKEQVKENYGWRTRALSERLDLESLAVVLQKVNSQIKNSSGYLGDISDRSKELYFNGQTVGQYQMAQLEKNPNYSLKNQVFYRQDYMDEFETVWECQAKSHPELTPSLKHQLRDIIIFYQRPLKSQKGLVSVCELEGRQVEIEADGKKKTRTIGPKVCPKSSPLFQEFKIWQILNNVTVDRRYLTQEEKEKLYDRLCTCDKLSKSEILKYISPEPEPVRQPDSLFSDDEMYDSDAIVRNVGNKKEIKLNYKELEGNRTMAALLKSYAKIIMLTGHDEYDFSKMPFSESVGIISDIFIALGCRTDFLYFDSSLEGRAFEEQASYRLWHLLYSYEGDKSVSGNEKLIDKISEITGFEPEYAKILANVTFAPDYGSLSAKAMKKILPYMKEGNTYSLACEYAGYRHSRRSLTKEELENKEYKDRLEPLPKNSLRNPVVEKILNQMVNVVNGVIDEYGKPDEIRIELARELKKSAKEREEMTAAISASSAENSKIRNELINEFGMENPSHNDVVRYKLYQELSENGYKTLYTNTYIPLEKLFSKEFDIEHIIPQARRFDDSFANKTLEARQANIEKGSSTAFDYVKGKYGEAGAEDYRSRVDVLLEKGKISRTKWRNLLMTEPEIPDGFIDRDLRDSQYIAKKAREILESIVRDVVPTTGSVTDRLREDWQLVDVMKELNWKKYDRLGMTEAYQDKDGRTIRKIKDWTKRNDHRHHAMDALTIAFTKRAYIQYLNNLNARIGKSADEAPLIDLSDYALKDIPKSEMTRVVRAIERICLYRDNKGKLRFCPPVPLDEFRAEAKRQLENILVSIKAKNKVVTRNLNRTKKKGGLNTKVQLTPRGQLHNETVYGSIRQYVTKEEKVGAAFTQEKIATVANAAYREILLARLAEFGNDPKMAFTGKNSLEKNPLYVDELHTTSVPIKVRTVSMETVYTIRKAVAPDLNVDKVIDAKVKELLQKRLEEYGNDPKKAFANLDDNPIWLNKEKGISIKRVAIRGVNNAEPLHEKRDHNGSLIMDCNGDRIPVDYVNTGNNHHVAIYMDSDGNLQEQVVSFYEAVARVSLGIPVIDREYRKDEGWEFMFTMKQNEYFVFPNPETGFDPNEIELMNPENYSLISPNLFRVQKFTKGDYFFRHHLETNVEDKSVLKNIVWKRLSTKALNGIVKVRINHIGQIVNVGEY

SEQ ID NO: 8040 - protein, 1010 aa, unidentified
  REGION 1..1010: note = Description of Unknown: Cas Enzyme sequence
ARKTTDILMKVDVPSEFPLKPYHANVGAMENKGVEIALNYKTNFGDWTLGVGGNFTYNKNKILNLGANEYMDNGAIRNAVGHSYDTYYIYKADGLFQSKEEAEGALRKLNDNEDFVNAFLKIKPFKKEYGAYSEKAIKKLLAVMRIGTQWNEDDICEQTRNRIQSIINGDIDEKIKERMGRTFSQLSDFQGLPEWLACYVVYGRHSETTDIQRWTKPENLMAYINGFKQHSLRNPIVEQCILETLRTVHDIWKEAGHINEIHIELGRSMKSTADQRARMSKSILQNENTNLRIKSLLMELKNAKEFENVRPYSPMQQEILRIYEEGALQELTKEDDQYPEISKISQMAQPSAKELLKYRLWLDQKYCSPYTGKPISLSKLFTSAYQIEHIIPQSRYFDDSFSNKVICEAEVNQLKSNMLGYEFIKKHSGEIVHCTMVGDVKILDAKEYYNFVTEHYANNRRKKEKLLLEDIPQEFLNRQMNDSRYISKKVMALLSNIVREEGEQEAKSKFVIACSGGITDRLKHDWGLIDVWNSIVYPRFERLNKLTNTENFGRWENKEGKQVFQTSLPLELQRGFSKKRIDHRHHAMDALVIACASNNIINYLNNESAKSQEKREDLRKKLCDKNRIIRKPWETFTQDVRTALEDVVVSFKNYVRVINKATNYYEKYDKNGKKGIAEQKGQDMWAIRKPMHKETVFGQVNLRRKVTVKLKDALEKIPAIYDKELRDYINILVAKQFNKKQILAHFKSINYRLNMKSVDKVDVWQFSNEKEPMVATRKPIDTSFDDKRIATITDTGIQKILRNYLETKDNDPNIAFTPEGIAEMNKHITEYNNGKQHQPILKVRVSEPKGAKYQVGETGNKTSKFVEAQKGTNLYFAIYEDKEGNRSYNTIPLNEVIERLKQGLSPVEDLNKQGEKLKFYLSPNDLVYVPTEEEKLSSECKLNKEQIYKMVSATSNQCFFTPHRTANSIVNKVEYSPLNKMEKTILGEMIKSVCWKLEVDRLGNILKVIK

SEQ ID NO: 8041 - protein, 1445 aa, unidentified
  REGION 1..1445: note = Description of Unknown: Cas Enzyme sequence
MKKILGLDLGTTSIGWAYVIEDDNYEKSEIKQIGVRVNPLTVDEQTNFEKGRPFSVNAERTLKRGARRNLDRYKDRRENLNKILKKHNILNESTILTEDGKNTTHSTWAIRSKATTERIELDEFARVLLAINKKRGYKSNRKAKDDDEGQAIDGMAIAKKLYEENLTPGQYVFQLLKEGKKAVPDFYRSDLQAEFDRVWQKQKQYYPDVFTDTFYEEVKGKGQRATAAIFWNRYGFNTADIKDLEDSLKTEKTIKLNLTERKRLQAYKWRNDAINLQLAKEEAAYVIAEINKNLSSSSGYLGSISDRSKELYFNKQTVGQYLYKQLQENRHTRLKNQVFYRQDYLDEFEKIWETQAKYHTVLTPELKSEIRDTIIFYQRRLKSQKELISFCEFESKVIEVEKDGKKTTKTIGARVAPRSSPLFQEFKIWQILNNMVVKKKGSKKRKPVGDVKQTTLFEQEKEIFSLNLEEKQLLFDELNIKGTLKDDAILEMLGCNTKEWEMNYKSIDGNRTNRALYDAYLKIIELSGHDVRDYLRVKTSKDEIELDDLKVPASQIKEMVVAVFETLGIDTSILDFNAELEGKAFEQQPFYQLWHLLYSYEGDNSKSGNERLYKLLEEKFGFSEEYGRILANVPLLDDYGNLSTKAIRRILPYIKEHQYDEACSLAGYRHSKHSFTKDELENRILKRRLELLKKNSLRQPVVEKVLNQMVNVVNTLIDIENKKLKAKGKPEDFHFDEIRIELARELKNSAEKRKQITEGINKAKGQHEQIAKLLQNEFGIKNPTRNDIIRYKLYEELKDNGYKDLYTNTYIPREKLYSKEIDIEHIIPQSRLFDDSFSNKTVVYRDENLKKGNRTAYDYILEDYGEGKLDEFVVRIEKLFQLGQKSKEGGLSKAKYRKLLKSESEIEDGLIERDLRETQYIAKKAKEMLFTITRRVVTTTGQVTDKLREDWGLINVMKELNLPKYRALGLTEMEERKYGQQVEVIKDWTKRNDHRHHAMDALTVAFTKHSHIQYLNYLNARNNPTHKLHGNIIAIEKKELEEHVNKNGTKTRLFKEPMPNFRLEAKKHLENVIISHKSKNKVVTKNKNRISGKSQPQITLTPRGQLHKETVYGLYHYYETKMEKVGTKFDLETIAKVANPVYRNALLQRLAEYNNDPKKAFGGANSPSKKPIYTDETQTKKVPEQVKLSCSATDYSVRKDVTPENFKEDKDIDKVLDKGIVKLLRERLQEFGGDAKKAFSDLDLNPIWQNKEKGIAIKRVTISGVKNAEPLHYKKDHHGKLILDKHGNPIPVDFVSTGNNHHVAIYRDEQGALQEKVVSFFEAVTRVNQGLPIIDKGYNSYLGWKFLFTMKQNELFVFPNKKTGFDPSEIDLLDPANKALISPNLFRVQKIATKDYFFRHHLETSVDNLSGTKNFFWKREGLKGIDGIVKVRTNHLGDIVGVGEY

SEQ ID NO: 8042 - protein, 1169 aa, unidentified
  REGION 1..1169: note = Description of Unknown: Cas Enzyme sequence
MKKLCQQGKQIFMQPKCNPYLHLAFDVGHSSIGWAVLQTAPAKEPKVDCSVELLGCGTVTFQTEDCLASVRRNYRRQRRHIRSTRQRVARMKLLFAHLAVLTKEQLDLPGRASPWLLAARVLRGGQKLAWDELWDVLRWYAHNRGYDGNKAWSKHDAASNEDSDKERRASELLIQFERKYGRPGTMAEVFCDVLKIDPLGAVQSSVQRVRNLGAAFPREGVEDEVERILRAHIGVLNTLDDRVVSALMRDYTALRCPGLRLPGRYGQRLHDGSLSPGGLLFGQLVPRFNNRIIARCPITFERVYESVKAETGDEDKAKHEAEKLSKVPSVNCIDFRRFRWAMQLANVQIATVDARKVRLLTVAERCAVNEEMEKHGFLSPGDFKKAVRALTNKAPDNLDRMLALPDADRALVVHPVRRYVHTHALVSVLWPLLTERLRKRLAGQWRRGNTTTIAELINACAEERPSVEALCDKYLDSLNTKRRKKGETMHRGEFMRMPLWVQPSQGRAPHTREVMRKVNEFVFATDRHPADETGPLFRSESVRQAQLQRALDEQTNNHLVRQRLKLLERLHSDLLKTYARDDRSCIARVTIEVNRDVSELSGKTAPQQAQLQRQQLAQFKGVAKKLAEAYEGLGVHVGPGLIRKGRIAEDLDWTCPYTGKSYDALDLLYRRVDKDHIIPRSSRASDSLDSLVITFSEVNKMKGQRTAVRFLEEFQTQPVQGLAQVMLKPLSIYLKDVDALETFKGHDDDQRRKKNRKRLLSLRDYIEKEFVPRDLTQTSQLVRLGAQALQKHYIGAHQLPVITSLPGSVTGAVRKSWNLLGCLATANPLVLNPDDRDENGRAKVRTKTEIRGVTHLHHALDACVLAFASFFLPRDGGAWELLVKRRLNMEEQCRARRLFGSYIEITKDGELRLADLSPVLKTQICERLKERRVVQHLPSDVSGLLCKETVWRIFDSADPHPNSRRLARWLAQKKVPVPASDAKTALIICRKRRNTEVGGGEVAGGKVFRETKTWRWIYDIKDKSALLGLSPQGDVATAKLRRIKAVKVLGDNFGLALDPKPILIRPHMIWHQLDELRRANEGKPIRVVRKGTLIRVTRAKSVKVDYRGVWMVRGTTLNQRAGFLVDLSPVDQITYRRQPGCRENVSVATLLNCGLEVLKVPLCGVTSII

SEQ ID NO: 8043 - protein, 1051 aa, unidentified
  REGION 1..1051: note = Description of Unknown: Cas Enzyme sequence
MLAANLRDARTNMKKLLFSYDIGHASIGWAVLDTTANQTPTIKGTGAVLFPTDDCLASTRRQLRRQRRHIRSTRMRIARMKKLLAHLGVLTASQLDEPGGPWPWKLAARVHAGGSLLSWREMWDVLRWYAHNRGYDGNRKWSRDEDEDSDDTEKVKNARFLIDKFGRATMCETICAKLKIDPRSDDKKTSPIAYKTSNAAFPRDVVRDEVISLLEKHIGKLPQVTPALITALCAEDNTPANGKSVREVLSDLGLDAKLPGRYIGGLLFGQAVPRFDNRIIGECPVSGEKRPLKDSREYLEFRWAEILANITVRRSKDGDKQSLTSEERAKLTAIARSEGGFTAGEFKKAVLEVSGAVASNADLMMTHPDAAEALVLDPALRFTKTNGMLKAIWVHPDKTKDEDTAALKSLKALLRRIRGRWNKERKVTWEWILAQPEALDAGLEHTLREAWNKTKQKPRKGQTEEKWEDRVKQRVAPTFPSGRAPYGREVMKRVVAQVMEAKMHPRENGGVLDAEIIKKHDLGKEIDELTNNHLVRHRLKILLRLVDDMVKTYADGDPTQVDKCVIEVARDLVEFSGKTNKEVAQELGIKLKNFKDVSKRLTTDLEGTSIPINAGLIRKARIADDLDWKCPYTGHEFDAVTLARGKVDKDHIIPRSLRPSDSLDSLVVTFAEVNKWKANRTARQFIEDEKGKPVPGKPELTIFTLKQYEAFVNKLAGEKKPNRFTPGQGSLDDKLRQWSRKQKMLLKDYEEKEFTPRDLTVTSHLVRLSARQLEKRFVHLQNTDRIVSLPGSVTGVVRKAWDCLGCLAPACPEVMTMLPTVNEKREYVMDADGKPSLSLQVRPKGEIRDITHLHHALDACVIALVSHFMPKDGKLWEQIVTKKVLKQDEEAFRDRYGWHGLLKLAEPKDERDKGRARKLEVLDLPETFKKQIVEALKERRVVQHVPADMSGARLEMNTWRVVKTEGDQVHLRQRTFGPTDIDPETGARKRKWKQDEMRKERVVGLKKGKLSALNGALIISENYGVALDPEPTPIPFHKVRERLTEVIQRNA

SEQ ID NO: 8044 - protein, 1373 aa, unidentified
  REGION 1..1373: note = Description of Unknown: Cas Enzyme sequence
MKKQQFSDYYLGFDIGTNSVGWCVTDLNYNVLRFNKKDMWGSRLFDEAKTAAERRVQRNSRRRLKRRKWRLNLLEEIFSDEILKIDSNFFRRLKESSLWLEDKSSKEKFTLFNDDNYKDYDFYKQYPTIFHLRNELIKNPEKKDIRLVYLALHSIFKSRGHFLFEGQNLKDIKNFETLYNNLMAFLEDNDIYKNIDSSYIGNLENIICDSKKGLKDKEKEFKEIFNSDKQLVAFFKLSVGSSVSLNDLFDTDEYKKGEVEKEKISFREQIYEDDKPIYYSILGEKIEFLDIAKSFYDFMVLNNILADSQYISEAKVKLYDEHKRDLKNLKYIIRKYNKENYDKLFKDKNESNYSAYIGLNKEKGKKEVIEKSRLKIDDFAKIIKGYLPKAEKIDEKDRSIFNEILDKIELKTILPKQRISDNGTLPYQIHEAELEKILENQAKYYDFLNHEENGVSTKDKLLMTFKFRIPYYVGPLNSYHKNKGGNSWIVRKEEGKILPWNFEQKVDIEKSAEEFIKRMTNKCTYLNGEDVIPKDSFLYSEYIILNELNKVQVNDEFLNKEIKKKIIEDLFKKSKKISEKNFREYLLVNQIANKTVELKGVKDAFNSNYVSYIKFKDIFGDKLNLDIYKEISEKSILWKCLYGDDKKIFEKKIKSEYGGILTKDEIKKINSFKFNTWGRLSEKLLTGIEFIDLETGECYSSVMDALRRTNYNLMELLSSKFTLQENIDNENKEVSEFSYRDLVEESYVSPSLKRAILQTLKIYEEIRKITGRIPKKVFIEMARGGDETMKNKKIPARQEQLKKLYDNCGKDLSNFSIDIKEMKNSLNSYDNNSLRQKKLYLYYLQFGKCMYTGKEIDLNRLLQNNDTYDIDHIYPRSKVIKDDSFDNLVLVLKNENAEKSNEYPLKKEIQEKMKSFWKFLKEKNFISDEKYKRLTGKDEFELRGFMARQLVNVRQTTKEVGKILQKIEPEIKIVYSKAEIASSFREMFDFIKVRELNDTHHAKDAYLNIVAGNVYNTKFTEKPYRYLQEIKENYDVKKIYNYDIKNAWDKEKSLEIVKKNMEKNTVNITRFIKEEKGKLFDVNILKKGTSKEIVTIKPKLYNGELDNLSQKYGYYDSLKAAYFIYVEHEVKNKRVKTFERITRIDSNLVRDEKNLVEYLVDKKNLVNPKIIKKILKEQTLIINDYPYTFTGIDARKQVELKNKKQLYLETKYEKILKNALKFVEDNQGKSEENYKFIYLKKKDRNEKNETIESVKERYNIEFNGMYDKFLEKLDSKDYKNYINNKLYTNFLKSKEEFKKLNLWEKSLILREFLKIFNKDTYGRYEIKDSQTKEKLFSIPNETGRIRIGQSSLGNNKELVEESVTGLFVKKIKL

SEQ ID NO: 8045 - protein, 1083 aa, unidentified
  REGION 1..1083: note = Description of Unknown: Cas Enzyme sequence
MKKFEDYYLGLDLGTSSIGWAVTNEKYDILRFNKKFMWGTHLFDMGNTASERRIFRTSRRRLKRKKNRIELLQTLFSAEMSKKDFGFFQRLKESQYFIEDKTIKNKNTLFMDKNYTDQDYHMEYPTIYHLRKALIDNEESAFEIRKLYLAISHILSHRGHFLFEGELSDNLDFDDIFNEFVKYLNEELNIDFKIKSSASLQAIKEILTDKTLNRTKKKEKLSELLEEEKNKIYQEIWKLLVGNEAKMSTIFDDKEYEEAKIAFSKGNYDEKEEEYESILGEKILFVQKAKAIYDWMLLQNILKEDKYLSYSKVKLYDEHKKDLRILKEVLKKLDKKAYKEVFSENGLYENYVKKNGKEELYKKIKSYFNNENTDEIVKNILNKIELDSFLPKQKIKDNGVIPRQVHQKELETILKNDEKYFKWLIEKDETGLSVSEKIMKIFKFKIPYYVGPLNSKSPFAWIERKEYGKILPWNFENMVDMSKTAEEFIKRMTNKCTYLLGKDVIPKNSLLYTKYMVLNELNNLKIRGEKIQVDLKQKIYTELFQKNKKIGMRTLVEFLKSQNIVVTKTEITGIDGTFNTSLGSYIDMMKIFGEENIVKDSYKKMIEDIILWITLYGEEKKLIKSKIEEKYPEKVTPEEMKLILKLKYRDWSRLSKEFLTEIETMDEETGELISIIEMLWRKNENIMELLSYKYEYSDRIKEYNGIKEKNMTYKDIVEELQVSPSVKKMIWRALVIVKEIKKVTKKSPKKIFIEMARDTQTEKKRTEKRKDKLLKLYKNIENDDSVKELGKNLKDKTNDDLKSRKLYLYYLQLGRCMYSGEIIRLEDLMNDNLYDIDHIYPQSKIKDDSFDNTVLVKKEYNSKKGDGYLFEFDWQKKQMNFWNILKEKEFISSDKYERLTRTEEFSDDELAGFISRQLVETRQATKILANLLKVIFGSDTRVIYVKAGLTSDFRQKFGIYKFRELNDYHHAHDGYLNIITGNIYNTLFTDNPYNFIKDRKKINRAYNLNKVFERENDVWNPNTMIPKVERYIYKIRPLFTRASYERKGKFYNVQYVKKGKNLISKKNNLNTEKYGGYSGVENS

SEQ ID NO: 8046 - protein, 1342 aa, unidentified
  REGION 1..1342: note = Description of Unknown: Cas Enzyme sequence
MRKNYSIGLDIGTNSVGYSVIFDDNYKVPVKKVKVLGNTNKKSIRKNLMGSVLFDSGETAMARRMKRTNRRRIERRRNRIRYLQEIFAPFMMQVDENFFARLQDSFLWEEDKPHSKYPFFGNVEQEVAFHTNYKTIYHLRKELADGKEKADLRLVYLALAHIVKFRGHFLIEGNVEVENNDIQQLFDEFLASYSAYFEDSSVLEKKMEVREILTEKISKSAKKDKIVQTFAIDKKSPLIEFLKLIVGNSGEFKKIFDLDEKSTLQFSKESYEDDLTALLEQVGDEVADVFLAAKKVYDSVVLANILSIKDKNTKAPLSAAMIERYENHQEELAELKQFFKSTLERETYKEFFNDPKKDGYAGYIDGSTTQEAFYKQLKKLFEATEAPELFKEKLEREDFLRKQRTFDNGSIPHQIHQKEFEAIIERQGVFYPFLIENKEKLVQIFEFTIPYYVGPLAKNKQSPFAWATYHSDEPIRPWNFDEIVDTKAAAEEFIHRMTNYDIYLPDQKVLPKHSYLYELFAVYNELTKIQFVDDQRHASYFNAKAKKDIVDNVFKKERKVTVEKLMNYLKIAYADFRIEKIEGLSKETKAFNASLGTYHDFLKLKVDKDFLDNEANLPIIEDIILTLTIFEDRKMIRERLSQYKTYFDKKVMKRLERRHYTGWGRLSKKLIAGIRDNGKTILDYLKDDPAGNRNFMQLIRDDYLTFKKQIAEAQVVGEVDNLVEQVQSLAGSPAIKKGILQTMKIVDELIKIMGYKPTSIVIEMARENQTTAQGLKQSKTRFKKVSDGLKLLSSKLLEDHNITNKELLKEKLYLYCLQNGRDMYVDKSLDINSLSSYDVDHIIPRSFLPDDSIDNKVLVRSKENRGKSDDVPSLEVVKRMDAYWRVLLNAKLISESKYNRLTKARHGGLTDRDKEGFIHRQLVETRQITKHIARMLDERWNSTVDESGKKIYEVKIVTLKSSLVANFRKMFFLPKIRDLNHYHHAHDAYLNAIVGNLLIKKYPKLDPEFIYGQHLHLSRKSNEEEKATKKVYLYSNVLKFLQEDGEQKDSQGNVFWNKNQHIGMIKKVIFNNQVTVVKKTEIQSGGFTNETVEKKGTSDKLLPRKNGWDTNKYGGVGSPKIAYSVLFEYEKIKGMKQVKLKDIIGISIMNQKRFEDNPNVFLEELGYTNVQENSILILPKYTLFELEDGKRRRLASHQELQKANEFTISKDSTLLLYHAIHRDDEENKEHRKFLEQHRSEFKELFDFIIERSEKWIVKPTAVAKLKKIMEKNYEKASIDELSTAILSLLAFTQSGASVAFQFFGEQIDRQRYSTVTEILTGTLIYQSVTGFYETRIDLKLDK

SEQ ID NO: 8047 - protein, 1030 aa, unidentified
  REGION 1..1030: note = Description of Unknown: Cas Enzyme sequence
MNVKNQNYILALDLGVASVGWGLVSLDEQEKPSSIIDLGVRLFDKSEDPKTGESLNSARRAYRLQRNAYKSKKMLVKQVKALLVKHNLLQDTILSANTLSHKTWELRVKALDNKLSNKEFASILIHIAKNRGFQSKTTNDDKKAGLVLSSISNNQQLLNAYRSVAELAVKYFQLNDSHIRNKAGNYTHSFARQDIVNEIKLIFKNQRQFGNPNATVELEKAYIELINYQKPSLTGESLLKMVGKCTFEKEQYRVPKASYSAERFILLSSLTGLKILENGEQRPLTQSERELLTQKAYELNKITYAQIRKWLGLSDSAIFNFLRYQKLDTESAETKVFVELKHYHQLQKAFENARLEKEWAVISNNGQLLDSITYVLTICKEESEIRQKLAKLNELNDKVIDVLANIRFTQFINLSLVCLNKINPLMENGKTYLEATSEIYGAYNRKTGSKLNQLLPVIPVSDISNPVVLRTVTQSRKVINAVIRKYGQPAYIHIESGRDLGKSYQERQEITRQQAKNAKENEKLKERLVKEFNVRATNSNVLKLKLYEQQKGKCLYSGKTIEHNKLFANGYVEIDHALPYSRTYDDSANNKVLVLASENQTKRNRTPFEWLNGADNSAQWQNFKSLVEASDFAYQKKQKLLTKQLTDNEFKARNLSDTRYINAYLSKFIEDNLLLVGKGKQKVFTPNGRITSFLRYNWGLTKNRQENARHHALDAIVIACANEYMQKEITQFAQKRECNELAINEYIDIKTGEIKQLTFPEPWVGFSKELTARVYSDNPKAELADMENIDLNSVKPLFISRMPTRGASGQGHKETIKSVKNAGENRSVKRVDLKSLNLDMLERFVAKDTEKALYKSLKKRLEENKNDPLKAFSEPLKQRGKIVRAIKVWDTQKSGLQVRNGIADNGDTVRIDIYTKDDKNYIIPVYAHHIAKKVTPNAMITNGKTEDDWDKLDDTYQFKFSLFPNDLIKISNKKESFIGYYKGADRSNGGLTLLSHDCVDANKIKRFGPKTATIEKLEVDVLGNVAGLKA

SEQ ID NO: 8048 - protein, 1130 aa, unidentified
  REGION 1..1130: note = Description of Unknown: Cas Enzyme sequence
MKAYNKTNFRGDNMANYVLGLDIGIGSVGVGLIEKETGEIIHKSVNLFPSGDAASNVERRGFRGAKRIKRRKTHRIKRTEDLFEKYDIDVDLNSVPINLNPYEIRVRGLNEKLSLTELFVALKNMVKHRGISYLDDAIDEDNAATSGSDYKKAIEINARELKNKTPGEIQLERLEKYGQVRGDFSVKLEDGTERRLINVFSTSEYRKEAECLLKTQQQFYPELTDEFISDYLEILTKKRKYYHGPGNEKSRTDYGRYRTNGETLDNIFSILIGKCTYYPDEFRAAKASYSAQEFNLLNDLNNLTVPTETKKLSLEQKEEIIQFVKDAKTCGAKNILSKIAKMIGCKADDITGVREDKDHKAEMHSFEVYRKMKQLETINVASLTREQLDQLGRILTLNTEREGILESIREYLPDTFTNEQIDELIQFRKKNTTLLNKGWHSFSLKLLNELIPELYHTSEEQMTILTRLGKQKPKNESAKTKYIDGELITEEIYNPVVAKAVRQTIKIVNKILQEHGEIDTIVVEMARDKNDEDQKKRIQEGQKKNKNEKDAAILAAAMDYSNSKELPSTVFHGHKDLALKIRLWYQQEKRCAYSGREIPIAQLINNQGGYEIDHILPLSLTFDDGLDNKVLVEHIANQEKGQRTPFQAMPLLTNSWSWGEFKHYVINNSRFSKKKREYLLFEEDINKFEVRSKFIARNLVDTRYASRVVLNALQDFFKQRGANTKVAVVRGQFTAQLRRKWGIEKTRDTYHHHAIDALVIAASSQLKLWRKTNNTLIRYSENELLDTETGELISDDQYKEAVFKSPYDNFTKVLKSKELEDSILFAYQQDSKVNRKISDATIYTTRKRGNEEITVAKIKDIYSIEGYDDFLKVYQKDPSKFLMAQHDPVTFEKVIKVIVETYPDKEINENGKEVKVSPFKKYYDEHGYVRKYSRKGNGPIIKQLKYLDKAVGKHIDITPENSSRTVALKSLKPWRADVYFNPETKRYEIMGLKYSDLRFQKGGNYGITEKEYWKIKKDEGISKNSEFKFSLYKNDLLIVKDTVENKQEIFRFLSRTGVNKNYVELKPYDKAKFEPKEELFKFGKVAPSGQFVKTLSMDNISLYKVETNVLGRKFIIKKEGENPQLTFKNF

SEQ ID NO: 8049 - protein, 1248 aa, unidentified
  REGION 1..1248: note = Description of Unknown: Cas Enzyme sequence
GKEVKLNYRPNSDGKYEFIFKPSFNEMLERFKVAQPDLFYVKSNGKETKVPYDWTLYYLRKKALSQPLTKQELAWVILNFNQKRGYYQLRGEEIDDEKDKQFVQLKVKEVIHYGEAVKGKPLFDVIFENGWKYDKQIVKTEDWIGRTKEFIVTTKMLKNGDIKRTYKAVDSEKDWAAIKAKTEQDIERSNKTVGEFIYETLLENPTQKIRGKLVKTIERKFYKEELKKILTKQIELQPQLFTTELYEACVEELYPRNEAHQNAIKNQDFVYLLMDDIIFYQRPLKSQKSNISGCQLEQRTYFKTNKETGKKEEVKQAVKAIPKSHPLFQEFRIWQWLQNLKIYNKVDTDKGELTDVTQQLLPNEDSWVDLFDFLQSKKELEQKQFIKYLIDKKRINKTEKDHYRWNYVEDKKYPFAETRAQFISRLTKVEGIDDVDTFLDEKTQLGNKSNSSFVTRIEQLWHIIYSVSDINEYKSALVKFALKHHLDEESFVNSFIKFPPFKSDYGGYSKKALNKLLPLMRKGKYWNGNDISDRVKKRVSEIMERVNVLQLKDDYNAKQLAEALANVSDDDVKKQLIKSFVPFKDKNPLIGLNTYQATYLVYGRHSEIGDIQNWRTPEDIDTYLDNFKQHSLRNPIVEQVVTETLRVVRDIWKHYGKSQPDFFNEIHVELGREMKNPASKREQISKRNTENENTNLRIREVLKDLMNDDSIEADVRDYSPSQQDLLKIYEEGIYQNPKVDYSKVSEDEIAKIRRSNSPTPKEIQRYRLWLEQGYISPYTGMPIPLSKLFTHEYQIEHIIPQSRYFDNSLSNKIICESAVNEDKDNKTAFEYLNAKGGNVINGHKLLGLAEYEAHVNEYFKSNRQKLKNLLSEDIPEGFINRQMNDSRYISKLVKALLSNIVREEGEQEATSKNLIPVTGSVTSKLKNDWGLNDKWNELILPRFKRLNQLTQTNDFTAINTSGNIIPTVPDELLKGFSKKRIDHRHHALDALVVACCTRNHSHYLSALNAEKKNYGLRDKLLIKNEQGDYTKAFQMPWQGFTTEAKNQLEKTVISYKQNLRVINKANNKFWSYKDENGNLNLDKSGKPIKKLRKQTKGDNWAVRQPLHEETISGMVELPWVKPEKGKFTYATRKSLDKSFNLKKIEKITDTGIQKILVTYLTQEKFKEIDKKGKVIYNSELAFSQEGLEDLNSSIKQFNNGKPHKPIYKVRLFEKGSGRFSLGYKGINSKKYAQGSPNLYFNIYKNEDG

SEQ ID NO: 8050 - protein, 1097 aa, unidentified
  REGION 1..1097: note = Description of Unknown: Cas Enzyme sequence
MNKKILGIDIGVASVGWGIIDQDNNVVATGVRLFQEADNSSNEERRNFRGNRRLKSRRKIRIKDMRDLLVEYNIIGKDEDVSSINPYEARYKGLTQKLTNKELASALLHIAKRRGSSLEVAEEESTNKDVSPKKILADNKLELMDKYVVEVQLERLEKGKIRNQKNIFKTEDYVKEVKQIFKNQNLSEPFKEEAIAIIERRRHFSEGPGSEKSPTPYGRWRVIEEDLKNKIVKNFSKEEKNNFGAKKFVTNYDDVSYVVLKNKTIINKKPLNLIDLTRGKCSVYSDELRAPKNSYSALIYNLLDEINNMTIVSRENGKFTKEEKEKAIQVIKENGRFKPNNIDGFLKLFDLTIEDIVGYRINANEKPIITEFKTFKELLDIFKDEGVELTEQKADSIADILTKTQVVEERKDEVVKIVNNENLALKIANLKGYNGYHAFSFKALKLLKEELLNTNLNQQQILSAQSLREEKPITKLILDETLILSAVARRAHREALKVINELIREFGNFDRIVIETTREKNSKEARARHTKNQKRFIEQKTEAIELLKEAGFSDNDYSNQTALKVRLYNEQNGKCAYSGMPLEFVKVVTDPKAYEIDHIIPRSISQDNSLNNKVLVLHEVNQAKGNRTPFQYFSSGLAKKSYPINNYNAFKEYVNGNVNYQKNAFKRRNLLNEEDITKYDVLREFSNRNLIDTSYAARSLMTTIKNYFKANNIETTVLTIRGKQTDMFRGIARGLWNQEHRHISPEFNPFNKDRNYYNHHALDALIIAGLSNQKTLKYLFDLETTKKETYVTKKDTGEVFDLDPAEDSSLLKFLKNVGNLDDKDIRFSWKVDKKINRSFSNQTIYSTRKYDNDEYLIQTHKNIYEMKQEDLSKIFEDEKESEKLLIYQHDRGTFDLIKKAYLQYKHEKFPLKAYMEQHGKIKKNGVGPYVTNLKYRKEKLGNHIDITKSTTKNKKEVLLQIRPYRTDIYKDSNDNYKFVTIRYADFSSDAKGYYIDKNLYAEKLQQKGISENFKFTNSFHTNEIIAFKRKDEEFGYYRFVGTNNDVTNRIEIKSINKKDNKQNMPAIGKKIEKIYKYAVSPAGRIKRVENERLTLVR

SEQ ID NO: 8051 - protein, 1055 aa, unidentified
  REGION 1..1055: note = Description of Unknown: Cas Enzyme sequence
MKKKYRLGEDMGSTSLGWCMLELDNDNKPLDVINMGVRIFPDGREDKSKEPLSAKRRSYRGIRRNLDRYQSRLKRLWNYLDEVNFLPADRRLRDQLLMKDPYEIRKRALDEKISIEEFARAMIHLAKRRGFKSNKKTLSKDSDSNKLTEAIKNLKEQLAKHNSRTVGEYLWLKNRDLEKDKQHMKNPLRFQYKTGLSEEDRIFPTRDMIEHEFDLIYDKQAEYHNCLTDIVKEKIHNIIFFQLPMKPPLIGSCYLEPDEKRCAKANPFFQEFRIRQDVNNLRLVHIFDSSTQELTPEQKEIIFNHLNTVTKASLASLRRKILDKKIAPDYIFNIESDRKKDLKGNDVNNRMLKNEIIAPVWEKLSLEDQARIIEILTLDQDDEITIRELKQLNWLNLTPVLADAFMDINLPDGYASISQKAISRILPLMRKGLMYSEACEVVGYKHSDDYPGVVFDEGNLPYYGELLKREAIQLQRISHDSNADKYGRINNPTVHIALNQLRKLINTLTKRYGAPEEINIELAREIKLSREDKEKLDKIRSENEKQNIRIARELAELGIANNYENRTKYKLWEELNKDPLKRCCVYTGKQISQSELFSPEYEIEHILPKSHTYDDGIPNKTVSHRDANRYKGERSPFEAFGDSNDGYNWQEISQRALELPPNKRWRFLDNAMERFADEDQVLARMLNDTRYMSRSAKKYLQYVAGKDNVIPVTGKLTSELRRRWGLNKLLSDIEDKKERRDHRHHAIDAFVIALTTRSFIKRYASTVKNSKERFIEGLGLPYEGFDYNTMKKKLKNIKVSYKPDHPNPAKLRKRTQTAGPLTEETAYNLFDIDSQNSKFGLFSLRKDIYDVKQKDIENIVSPEIRKALAELIDSAKERNLDFKDLLRGWADDNNVKKVKMLFKKDLKTMVPVKDKHGKIYKYYSSAENLYAEIYCPDPEDDKCKWQIEVINSYNAHQPGFLPEWKQLYPKGKLIMRIYKNDVIAFTNKEGERELRRIRKMTSSGIIYLRELHVSKKDKGKEDIGEAFSVNQLHLKKAAKAGIDITGRLHDPGAER

SEQ ID NO: 8052 - protein, 1685 aa, unidentified
  REGION 1..1685: note = Description of Unknown: Cas Enzyme sequence
MEYKKILGLDIGTNSIGGALVNLPKSLDDFGKNGSVEWLTSRIVPFETNYMKAFSEGKSGSPQVTTPAGNRRQKRGPRRLKHRYKLRRTRLIKVLKLLGWLPEEFPLDNSKQIKEIIAKEGKFNFRISDYVPISDNSYKEFYREFGYSESELEKIIDEINYRRKTKGKKKDIQIKLLPEDWVVYYLRKKALSKQITINELIRIIYILNQRRGFKSSRKDLTETTLLQYDEFAEKLQNKEKYINENFETQFVSISKVKEVIETGEEGKKGKKKYRIVLDDPRIEPYELERKEKPEWVGQEYTFLVVQKLEKGKLKQNKPELPKEDNWALCTIALDNKMGNKLPGEYFFDELTKAYKEKRDYKVRQYPVHRWRYKKELESIWNKQCELNTELNKLNTDKETLRKISALLYPSQSKFNGPKVKEFENNNLLYIISNDIIYYQRERKSQKSLINECRYEKRKGKDSEYYGLKCIPKSSPLYQEFRIWQDIHNIRILKKESEENGKKKLNINESDKYINESIKEKLFDLFNCKENINEREILELIHQNTDDSQIRISKKEEETSHRINLFINRNELKGNETKHRYRKIFNKYGFNGDYILNDSEKLFKLWHADYSNDYADEKKSEKAILSALGWKEKNGEWTQTKNYETFQLPLEIAKAISALPPIKKEYGAYSALAIRKMLTVMRTGKYHQDPDYLVRIFENKLVNCPKKKQRKEIERYLQFLKSIRPTINSIKKRLDSIDHNPAKIYLVADNEIEKQVLKSFLGMRNENNFFKGLNTYQAGYLIYGKHSEKDYASINSPEEFSEFIRKELPNNNLRNPIVEQIIRETMLMVRDVWEKFGTIDEIHIELGRELKNNAQERKKITENQNNNFQEKQKARELLIELLNNGSFEHYDEEENKINTSFTIKPNPDNPLDIERFRIWKSQAGISDDELRKRLKDEKIPTDLEVKKYILWLNQNCRSPYTGKIIPLSKLFDSSLYEIEHIIPRSKMKNDAMSNLIICERGVNLAKGERLAANFISESNGKCMYGNKEYTLYNYDDYVKHCKETFKFQRAKYKNLLATELPEDFIERQINDTRYIGRKLAELLTPVVKDTKNIIFTIGSITSELKNNWGLNDVWKDIIKPRFERLEKILDKKLVFKNDDDPNKYHFDLSLNPQLEKEGIKRLDHRHHALDAAIIAATTREHIRYLNTLNAADSNEEKRKYFYTLCKGKIRDFKLPWVNFTADIKEKLLSCLVSFKEPKPIITNPFNKYEKWVIKNGKWQKIKCTQEKNERWKAVRRSMFKEPIGTIWIKQIKEISIKEAIKIQARWNEIKNDPNLKLNQPYIYDDHAQKVIERIVEELGLRSEITDQDEKNIQKFIKGLKVQSTEVKTNKGKTKAIYNLDGRLFEKIRIAEFVRYKAKRMSLNKKEYVENLTIQKMYNDLPNFILEKSIIEKYPNIQVKLEAENKYIIDDKRKNNPVNRLLLEHILEYNNDPKEAFNAEGKDKLNKKAIQTIGKPIKSITRLDGLVSEEEIFRGAVYETDKGSNVYFIMYENNQTKERIFLEPNPSVSVLKAIEKENNIDKIAPILNGFSRIVLSPGDLVYVPFKEEYELIKKGKNIEEILDSNLNFNLIDRIYQTISFTGKTCLFRKACIADLILPCNAKEKVIGEIDWHNKSEMSMDDPPIKIKDVCIKININRLGYIKPIKYN

SEQ ID NO: 8053 - protein, 1383 aa, unidentified
  REGION 1..1383: note = Description of Unknown: Cas Enzyme sequence
VYIKDYCKSNRSISMKKILGLDLGTTSVGWALVNEAENENEESSIVKLGVRIVSLSTDEIDQFKKGKAITVNADRTLKRGARRNLQRYKLRRETLKSILKNNGFIEESSVLAEHGNKTTFETYQLRAKAVTEKISLLELARVLLMINKKRGYKSNRKANSTDEGQLIDGMEIAKKLYEEDLTPGAYVLSILEAGKNPKKIDFYRSDLQAEFDKIWYQQEKYYPNELNAQLKKELLNKNNKQTWVICKEPFKLVGIKRSVKGFELKKENYTWRTKALSEQLSLEELVIVFQEINKELSGSSNYLGNISDRSKELYFNKETVGQYLAKNISNNSHFSVKNKVFYRQDYLDEFESIWETQAKFHPQLTEDLKKEIRDVVIFYQRPLKSQKSLISFCEFEQKKIIVNDKSKIVGLRVSPKSSPLFQEFKIWSIINNLRISDSAENISSAVLPQEAKEKLFEELNIRDKMTAVEALKLLYPKNYRDLSLNYKELEGNHTQAALFSIYQEILELSGHDLLNFKKESASNILNKLKEVFSALNIKTDFINFDSSLADPQFEQQAMYKLWHLLYSFEGDNSTTGDEKLVDAIAKLCGCSKEYAKLFTKVVFKEDYGSLSTKAMRKILPFLKQGLDYSEACKSAGYRHSKSSLTKEELENKVYLDVLELLPRNSLRNPVVEKILNQMILVVNEISKTYGKPDEIRIELARELKKSAKEREDMTKNISKATDEHNKYREILKNEFNIQNPSRNDLIRYKLYLELQDNGYNTLYSNNYISKEELFSKKFDVDHIIPQSKRFDDSFSNKTLELRSVNIEKGNRTAYDYVVDKGVSDDFIERVKRLDSLSNTKKNNLFTSEKNISDGFIERDLRETQYIAKKAHEILKDFVKEVVPTTGSITNRLREDWQLIDIMQELNWDKYHNLGLTETYKDEDGRTIKRISGWTKRNDHRHHALDALTVAFTKRAYIQYLNHLNAKSDETSPIYAIKKKYLEKSSKNKVRFIPPIPLTEFRKQAKEHLENILISIKAKNKVVTKNFNVTKSKKGKFNKTLQLTPRGQLHKETIYGASQKPVVKIEKIDSKFDLEKIMTVTKANYREALLKRLAKHNNDPKLAFTGKNSLSKNPIYLNILQTLQVPEKVKTCALETQYTIRKNIDDNLNLEKVVDPKIKEVLFNRLQQFNNNKKEAFSNLDENPIWLNQSQGIAIKRVTITGVSNAIALHHKKDHLGEFILNENQEKHSNDFVDTGNNHHVAIYRDAKGKLQENIVSFFEATRRAVHGEPIVDKTYKQNESYQFLFTMKQNEYFVFSKPELGFDPLQIDLLDPQNASIISPHLFRVQKLSSKDYVFRHHLETNVEDVKELRALAWERIQNLDALEKLVKVRVNHIGQIVCVGEY

SEQ ID NO: 8054 - protein, 1080 aa, unidentified
  REGION 1..1080: note = Description of Unknown: Cas Enzyme sequence
IKDESGKFLFKKDENGNDAKIKVPLKTIPKSNPYYQEFRVWQWLYNLKFYAKDDDKDVTIDFINNPETLEKLFDFLMTKKEVNHTDILKYFIEPIVKKEFPDAKGKSIREKIEKEVGKFRWNYVYDSDKDESKKYPMNETGFEIRKRLTKVENIPTNFLTREIEQHLWHIIYSVTDKIEFEKALKSFANRYSLDERSFVDNFKRFKPFDSDYGSYSEKAIKKLLPLMRLGRHWDWNSIDGDTKNRIHKIITGEFDDEIKNRVREKAINLTEEYHFQGLQLWLAQYVVYDRHSEASVAGKWSSVADLEKYLKNFKQHSLRNPIVEQVVTETLRVVGDIWKQYGNGTKDYFNEIHIELGRDMKNTADARKYLTSVISENENTNLRIKAILSELINDNSIENVRPYSPMQQEILKIYEDGVLNSGIEIPDEFEKISKKSEPTKSEIQRYKLWLEQKYKSPYTGKPIPLSKLFTSAYEIEHVIPQSRYFDDSFSNKVICESEVNSLKDKQLGLEFIKNNYGRRVSTSSGEVEIFSESAYIDFVKSHYNKNRTKRNKLLLEEIPEKMIERQLNDTRYISKFVSNVLSNIVRSEKDDEGINSKNLIPGNGKITNRLKQDWGLNDVWNDLILPRFERMNELTKSNDFTSWNEKHQKFLPTIPIELSKGFQKKRIDHRHHALDALIIACATRDHVNLLNNKHAKSKNERYDLQRKLRNVSKWVDKNGEEKDKFTEFKKPWDSFTIEAKNELDKTVISFKQNLRVINKATNYYEKIVDGKKVKVKQKGVNWAIRKPMHKETVSGLVNLPRVKVSKGKILTATRKSLDVTFNSKSIAGITDTGIQEILINHLMKYDEPITLIEEKNVTEIISKRIKLIKDKKLVENPEAAFSPEGIEDMNKDIIQLNNGRFHQPIYKVRVFEMGSKFPVGYTGNKKHKYVEAAKGTNLFFAIYWDEKQQKRVFETIPLNIVIERQKQGLLSVPEVDEKGNKLLFQLSPNDLVYVPTEEERENINGVNFKKLTKEQNDRIYKMVSSTGSQCFFIRQDIATSIVNKQEFSTLNKTERAINREMIKEVCAKLKVDRLGNISKA

SEQ ID NO: 8055 - protein, 1085 aa, unidentified
  REGION 1..1085: note = Description of Unknown: Cas Enzyme sequence
MKTKFPYRLGLDIGTNSIGWCIYKLDEEGAPASIHRTGVRVFSDGREPNKLKTSKAAARRMARQSRRRHDRVLKRLKRFQQILIENGLMPECPDERKKLVSLDPYELRAKALDEKLPPFELGRALYHLCKRRGFQSSRIDKEEDEKEAGKIKEAVDQTQQMIADAGCRTYGEYLAQQHANRKPVRARPTLDSKGYILYPQRAMVENEFDYIWSAQSQFHPTICIESVGAELKDALLFQRKLRPVEPGSCPFEESEPRIPQCSPLQQKFRILQEINNLRVGTTLDQRPLSLKERDTLLDELLAEPKLSFTRMRKLLGLPKGTPFNLESKKRRELKGDTVSAALASDTALGDSWWQLSDLQREALALLIENALTSTELRKALLALPRDIEPATKIIRGNATRVSPYHNALADLPWSIPERALPALIKAGMPDGYASLSRKALEPIVNELESDVIPYSEAVLRTGYDSHSDFYDGTLYERLPYYGELLHSYTAPMPTAKNADERRFGRIPNPTVHIGLNQVRLIVNEMLRRWGWPQETVIEVAREFGVSGKRRKEIEEEQAANTERNKKLNKRLRDLGQKETRENRQRLLLWDAMGDENAIDRYCIYSGERLSIQKLFSSAVEIDHILPFSRTLDDSLGNKVLCLTSANRYKSNQTPFEAFGNSPGKYDWDKILERASKLPKNKAARFREEAMSDFLNRSGLDAQTRKEYGFEDDEFLARQLNDTRYTCRLARQYLTAICPPNKVWTVSGRLTSKVRYQWRLDSVLDGNEPGKNRNDHRNHAIDAAVVAACDRSLIQRMSNAAKRAEEKGGNRLFEHLDLPWPEFRDDLKASLEKLVVSHRPNHSVESGLHTDTNYGLREPATGKGDTPLVVHRIPIKDLNIKRINDIDDPVIREQVRHYIEASDTSKKSELKKRLEHFTSETGIRRVRIVERISVIPVRDRQTGEAYRHLRTDGNYCYDIFERENGKWDGRIVTTFEANTKSFRRSLEKHKKPKKSVNGNELVMRLRKNDLIAIDEGIRIRIMRVAQFTRGKIMLAEHMEADVDRRARDKESGFSYLTKSPDSLRALNARLVGVNPLGYVNYPGGKR

SEQ ID NO: 8056 - protein, 1382 aa, unidentified
  REGION 1..1382: note = Description of Unknown: Cas Enzyme sequence
MSKTLGIDLGTNSIGMTLRNDDFFEWYGVYTYRKGVGEGKSGEFSLAAERTANRSTRRLYNARRYRRWETLKVLIENGFCPLSVENLNNWKNYKKNVGRVFPVHDQLFNDWIKLDFNKDGKPDYSSPYQLRRELINKKLNLNKAADRFKLGRALYHIAQRRGFKSSRKIGVNEKTAVYQGSTETGTLGRNSYENLIYENGSLGAAFAHLEDQGIRIRNRYTLRSDYLDEVNKILEYQEVDNSFKELIIKAIFFQRPLRSQKGLIGKCTMEPNKPRCPISHPSFEEYRAWSFVNNIKYRKNKTDNFKSLPLSLKRDIVNERLHIKSTKTSFKTIRNFILKGERKDWELNYSKKMDKMTIPTCSISAYLKAAFGTDWKNIIFESNKTRIDRNGKSRKITYTIEDIWHVVFSFEDEEYFEEFLFKQLNLNNDQVYELKNLWNAMPVGYANLSLKAIRKITPFLKKGNIYSEAVFLAKIPEIIGERFFEDHKEGILETLYLIIENNRYQKTIVNITNNLIANYKVLDGVDRFAYKDVSYQLDEIDKKEILRACMKYFGKNNWHEKTNEDQKDILKQIENKYQEFFSNSDRDYFKQPKLMEQIKMFLINDFNVSEESVEKLYHPSMIDIYPSSENQQLLNSPKTRAFKNPMAYKTLHKLRHIINYLLKKGLIDNDTRVIVEVARELNNKNKRAAIEDYQRNRERENVEFGIAITELLKDPDFSGIVNPDSKNDRDKFRLWTEQINNKDELFKLILATKEDIKKYRLWKEQKSVCFYTGKIIKLTDLFDTNVIDFEHTIPRSKSFDNSMANLTVCFANYNRNIKKNNIPTELPNYYMDSHGYTPIKPRLKEWEAKVESLYNQIQTQVNNSKFAKDKDSKDKAIRRRQVLQMEYNYWRNKVDRFTREELPTGFKNSQLVDTQLISKYAFHYLKTVFHQVETVKGSTTSEFRKIYKIQPKQESKDRSKHSHHAVDAAILTLLPSSAKRKDVLEKAYAFAEKNFGQQYHEKPFETFSYSMIKQIEKEILINNIKDQDQTLTPAKKLVRKRGKIEYLRDANGLVLRNNNGERIPKIATGDSIRGQLHLETFYGKIKVAAKDENGSLLRNDDGTIKYLKDDKGNEVYKMVGRKPIENVNFKTDRIIDEHLAVHLKQQIENGIKPHELKDFQGNIVRHIRCEVKSGRGVMNPDNATIVKEQTYKSKKEYKNYYYTDSGDNYMFGLYEIQNGRKIISINTFEAARLSLNQNKDTQQEIFKSKEPVMIGRGKKMKEGKLTHIFMPGQKVLFFSERKEELKDLGKVDLSKRLYFVKKLADAKAQRILFQHHLEARSDVELSNAYPRTEFGTKGKDGFSTFMKDFIAPRLLLTPTKFNFIIEARDFRINLDNTIQWNF

SEQ ID NO: 8057 - protein, 1372 aa, unidentified
  REGION 1..1372: note = Description of Unknown: Cas Enzyme sequence
MKRILGLDLGTTSIGWAFIEEAENDNETSSIIKTGVRVVPLSTDEQNDFKKGQSITINADRTLKRGARRNLHRYKLRRKEVINILKSIGFIDENSPLTETEVNSTHQTYELRAKAPLKKLTKEEFARVLLMINKKRGYKSSRKANNQEEGQLIDGMAIAKKLNNENLTPGQLSYQLLHNDSKLLPDYYRSDLEMEFERIWEFQKQFYPEFLTSDHKDALKGLNKRDTGQYFEKTIGTERAENKGSGRKVQHYEWRNKAVSEKLKLPEVAYILTEINNEIFQSSGYLGAISDRSKELYFNDLTVGQYLFKQLKENPHTSLKNQVFYRQDYLDEFDAIWEEQSKHYPELTEDIKDKLRNKTIFYQRPLKSQKGLISICEFERKERNVVIDGETKRKVIGPRVIPRSSPLFQQFRIWQIINNIVVSHKSKGSDLYILDEETKKALFDELNLVEKMTDKAFLKWLFEDSNKKASDYKINFNHLEGNKTQAALFACYNTILELEEYETINLKNHPASHAVREMQTSFNDLGIDPTILEFNATLSGNDFAKQSSYELWHLLYSYEDDNSPTGVDSLIQKLQEKFGFKEAHARLLINISLQKDYGSLSARAIRKIFPYLEDGFIFSKACEMAGYNHSHSVSKKDLKNWTPKDLEVLKKNSLRNPVVEKILNQMINVVNAIIDHPELERPDEIRVELARDLKQTADQRNEATRRIAKATRDHEELRTLIKKQFGLPYVSRRDLIKYKLYRELKATGYKTLYSGTYIKPEELFSNKFDVEHIIPQALLFDDSFSNKTLELRSVNLEKGDETSVDYCDRKGWLDDFKSRIQEVYSARDIGFMKRKKLLMTASEIPEDFLNRDLGISAYIARQAVQLLRSVSRTIVPTTGQITAKLREDWGLINVLQELNWNKYETLGLTYFETNKHGKKLPRIQDWTKRNDHRHHAMDAITVAFTRPAFIQYLNNMSAQSKDGIIIQNIKEKYTYRDKDGGRKFHKPFENIREEAKKHLESILVSHKAKNKVVTRNKNKIKRKGKNNFHIKTELTPRGQLHKETVYGRSQKYATKLERVGSAFDVEKINTVGKKNYREALLNRLVKFEGNPRKAFTGKNSLLKNPILLNDNGASVPDRVQTVTLQDRFTIRKEIAPDLRVDKVVDVGVRRVLQKRLDEFGGNAKEAFSNLDDNPIWLNEEKQIQLKRVTITGVRNAEPLSYAKDHHGNKILDEKGNTIPVDFVSTGNNHHVAIYKDEKGNLQEEVVSFFEAVTRVNLGLPIIKKEHELGWEFQFSMKQNEMFVFPSENFNPAEIDLSDPKNAKLISENLYRVQKLGSLLSGFWFRHHLETSISNNKELKNITYIVIQSSNNLKGIHKVRLNHLGKIVQIGEY

SEQ ID NO: 8058 - protein, 1537 aa, unidentified
  REGION 1..1537: note = Description of Unknown: Cas Enzyme sequence
MLVVYYNLLNMAKILGLDLGTNSIGWAVVDDEENQILGMGSRVFPEGVVAKTIGKGEREESKNAARRNSRQQRRQFYRKRLRKIKLLRTLIDLDMCPLTHAELDVWSKWDKKKGKAGRKAPSSAAYVEWLRQNPYFLRNKGLSKDLTLFEMGRVLYHIIQRRGFLSNRKGNDDGKIYKGKIGMVGIDQTKSSIGEGTLGSFLNSIYPKEGEPFELITDENNNELRVRARYTLRDMYIEEFDRIWTRQETHLDLNDKEGLQERTVFVKGNLENNRNKKKLRKLRQKYGQENVSITEIKNKENSKSIFKIVTKKSVPLKEFLGGQIHYDEDNNIKHKSQNSVLFWQRPLRSQKSLLAKCRFEPDLKINDKYIQKGKTPSLLSHPLYEEFRAYQFINNIEYGRKQKLDETQRLQVLDLINSKDSNFNFSEIPKRLKMGYEKWNYADNQKVPGNYTTKHLTSLFSDKIWNTKKEEIWHCFLDYNDNDYLKEKLAKSYNLNENLFEKVENINLKEGYSNVSLKAIKNILPFLREGFRMSDATILGGVMNAFGEQISYFKDSIELLKKDILKIVREKSNKEGEAIEKIKTYLIDNDFGFVKDDKRFLKLYHHSQDVVVKELKEKLDPIENLRNPIVQQGLNETRRLVNQLMSEYGKFDRIQVELGRNVKNSKKGRQEQLNRIHENTAKNDQARKLLTEFGLRHSRDNIQKVLLYKEMQDRGVMTVCPYTNTSINIKDVLGSENKIQIEHIFPRSTSLNDSLSNKTLCESTFNGLKGNLTPYQFYLKNNDKNLWGGAESWEDIEQRAYRLLPYPKAKRFTSKIKIEDTDVKSGFIERQLNDTRYISKKTKEIMSQICKDVRVLPGGLTSELRHLWGLNNILQPVMGLDINIENMDADRRYPYYVVLDSNNKAVSTTRIYNQKPNLQKNETTVTGKVKKGVFKTSERFVNLNVEAPGLSNGEYWVKLKLSNPKQIVRVFKEKMDSTEAEIVIRGKIERSRFKNDGVGSIAAPEFDNGSYWAKLPITNKKFVVPEKGKQPKKTGKQYLLFGEVKDGNFKSYIYSCQCNEEDGKYWLVLDLDMENAVFERAVNEIPQFDSNQIRIEGTVNEMGLFVSEVDAEHQFELSEKEGKYWMIFDILDDPSEFDAIENPKPEFADSESLIEGSLWVDKYSGEIKFDPKKNRDDHRHHAIDALVIALSKQGYFQRLSTYNAQRVARKKGLHFDKKQLNFPEPWINFHSAARKEAEKILVSHKQNRTVLTQVRKRITKNGKNYLSVGDAVRGQLHKENVYGQRQAPFETAKGYHIRKKVVDLTDSQLKKIVDVEIRKIIINARVEEAIIRKQLTALEKQKKKSRTDEEELLFQQEIDGLENDIEQLYTLKNKNGARVPIKKVRIREEMSNAQQVKELNQFVNPRNNHHVLIYSDENGRMKESIVSFWEAVERKKQGADLYQLPDNGVEIIETFQENDMFLLGLTSDEFRDNKNNPKFLTQYLFRVQKLSEGDYSFRHHLASTLSNKSEEVRIASLKKWKEMNPIKVEFTETGSLV

SEQ ID NO: 8059 - protein, 950 aa, unidentified
  REGION 1..950: note = Description of Unknown: Cas Enzyme sequence
NNYVVNVQLDRFKENQQIRGTNNVFKTEDYLNELKEILKHQNLGEELNKQIISIISRRRHFSEGPGSINSPTKYGRFREVEGETLQEIKKYLNREYQNKYLKEKFNFKFENKEYVAFKDGRITNAKPYDLIALMRGYCSIYPEEVRAPKMAFSAELFNLLNDLNNLKISNRISEKITNEEKEAIISQVRKTGNLTVNNVLKYLNADILEVSGFRLDKNEKPQISEFKGYKKLLKIFKKLDLEMLEDKKLDQVMEVLTETVIEEERFEKINKIVGNKILAQELSILTGVNEYHSLSLKAIYELNEEMLNTSLNQMEIITKSGLRKPKQIKKLSLDETAILSPVAKRAHREALKVVEELINEYGNFDRIIIETTRDKNSADQRRRIREIQKYFENSRKEAEEVLGDYAQNYINQANILKIRLYKEQDGKCAYTGKPIDLLTLIKDPYAYEIDHIIPLSISLDDSYNNKVLVYPSANQAKGNNTPFKYFQSGYKIKDNPISSWEQFETIVNNNKNYSRLKKQNLLFLKDITKYSTIQEFVNRNFVDTSYATRSLMTTLKNYFQSNEVDTKVFTIKGKQTNLFRKIGRSIWNYKYPNNDFNPFVKDRDKYIHHAIDALIIAGLSNQRHLRKLYELDFDENEEYYISRRTGEVFDGLNNDEITKYLLKVSKIKDEDVNYSWKIDTKPNRSLSDQTIYSTRIKDKEHHVVKKLDNIYELDDKKLKTYFEGKNREKLLVYQHDKKTFEKLEKAYLQYSHEKYPFQAFYEDHGYLTKYAKKNNGPIIKSLKYLDKRLGNHLDITPGSAKDKKVVKLQVSPYRTDIYYNKELNNYKFVTVRYSDMLEQNKKYVINKKWYENEKLNKKINSDYEFKFSLYRNNVLGIHKQEKDHLIKTIARFVATKNDKTNVIELKSINKYDSNRLVETIGRKTIKINKYNVSVTGKVSKVTKERLKLII

SEQ ID NO: 8060 - protein, 1471 aa, unidentified
  REGION 1..1471: note = Description of Unknown: Cas Enzyme sequence
MKKILGLDLGTNSIGWALVESNFKSKTGKIIGIGSRIIPMSQEILGEFAKGNSISQTAKRTEFRGKRRLRERHLLRRERLHRTLNILGFLPKHYSNAIDFENRLGQFKPGEEPKLPYHNNTFIFRASFEEMLSEFKKHQPQLLTDENGHNKLVPYDWTLYYLRKKALSRKIDKEELAWIILNFNQKRGYYQLRGEEEEEQNNKLIEFHSFKVIDVKVDEELNNKGEKWYSIFLENGWIYRRASKYPLDDWRGKVRDFIVTTELNDNGSIKKDKEGKEKRSFRAPGENDWTLIKKKTEQEIDLSNKTVGTYIFDTVLQHPQQKIKGKLVRTIERKYYKQELKQILTSQKKYHPELQDEQLYTKTIRDLYKYNDAHQLLLTKKDFLHLLIEDIIFYQRPLRSKKSSINNCSFEFREYTNNNGDQVKEYLKAIPKSNPYYQEFRVWQWMQNLRIFNAEDEKDVTSIFLATIEDKERLFEFLMGKREVDHKDILKFLLKPKGLKGKALDEEIRKYRWNYVYNSEKDESKKYPCNETGYEIQKRLCKVQNIPDKFWKQENVQNLWHIIYSVTDKIEYEKALRTFAQRMDLEINSFISNFINFPPFKSEYGSFSEKAIKKLLPLMRTGKYWNWDNIHSNTQARIQKLITGEYDKDLQDKVRDKAIDLKAESDFQGLQLWLASYIVYGRHSEPESNKKWDSVTGLSRYLKEFKQHSLRNPIVEQVITETLRVVKDIWNQYGNGEKDFFDEIHIELGRELKNTADERKRISNVISENENTNIRIKALLIELMNDSEIENVRPYSPMQQEILKIYEEGVLKSNIAIEEDILKISKKAEPSKSELIRYKLWLEQKYRSPYTGQPIPLSKLFTPEYEIEHIIPQSRFFDDSLSNKVICESVVNKNPYKDNQLALEFIKNQGGTIVTELSKEGKIIKVFTEDEYTKFVKEFFTKNPKKRNKLLLEEVPEKMIERQLNDTRYINKHIGALLSNIVREEQGDEGVNSKNLIPINGKITSQLKRDWGLNDIWNDIIMPRFIRMNKISGSTAFTTYNEKHQKHLPTVPFEYSKGFQKKRIDHRHHALDALIIACTTRNHISLINNEHALDKTKTKAEKQVFRYDLRRELCEKKFNSESSQNYNWVFTKPWQTFTKDAKNELEKTVVSFKQNIRVINKATNQYESYKNPDGSLRIGKNGQPVKALISQKGVNWAIRKPMHKDTVSGKIEISGKKIPKGKTLTASRKTVDPSFSPKSIESITDSGIQKILLNYLKSKDNNTELAFSQEGLEDLNKNIEKYNSGRSHQPIYKVRVYETGSKFALGETGNKNAKFVEAAKGTNLFFAIYENKQGKRNYETIPLNEVIEHQKWRATLPKQEQVTTPMIPIKRDFGTFLFSLSPNDLVYVPTEEEATSKIDYHNLTREQINRIYKMVSCTGKQCFFIKQEVASSIVDKHEYSALNKMERCIEGMMIKDKCIKIEVDRLGHILS

SEQ ID NO: 8061 - protein, 1553 aa, unidentified
  REGION 1..1553: note = Description of Unknown: Cas Enzyme sequence
EKILGEFGAGNSVSQTAKRTNYRSTRKLYERHHQRRERLHRILNVLGFLPEHYKNEIHFADEVVNGKTIKKYGKFREETEPKIAWKKNEQEKFEFLFQNSFNEIVDAFKANGQNIKIPYDWTIYYLRKKALAQKITKEELAWLLLNFNQKRGYYQLRGEEEEVNENIREFVANLTISNVEKGEVDKKNDKRTWYKITFSNGWEYNATFTTEPNWQNTEKEFLITEEYDDNGNIKIVKDKKSDTTGREKRRITPLPTFEEIDLLSKKDQDKIYGKIKARTELTIKDNGTSVGTYIFDTLLQNPKQKINGKLVRTIERKFYKDELRQILKKQIELQPELFTDDLYNDCIRELYRSNEAHQQSLGNRDFVHLFLDDIIFYQRPLKSQKSSIGNCSLEFRLHKINKKDESGNITKNVFEKDENGKDKVVKQYLKVIPKSNPLYQEFRVWQWLKNLSIYKKDDDSNVTTDFLNSTEDYEKLFTFLTTKKEVNHKDILEHLLTPILTEKYPSAKPKVFNDELKKEIAKYRWNYVFDDAKEKEEDKSKKYPCNETGSEIRRLLKKANISDDFLTAEIEYQLWHIIYSVTDKIEFEKALKSFAKKHGLDEISFVENFKNFKPFKSEYGTYSEKAIKKLLPLLRLGNYWTENNITDEVKNRAISISERLKTIKEEKEIENIADDDIPKQILKSFFGLTDLTQGLKLYQASYLVYGRHSEAENADKWRSVADLEKYLEDFKQHSLRNPIVEQVVTETLRVVKDIWQQYGNSTENFFNEIHIELGREMKNTADDRKRLTNIVSENENTNLRIKALLTELLNDNEIENVRPYSPMQQEILKIYEDGVLSKYSENELKSEVFDNVGKDEAKNVYEVSTKAQPTKSDLTRYKLWLEQKYQSPYTGKFIPLSKLFTSAYEIEHVIPQSRYFDDSFSNKVICESEVNSLKDRQLGLEFIKNHHGKKVPTSSGEVQIFTETQYKDFVTEHYDKNRGKKTKLLLEEIPDKMIERQLNDTRYISKFITYVLSNIVRSDQNDDGVNSKNIILGNGKITSTLKQDWGLNDVWNELILPRFERMNNLNEDKRNKLIEEYNEKTNSFESEKSRILENTEKSEEEKDKEIKNLEKQIWELNRNIQLLIFTSKSKEGHTIPAIPLELSKGFQKKRIDHRHHALDALVIACATRDHVNLLNNQSAKSENLRYDLQNKLRKKEQWQDKNGIEKDKLTDFKKPWENFTVNAKNELEKIVVSFKQNLRVINKATNYYEKIENGKKVKVEQEGTNWAIRKPMHKETVSGKVDLQWKKAGKGKILTATRKSIDTSFDLKKIYTITDTGIQKILEHHLKNKDNNPELAFSPEGIEEMNKNIFSLNNNTPHQPIYKVRVFEEGSKFQLGQKGNKKAKYVETAKGTNLFFAVYQDKNEKRSFETIPLNEVIDRQKQGLSSVPEIKTIKNRGEEPQDLKLLFHLSPNDLVYVPTEEERENSLPIDFGNLTNEQKKRLFIVNDFSSTCYFTPNRIAKAVAPKEIDMNYDEKKNKVTGSYDTKTASLDGKQIKDICIKLQVDRLGNISKV

SEQ ID NO: 8062 - protein, 1614 aa, unidentified
  REGION 1..1614: note = Description of Unknown: Cas Enzyme sequence
KNTYISGSLNKTTEMKKHILGLDLGTNSIGWALIQQNFENKQGEILGMGSRIIPMDGQEFSKFNAGQKVESAAGKRTILHRARITKERYLLRRDRLHLVLNLLEALPEHYKIEIDFERNGKKCGQFKDGREPKMAYLRTKNTENKYEFYFEDAFNEMVKDLQKINPEIKNEKKKRVPKDWTIYFLRNKAMTKPISLEELAWVLLSYNQKRGIDSSEIENEDEKSDEKEQLDLIVIKAEPKNDITGDFFEITLNDVENFKYREYTKQQLTFVGDVKEVTRFLKLDDAGNINNEKTTYQINDLYNLTLANIEHTDIDDKKAKHKYDFTYTNGWKTEKKKEKFDVTYQKLERQIKDEQKAITELFVVSNKYDFKGKPESIIPNIKLPDFTSEGSKDWTLLKKKTEKEIVKSESSLSGWIYSLLKNDIEEGERTKIIGGLFQTIDRKFYREELSQILKTQRKFHTTTLDNKEIFEKCVKLLYPHNEAHSKALLENKGAIINLLVEDILLYQRPLKSKKSEISDCKYEIDYWKEDVNTTTGEITDIPVYKKAVSASHPLFQEFRIWDKIHNIKLIQLESKDAEGKSETNVDITSDYFKPEDYQALFNHFNSRSNVAIDDFLSFCKDRFKLDIGKKGGRKILWNYPVEEEFKGNETRKSFEIRFKRCGFDRFCEFMTQQKEIDLWHYLHSVSSAERKKISETKDSSNRKYGKTGIFNFFTKYFKDENVSPEVIDKLCRDFKNYPKFPSKYASYSIKALNKLLPMMRVEGNFLTDESENEKWQEKYYERVKAILNKGSEIDWSAEFVDLSNVVVNDVNTKAGEIPFPKGLFNTFKNFDTIEDFQFLNLTQASYFIYGRHSELAQARYWNSPDKIREEIMKELKHHSLNNPTAEKVLKETLKVVADIWEFYGDSQAKFFNKIHLEVARELQKSNKEKKEITDRQKNSRAENKRLRNILEEFLIYSPYNAKRGNHDHFERLKIAEEGARTRSYIEKDFYSNNKAKFSKTDIEAILRKQRITKSDFEKYKLWIEQGYRSPYTGEIISLTDLFNGNKYNVDHIFSRASISNDSLNNKVVCEAVINRFKSSKTGREFISQFGGKTHTVYDEKLNREVTFKLIDEESYVSLVKTQFKDSKRLILLAKEVPKGFTESQLNNSKYIARKAMELLSHIVREEGEVEFRSKNVLPVTGGITDRLKKEWKMNHIWTKLLTPRFERLNKIYNSEDFGSYSISKSGHQYFDINTKYILEKNDKFDLKRLDHRHHALDALIIALCTENHVQYFNNINSGITNKKEGKIEAIQKQRAGIKRQIMYREKDKENPNEKVWRYLLPGSFRQKDSQNNEKDSVVDLLWDNNYTTKESKDYKKTILESLANCVVSFKNDFKIVSKSSNKYESYYDKDGNLRLDSNGKPKKGFISQDNKNQKHWSIRKPLHTDNPSAEITLQFDRLKLRDNLGKADLIINDKIKDTVNEILGMHDNKIGKAQGYLIKNPIRIDDKLIEYADFKITNTKYRKRQPIANLSVRTGTSALSTFESVVDRINKVSDFVLRNDLLEHLKINDNDIDKAFSIEGINDFNANRKIPVYRLPISESASLKFKIGNKKSNNHKWVETGGNFHFKITQKEDS

SEQ ID NO: 8063 - protein, 1470 aa, unidentified
  REGION 1..1470: note = Description of Unknown: Cas Enzyme sequence
MKKIGLDLGSSSIGWTLRDSDNVFESGVITFQSGMVKGTGGYSSPTKDRREARSKRKLIQARKYRKWELLEILLDEFVPLNKTELENWSKYKKGQTQKFPENPNFLKWLKCDFSYVGVITEYNNPYELRVNALDNKRKLHKHELGRALYHLVQRRGYKDIGETDKETEKQIQRRGESGFQKALEENRTIAEALQKEFLDKGLRARNQYPYREEYKHELEEILKAQGYNITEKDGGYEDKWVQKIWKAIIWQRPLKTQKGNIGKCTLEPTKPRCPVSHPIFEIFRAWSFINTIKYYNDKNEKVSLGQTERELLFEFFLKKDKNFKFEDIKKELNKSLGINTKYNYPIDKKTGKYDTTVAGMPVCKGLIDVFGETVKNALADIHQYNIGNAPKIINGYSIYDLWHILFAFDEKTATDQRFLEKFAVQKLDLLIIKDTKNKEINFPEKFAKLKNNIIQGYSDLGLKAMCKIIPFLKEGNLYNEAVVLAKIPELLGEKWEEQKDNITNLVKQANNIYNHQKTITAITNKLIDEYKGLKEGEIFAYKDFTYKLKNDDINNIENACNGHFGEKSWNEKDKDERIQILKSVEENYQAFFYDEKRAYRTTPLLTDIFKELLKEHKIEFKGELYHHSNIKNKYGTTVFDRKTGAEILPEARIDSIKNPMFNKSMGILRKLINQLILEGKVDNETEVVIELARELNDNNRRSAIERYQNERKNNREKYRAFLQEFNRKENRNINVEESLSTFEMWTEQIFDETITKGEKGKEKRENNNSLILKEKEAVKRYELWTEQKGQCMYTGKMISITQLFSTDIDIMHTIPRSILPDNTMANKTVGFKFYNTDLQKTKLPTQCDNYTRDVEGWGTAIEPRLGIWIEKRDNFKKLYEDRLKPKGGEDEAKKNKRIQEKHYYKMHYDYWKDKVERFTVEEIKDSWVRRQLVDTQMTSKYAREFLKTFFKKVSVQKGETTADFRKIYGFQEEDEIKDRNRHTHHAIDATVLTLIPVNSSHRDKILKKYYEEVEAQQKITNRKPFENFNSQKLIQEVENNTLIVNYESDKILKQTAKKVRKRGKLQFLKDKQGKFVLDENNDKIQLIAKGDTVRSELYAQTYLGKIKDVERDDFEKELEFNNIKIKVKGFPKKREKNEWVYKQGKDEFLFVVRKPIKDVLSKIDDIIDPVIRELVRKQKNNSEIKDYQGNIIRHVRVKTSAGKEVKERLNYRSKHDYKNKFYSTSGSLPYAILVQKGTERAMLPIASFELAKAYKKYGSFVIDEYLKKYDEENKTLLSNYPDKKLLKVGQKVLVLKEGEEFKKRRNIDFQKNRMYVITQFSEGSIWLKYHLEAQSLDEIKKTISRTKDSLLRKYEIEQDISEVVEDVTIQDNKLRKEDYENRKYRFDTINNSFRLKILSDKIGLDTTKEIKKELDKYKAIAGTIEVEEKTPLLKMSKSNWNFLYENEDFEISLLGKIKWIENRLGNISKV

SEQ ID NO: 8064 - protein, 1095 aa, unidentified
  REGION 1..1095: note = Description of Unknown: Cas Enzyme sequence
VKKILGLDIGITSVGWGIVDSNTNRIIDFGVRLFDESDSENNLKRRGYRSNRRILRRRKQRILDMKELLIRNKIITKDFLPLTNPYQLRLKGLNEKLTNEELATVLLNYAKRRGSSLETVEESVSSSEQSAKYNLSINQEALKEKSYIVNVQLDRLEKDGILRGHQNNFKTTDYLIEVEQVLKNQNLSKEFNDKIIEIIKRRRHFSEGPGSLYSPSPYGRYRNLEGDDLEEIKNILKSQYSNQYLKKNFNIEHKGKTYFIFKNGNVVNKDPLNLIALMRGKCSIYTEELRAPKNSFSAELFNFLNDLNNLKFTNREEKITKNEKESLINHIRTKGSLTFKQLLKHLNVEEVDVSGFRIDKNQKPLITDFSGYKKILKIFNDLDKEVYDDQTIDKIVEILTETVVKEERVERINFLINDDIISEKLSELTGINGYHSLSLKAIYKLNNEMIEEPLNQQQIITNLNLRTTDSVPKLLLDESAILSPTAKRAHRETLKVVEELLKEHKYFEKIVIETTRDKNSSEERKRINDLQKHLEQTRKEAEEILGDFAPEYAKGSNILKLRLYKEQEGKCAYTGETIDLSRMISDPYSYEIDHIIPISVSYDDSFNNKVLVLPSANQAKGNKTPFGYFNSSNVLSKYKIKNFETFESYVLNNKNYKNNKKRNLLFKKDITKFEVLKEFINRNIVDTSYAIRSIMTTLKNYFSYHEVDTHIMTIKGKQTNLFRKIGRNLWNMKYPNSNLENPLNKDRDQYKHHAIDALIIAGLSNQKFIRKLYDISEKDEILYDRKTGEIINLDDPTQNHTMNNFLLEVANIKDEDVKFSWKIDTKPNRKLTDETIYSTRLVNDQHVVVKKYNDIYNLTKEQLEKILSEEGRQKLLVFKHDPKTFEIILNAFNQYKHEKKPLLAFKQEHGSIRKYSKKNNGPEIKALKYLEDNLGFHLDITPNSSVNKKVVKLQLSPYRADVYYSENEERYRFVTIRYTNILLGSEGYYIDENWYNEELKIKLIDNNYKFQFSLYRNNIIDLHREDKNVINIERYRFLTVNNDIKNTFEVKPLSNYERKQLMITIGMKIKKIIKYNVSVTGKASKVIKEDLKLKL

SEQ ID NO: 8065 - protein, 1336 aa, unidentified
  REGION 1..1336: note = Description of Unknown: Cas Enzyme sequence
NEFETGRDVSTNVARRRYRGMRRNYDRFQLRRDKLIEIFQKIGFIDRNTILTEDGKDNTHETYLLRAKAVEERIDKEEFVRILLMINKKRGYKSNRKVKEEEDGTLVDGMKLAQKLKEADLTPGEYLAGLDEKQIKVTPDFYRSDLKAEFDKIWGTQRNHYPDILTTTHYENLSEKNRKQTADYFLKTMGIERADPKGTRVEKKMLSYNWRAKAVKEKIELPEIAYILTELNNEINQASGYLNAISDRSKELVFKGLTVGQFQYQQLRESSHNSLKNQVFYRQDYIDEFNAIWAEQSKYHPELTPELKTLVGDRTIFYQRRLKSQKGLIKICEFEGVEREVNINGRVQKKLVGPRVAPKSSPIFQAFKIWQNINNLQISKKDNPRTKFEIELDAKLELFEELNRVDKWTDTQFLRWFFKDNQKEDHNDWILNFPKIEGNRTRAIFMDAFQDILTLEGYDDNLLRSITDNDLKEIFQSLNIDHRILDFDPAIEGQMMTEQPYYRLWHLLYSYEADQSKTGNASLIRALGDHFGFREDQAKILAKVTFDEDYGNLSVRAMRRIIPYLQDGLKYDEAARLAGYDHSHSVTSEENKERVLADQLDLLKKNSLRNPVVEKILNQMINVTNAILNDPQMGRPDEIRIEMARELKQTQEQRRTTTSAIAKATKDHEDYRERIKKEFGLSYVSRKDLIKYKLYLELESTGYHTLYSNTYVKPEELFTNKFDVDHIIPQSRLFDDSFSNKTLELRQENIRKGNLTALDYCIQMGRENDFRFRVNQLASSLNGIRYTKKRRLLMRDEDIPEGFLNRDLGNTAYISRKAHEILLPVTRRVTSTSGKITAQLRADWELIDVLKELNWNKFKEVGLTYHVENRHGNHLRRIEDWTKRDDHRHHAMDAITVAFTHPAMIQYLNNLNAKSDKGGGIYGIRQKYLYKDQNNNWRFKKPFPTIRESAKEHLESILVSFKAKNKVTTINTNRIKVKGGYLNQATNTPRGQLHKETVYGKSKTYVTKIERVGGKFDQDLIDTVANQAYRMALTKRLEAFNGDPKKAFTGKNSLSKNPVYLDNGQEKVPDKVKTVVLEDQFTIRKDVSPDNFKNMKHIEKVVDVGVRNILKARLEEYGGDFKAAFSNLDENPIWLDKDETIPIKTVTITGMSNVESIRDRRNHKGEYLVDEDGNRIAGDYVSTGNNHHVAIYRDDKGVLQEEVVSFYEAVIRKNLGQPVIDRNHSKGLEFLFTLKQNEMFVFPNEEQGFDPGSMDLTDPANRAQISPHLFRVQKISSKYYVFAHHLVTSAITGDDFKNKKELAGIKYHLIRTPSQLEQIIKVRINHLGQVVEVGEY

SEQ ID NO: 8066 - protein, 916 aa, unidentified
  REGION 1..916: note = Description of Unknown: Cas Enzyme sequence
MKRILGLDLGTNSIGWALINNDFNKKEGNIEGLGSRIIPMSQDVLGKFDSGVTVSQTANRTGFRGVRRLYQRDHLRRERLHRTLHVLGFLPKHYADDIDFENKLGQFKPGTETKINYRKIENGRYHFIFQESFNEMVEEFKAAGHNIKLPYDWTLYYLRKKALTEKISKEELAWLLLNFNQKRGYYQARGEEEELEEGKKKEFVQLKVRDVIDSGEEVKGNKLHDVVFENGWHYDKQVTKIEDWVGKTREFIVTHTEQKDGTIKMTYKKVDSEKDWIAIKERSQQDIDGFNSANNTMGVASYIFESLLKNPNQKIRGKLVKTIERKYYREELKAILATQVAKHPELQNKSLYQDCINELYRHNEGHKSNIKDNGFSYLFLEDIIFYQRPLKSKKSTISNCPYETKVFIKEGKKEKQPVKCIPRSNPLYQEFRLWQFIHNLKIYERESMDGGSLELNKDITNSYLRIQEDYVKLFDFLNEKAEISQTGLLRYFKLKDKTHRWNYVEDKKYPCNETYSEFLKRLSKIDGFDVEQILDSAFERELWHIIYSVRDKHQYVKALETFAEKKGVDKEKFREMFEKFKPYDSAYGAYSEKAIKKLLPLMRRGKYWSLEAIPVKVQERIAAIMERVEDVDFDINKIEKLADDVIPKQLLKSFAKAKDALQGLNTYQACYAVYDRHSEVGDIMQWKKPEDIAWYLNPNNPKGFKQHSLRNPIVEQVVTETLRVVKDIWDHFGDGREDFFNEIHVELGREMKNDKKTRERISKSISENENTNERIKNILKELMDDPDVDGDIRPYSKGQQDILKLYEEGVYSNSKETYQAIKLDDIDKIRKNNSPTKAEIVKYKLWLDQKYISPYTGMPIPLSRLFTTDYQIEHIIPRSRYFDDSMSNKIICESEVNDVKENKTAFEFIKNNPNRI

SEQ ID NO: 8067 - protein, 1189 aa, unidentified
  REGION 1..1189: note = Description of Unknown: Cas Enzyme sequence
MKKHILGLDIGVSSVGVAIVTEENGKKSIEKLSVRIVPEDPDFHGKFYSGNTASKNLARTTKRGIRKNNQRFKIRRDKLYRTLKENNMFSIENILNLSAIELYGLRAKAVSEQISLEELGRVFILLNQRRGFLSNRKSVSEEESSTEYKERIASLEKELAGRTIGQKLYSELQESENIFEVLLRERTYQRSSYIEEFDRIWEEQKKYYSVLTGGINEDNNKGTLYDLIRNGIIYYQRPLKSQKGLISECPFEKYHKAIAKSSPYFELFRIWQKINDLSWKNPNGESFKPTPEQKQKLKDALWNGENLNSKHKLTITEIKKILGYGRNDKIYLNFTELDGSRTYAILKNALEEAKIETPQQYLFFNLGVNDEKGGLFELWHITYSLPTEKEVINALKNRFGFSENQSEIIAKRVGYPSDYGSLSTRAIRKLLPYLEQGLGYSEACDKVGYDHSGYKTEIELKSKLKQLKKNKLKNPVVEQILNQVVNIINLVIDEYGKIDEIRVELARELRNSAKTRKNISQANSKNKRNNDAIRKKLKEEYGFKLVNGRDVKRYILWEETTHKCLYCNNPINGTDMLTGNADIEHILPKSRSFNNAMTNYIIAHRKCNADKGQKTAYDFMESKGVEMLRQYIEKVNDLYKDGKGSISKAKFENLLCKGEDIPSDFVERMKKDSQYIAKEAVKMLKTVCPDVYTTTGQVTDFLRNEWELKNLLQELTFHKYKAIGQVEEKEIKKGQNQTQTIEIIKDWSKRDDHRHHAVDALICALTDQKIIFKLNNLNKIYQFERNALSTEEVENIEEFLEGKFSLKEFSDQQGNIIKCSISDIRKEAQKHLESIFISFKKENSKVLTKNTNQPKNSKEQITWVPRARLHEDTVMGRVKHIAEKKMKINDKVSIEQIEMIVNPEIKRILYQYLEKNNNNPKIAFAAKTLKKEPVIYKKEEIKEVTVYKWINTKRVDVNENITSAQIEKIIDKESQQAVQTRLNANNGKIKEAFKNLTENPIRLKNGMIVKTVTVSDESKVEKVRKGYVKTGGNHHTLIYKDENGKYNDKVVSFWEAVAIGLQNVKEHNNPYPIINRNNNDELGEFKFSMQINDLFVFDLKHFENPQEENEINFFDNKNRKRISDKLFRVQKMSKKGNGTFDIHFRHHLETSVNRNIREVCWINFQSNSYLERITKIRVNHLGEIIKIGE

SEQ ID NO: 8068 - protein, 1042 aa, unidentified
  REGION 1..1042: note = Description of Unknown: Cas Enzyme sequence
MKRILGLDLGTNSIGWALVEEDFNKGEGKILGLGSRIIPMDQGIIGKFGEGSSISQTADRTKYRGARRLRERHLLRRERLHRVLNIMNFLPKHYSSQIDFDKRLGQFYDNTEPKLAWIKNEAGNYSFLFQDSFSEMVEDFKTNGKDIKIPYDWTIYFLRKKALTKKVRKEELAWIILNFNQKRGYYQLRGEEDEDENPNKLVEFHSLKVVDIKSDETPNKKGEIWYSMELENGWVYRRSSKTDLFDWKDKVKEFIVTTDINDDGSIKTNSDGEEKRSFRAPKEDDWTLVKKKTEQEISLSNKTVGVYIYDSLIKNPKIKIKGKLVRTIERKFYKDELSEILEKQLELQPDLFSDETYNKCIRELYKNNSTHQIELKKRDFIHLILNDIIFYQRPLKSQKSLIGSCSLEQRAFKDKEGNIQVQRLKAIPKSNPYYQEFRIWQWIYNLKIYSNDNNEDITIQFIKDSHDTEKLFNFLMSKKEVDHNDILNYFIEPIVKEKYPKAKPKAFKEELAKETRKYRWNYVYDSDSNESKKYPMNETGYEIRRRLSKVADLPKGFLTKEIEQHLWHIIYSVIDKNEFKQALKTFSNKHNLNEESFLENFIRFKPFDSEYGRYSEKAIKKLLTLMRLGKYWSWDNVNDKVKQRINNIITGEYDEEIKNRVREKAINLTQENHFQGLQLWLAQYIIYDRHSEAKNIDKWNSIYDIEQYLNEFKQHSLRNPIVEQIITETLRIVKDIWVKYGKGVENYFDEIHVELGREMKNSADSRKHLSNIINKNENTNIRIKTILTEFMSDSSIENVRPYSPTQQEALKIYEDGVLNSGIEIPDEIDKISKKSEPTKTEIHRYKLWLEQKYRSVYTGKPIPLSKLFTSAYEIEHVIPQSRYFDDSFSNKVICEAEVNSLKDKQLGLEFIKNHFGQKVHTAFGEIEILSESAYTDFIKDNYQKNRSKRDKLLLEEIPEKMIERQLNDTRYISKFVANLLSNLVRSNENDEGVNSKNLVPLNGIITNKLKQDWGLNDVWNELILPRFERLNDLTQSNDYTSW

SEQ ID NO: 8069 - protein, 1171 aa, unidentified
  REGION 1..1171: note = Description of Unknown: Cas Enzyme sequence
IMKRILGLDLGTNSIGWALVEEAENENEKSNIIKLGVRVNPLTVDEKTDFEKGRPLSTNAERTLKRGARRNLKRYKLRREQLIKELIDNNFINKSTPLTEIGNNTTHQTLSLRAKAAKERIDLSELAKVFLTINKKRGYKSSRKASNEEEGVAIDGMSIAKELYDRNITAGQYVLEQLEQNKKYIPDFYRSDLKEEFGKIWNSQKAFYKDILTDALYIDLQDKGSAQTWAICKEPFNIVGIKLDGKTGEQRFQKYQLRVKALSEKISLEHLAIVLQEINKELNSSSGYLGKISDRSKELYFDKLTVGQYLYQQILQNPHTSLKNQVFYRQDYLDEFEEIWTIQSKFHKELTLPLKEKIRDIIIFYQRKLKSQKGLLDYCQFESWVQEYTDKTTGKTKKRTFGRKVISKSSPLFQEVKVWQNLNNLAFINEETNEQIIISELDNDVIEELFEELNIRGEQKPNDILNILKKYIKITKLSDWKCNFDKIEGNRTNQALYKAFHDIANNEGYGQDWAKRSAKDIKEELKIIFPEIGIDSAILEFDGTLPSPEFEKQASFQLWHLLYSAEEDFKISEEDKIIFGNNDVSLKKNLQEKFGFRPEHTKLIAAISFAQDYGNLSSKALRKILPELQNGYEYSEACKNVGYNHSKSFTKEDLEKRVLKDKLEILKKNSLRNPVVEKILNQTVNLVNQIIDEFGKPDEVRIELARELKKSAKERSEMTRGIAEGTRKNDDFRKLITKEFGIPNPTKNDVIRYKLYEELSANGYKSLFSNREIKREDIFSKKIDIEHIIPKALVFDDSFSNKTLAYREVNLEKDKSTAFDYISNYKNTELDDYVARVEALSKAGKISRAKRKKLLMAAEDIPSDFIERDLRNSQYIAKKAKEMLFEVFETVVSTSGSITSKLREDWDLINIMKELNFPKYKALGLIETETRYNKGTEKYVEREVIQDWTKRNDQRHHAMDALTVAFTKHNHIQYINNLNARYNTNHKMHARILNIQKGITDMVSSKNGSQKRRFTPPMKNFRTEAKKHIEAILISYKNKNKVVTKNINIYKTKEGVQRKPQLTPRGQLHKETIYGKIKRPEEKATKINARLDFDKAMMITNPTQKELVINHLKKFNNDPKKAFSGKELKSNPIIYKNKPLEEVICFEELYTIRKDINPDNFKTQKNIEKVI

SEQ ID NO: 8070 - protein, 1065 aa, unidentified
  REGION 1..1065: note = Description of Unknown: Cas Enzyme sequence
KEGEINDMGVRIIPMSADILGKFDAGQSHSQTAERTGYRGVRRLYQRDNLRRERLHRVLNILGFLPEHYAEHIDFKKRLGQFKDGKEINLNYKPNANGKYEFIFKSSYHEMLVEFKNSQPDLFYIKSNGKETKIPYDWTLYYLRKKALSQPLTKQELAWIILNFNQKRGYYQLRGEEIDDDKTKQFVQLKVREVIDSGEFVKGKPLFDVIFENGWKYDKQVVKTEDWIDRTKEFIVTTETLKNGDIKRTYKAVDSEKDWAAIKAKTEQDIERSNKTVGEFIYEALLDNPTQKIRGKLVKTIERKFYKEELKKILTKQIELQPQFFSTDLYEACIKELYPRNEAHQNAIKNRDFLYLIMDDIIFYQRPLKSQKSNISGCQFEHRIYLKTNKEAGKKEKVKQDVKAIPKSHPLFQEFRTWQWLQNLKVYNKVDTDKGELTDATKQLLPNEESWVDLYDFLQHKKELDQSQFIKYFIDKKLINKTEKDHYRWNYVEDKKYPFAETKAQFISRLTKVEGIDDINTFLDKKTQLGNKDNSPFVSRIEQLWHIIYSVSDINEYKSALEKFALKHNINKESFVDNFIKFPPFKSEYGSYSKKALNKLLPLMRRGKYWNENDISDIVKKRVSEIMERVNAINLKEGYSAKELAEALVDVSDDDVKKQLIKSFIPFKYKNPLKGLNTYQATYLVYGRHSEVGDIQNWKSPEDIDTYLKNFKQHSLRNPIVEQVVTETLRVVRDIWKHHGKSTPNFFSEIHVELGREMKNPAGKREQISKRNTENENTNHRIREVLKELMNDASIQGDVRDYSPSQQDLLKIYEEGVYQNPKVDYSKVSEDEIAKIRRSNSPTQKEIQRYRLWLEQGYISPYTGKSIPISKLFTHEYQIEHIIPQSRYFDNSLSNKIICESEVNEDKDNKTAFEYFKEKGGNVINGHKLLGLAEYEAHVNQYFKNNRQKLKNLLSEDIPEGFINRQLNDSRYISKLVKALLSNIVREEGEQEATSKNLIPVTGSVTSKLKNDWGLNDKWNELILPRFERLNQLTQTNDFTATNTNGNTIPTVPDELLKGFSKKRI

SEQ ID NO: 8071 - protein, 1044 aa, unidentified
  REGION 1..1044: note = Description of Unknown: Cas Enzyme sequence
YKWRSLALSEKIDLEQLAIVLQEINGNINSSSGYLGAISDRSKHLYFNKLTVGEYLYKQVKKNPHSSLKRQVFYRQDYLDEFEQVWETQAIHFPDILSDKLKNEVRDVIIFYQRKLKSQKGLVSFCQFENKKIEYFDESSGKTKTRTIGLKVTPKSSPLFQEFKIWQNLNNLVFQNEEKGEIIDFRELDDEIRKAVFDELNILGNQKPNNVLRTISKYMYIGKVSDWKCNFDEIEGNRTNQALYNVYQEIAKTEGYGFDWAKKSASEIDEELRSIFPLIGISPDILDFDANIEGDNFHKQPSYQLWHLIYSAEDDEKIDENDRMIYGNNSVALRKKLHEKYGFKPEYAIWLSNIKLQDDYGNLSSKAIRKIIPYLQAGHPYAKKDELDNDVGACGLAGYNHSNSETSEDLKNKVLKDKLSLLPKGGLRNPVVEKILNQMVNLVNQVIDEYGKPDEVRIELSRELKQSAEEREKMHKGIAEATNRNEEIKNIIQKEFGIPSPTKTDVYRYRLWDELKGRGYKTIFTDQYIPKEKLFSSEIDIEHIIPKALLYDNSYSNMTLAYKNENIKKSNRTAYDFISNDYQLSLNQYIGNVEAWYNNGKGNISKAKKNKLLMAMKDLPDGFIERDLKNTQYIARKAKTMLQEVVRVVTPTTGRITDRLRSDWGLTNMMKELNMPKYKALGLTEYEERLDIGTGKIKAVEVIKDWTKRNDHRHHAIDALTVAFTSHNHIQYINYLNARRDTEHKKHQIINSIENTVTEKLNGNRVFKEPILNFRAEAKKQVESILISYKAKNKVVTNNINKIKGKGKRNYKKVVQSTPRGQLHKETVYGKILRPMNKPMRLNVRFPLVKAPLIINEEERVRVLEHLAKYDNNPEKAFSSKVFKSDPILMNGDEPLKEVLCFEEVFTIRKPVAPDLKIEKVIDEKVRKILSDRLAEYGNDAKIAFSDLEENPIWQNREKGIAIKNVTITGVNNAISLHYKRDHLGRFIENDGMKIETDFVSTGNNHHIAIYQDKDGNFQEKVVSFYEAVERVNQGLPVIDKNFN

SEQ ID NO: 8072 - protein, 1091 aa, unidentified
  REGION 1..1091: note = Description of Unknown: Cas Enzyme sequence
LGREERIFGFDIGTTSIGWAVVDFDKDAGQGRIVEKDGVPGMGVRIFPEARDPDGTPLNQNRRQKRMMRRQLRRRKARRRALNEKLAAAGLLPPFSKDKDSAWSKVMGLDPYPLRVKGLSEPLSAHEFGRAIYHLSKLRHFKGRDLEDDDDFLDAGPDPAASEAPKRTQRTKKGDAAPDTAKEGGDVEKRLKDEIASTHKLLKARGLTLGQYLAGKHADARKGACPKERRREAHAHRVDVEEEFEKLWTAQAAHHRALDDAALKASVSDAIFSQRPVFWRKATLGKCRFIPDAALCPRGSWLSQQRRMLEKLNNLQIAGGNARPLDDEERAAILKDLQTQGSMTWGGVRKILKPILKRKDQPEAPKFNLELDEGGTLLGNPLEAKLSDIFGDDWEAHPHKQAIRDAVHERLWSADYGEVGSQRVVIRSSSDRRKRRAEAAQSFVNDFGATQEQAAKLRELKLPTGWEPFSTEALKKILVELLRGEPFGALVNAANDSKEMRTRAGVTYGEWRDENFPDREQATGEILDSLPSPAVKEEQDRIKTLRNPTVVRTQNELRKVVNNLIRVYGKPDLIRIELARDVGKSKREREDDLKRIRKNERERKKALAELQSKGIADPSRDDIEKWALWQECNQICPYSGLAIDFDGLFRDNVFQVEHIWPRAASLDNSFANKTLCHRDWNARKGKRTPFAAFGGNTDEWAAMKKRVWEQAEAKTMSKGKAKRFCREVPLPDDFATRQLNDTGYAARQAVAFLKRLWPDLGPTAPVNVQPVSGKVTAQLRKYWKLNNILSDDGEKTRADHRHHAVDALAVACAHPGVTNRLSRYLQQKDEPGAQRPNLPPPWPNIRHDAEAAVAKIIVSHRVRKKVSGPLHKETVYGDTGEEVRAGKITYRRFVTRKKVDALTKGELEEIRDPKVGGTVRDWVSAHGGDPKKAFSSYPKLGGGPEIRKVRLLTKQQIGMMAPVSTGYADLSVNHHMAIYRIAGEKSEFEVVSLFEAMRRMRAREPVVRKAAKGGAVFVMSLSPGDAVEWPEGDKKGIRIVQGVWAAGPIVTLDHKDAKGDSVWRPSPGSLLDANARKVSIDPIGRVRPARD

SEQ ID NO: 8073 - protein, 1242 aa, unidentified
  REGION 1..1242: note = Description of Unknown: Cas Enzyme sequence
MPTYLGLDIGSNSVGSAWVDTERRQIHLGVSVFPAGVDEQDDKRGPPKNQARRQTRSQRRTIHRRAERKRKLVRFLADHGFLPRDAGELQRLFDASPWVLRRKALREELSPHEFGRVLVHLAQRRGAVGVTSDPDDPDEGKVKEGMDRLDKLMRERTVGQLLADLSEERQRSNGSVTWNEPIRNRQYRMPPDQQLFAGRDLIRAEFRRMVEVQRSFRNSELCGKLTDELVQELDDPRQTDTWRHRGLLFGQRRTYWDTGTLGRCGLEPTERCAPIADRHASYFRVVETVNNIRIETRGQGERPLTVEERDKVIRLLRGPLGERKQKGKLVPKTSVSVTEVRHALGLGKKVKGDPVQLNIEADQDREINTDWFHREVVHAAFGEERWNSMPEPLRESVNRAILKFDPDQPDDEKRLREGARDWWTLDDAATDRLLAAWKRRPKLEKRLNLSRRAILNLVPYMEKFDAANNRWPTQIEARKAYATTLSDEHARRRYATGALGLTAADRYYMRQEKHQLKDDDGQVIRDENGRPLPEPPPAPMLSNPVVRKAIHEVRRHLLAWMRKFGRKPDRVVIEFARGVKDTAKRCNEQLAANRERDSERRLIEEDLRSWGIPESNWNRATLRVRLCREQKGICPFSLEGANANRIITERIAAEGGDVEIEHIVPEGLTGKTMAFNNLVLCFREANRGKGMRTPAGWLGPERLKAMLKRLENTPVKNNRIKWERLQAPTPDEEGFRNAQLTDTAYAARQVAAYIADALFEGQGLPERGGERRIFTTKGEYTARLRADWGLHESTIDRVHGLESSPTAEELAQDPHLQQSSRRARKEPKDRRDHRHHALDALVTATIGPELLTELGRMARQDREYRERTGHWPRRSPFPQPSAWETPEAFHEDVVAAFERLIVAHRPLKRRLVGAFHEDTLYGPVVAPLPPHRTEKPDTLFTNRISADRLTANHLRVPEGWDELSAKLDDGRVSAAEKRDVRRKLAAMEDPSPGKSGIVRDRALRDRIRKCLRANDVNPDDFSKADIKRLCDVNDWKLRMASGVPIKGVVLLRTNTDPIIIPRKQWDPAMGRMVPHMDPDDPSKPHPRTKRVYIGGNNHHVEIREDANGKWTARIISTFDAARRVRPPKNADGTRPEPQPAVDRSDNDDRTFVMSLAEGELIYARRKDRPAESPDYYVVCKLDKAGNSCRIHFAPHWDARKASEQDRWDVMPGDLKNCGPHPGEPPCKVRVGPLGDVTRLKRD

SEQ ID NO: 8074 - protein, 1410 aa, unidentified
  REGION 1..1410: note = Description of Unknown: Cas Enzyme sequence
MFSMVTMGLDIGSNSVGGAWWEVGGDRLTSSTSIFPAGVEESDEKRGDPKNAKRRSARRSRITLARRAQRKRNLRLTLIAKGLLPGQYECAACAQRNPAAGNGICCFRRLLECTDPWELRRRGLERALTPYEFGRVLLHLAQRRGAAGLDPDADDDGKMKEAIGNVHRDMIDRYGTEADKAKASKLREKIDTLGKKKRRSDDENAQLDAAHESLRELCRNLLRQNTVTFGRFIADLRDERRTPITTPDKRKEKRCPREWRQPVRNRRHCYEYCADRTMIRDEFAKLWEAQKTYGEPLADLLTDDLRRALDDESGDSTWRHKGLLFGQRRQSWDLGTLGRCDLHPEERCVPHADMHASRYLVVETVNNLRIIQRGRPERALTQEEREMIKEYLSKPLGAAKSGKRKGEAKRTVSVTDLRELMGWGRATKTTEYRFNIETDEDRVINTDWFSREIIHGAIGAERWNALPESAREGINRALLKFDPTDEAHPTKLKSLVMQGWAGLNETQADALVAAWKKRPKVQKRLSMSRRAIRNLLALMDRPEPWPDPNRPGQHRWLTQIEARKLIAEDADFKDQTSGQPLDEHTRRRYATGAKGATARDRHYMKKHLLTKNGQVIYGPDGLPLHEPPPAPMITNPVVRKAIHEVRRHLIEYMMTFGRKPDRVHIELSREARMGKKDADEALLRNRLRNRISRDILRVHNGESLTPTQQREALRRVVLCVQQGGRCPLCGNQVVKELITPHMAFNGQDCEIAHIIPAGAGGDNRWSNIVLAHTKCNQHMARQTPRQFWEKGAGFDAGITWVEHIYSEVERPRGSEIKSATGQVLWSCYFSRRDDKAKIEQFKKDIKDIQEMTARQDAATKYATRQVMAYLADALYDGKGLPERSTGSADDASRERRIFAVHKRWTGRLRREWGLFFDPHGFRKLGVNEAEKHLRQEKDRGDHRHHAIDAAAVALWSPELERAWDERDKRAEREGVNTADEEAMKEFYRRNPLPLPAPFKTREELREAVRRAVFGEPGEGKPICHRPVKRKLVGRLHKDTLFGPVLDRAGRLTDRFKARPLGGIVDLEPNHLRLPRPESKDEAIDRLSARRMADLGIDERAARKWARSVVNSAGWTPRVIDPTPGKSGLVRDVALRKRIRQCLAEATPSVDPDNFTAAELKRLVEAGAMKQASGVPINSFVLLRTMNDPVITSRGSHDHATGTRRLLYDAASKTGDPRAARVYDSQNNHHIEIRLATKKDGDDEWSGTVISGFEAAQRNLARQCAFRKAGIPTGRALRALSKDERAKLKPLLRQVEQAHPIVDRSDNADGRFVMSLCEGETLWMKHKQTGEVGYFVVAKLDKPNGIVLVPHWDARPATGRKNDEKKKVPDSERESFTVRPADLPKLAPPDRPHAIKVRVSPLGRVTESHGD

SEQ ID NO: 8075 - protein, 970 aa, unidentified
  REGION 1..970: note = Description of Unknown: Cas Enzyme sequence
MKQIMSPVAIDLGATKTGFVSATYVSGEEPELHHYHGSVITIASSDITLSQMMRRQKRHQRRGYARFRMLRRLVYVILKDYFKVPESKLSLQHRIQIQSLVTRRGFSYQSAEESFGEFPEELTLADIAPYFPDISFREGRNIREEIERIISDGAFDPATLINYNESLLDIFDKERAGTKAEIKKEKDLLIKGLNIIRSIGEELFKADESGVRHRSRFFDEIRFDFNTYKELNDLLVQYKVNQHEFINILCHLNNLPLKPLRKYFNNPAYRENDLWDNSRFHKFFYRWVRSWHTEKESTKHEHKKEILKSLKNPRKEKSDGIYAIEMMKRMDPVYTIPPYEDQNNRKPPLCNNLRLNAESLDRNFPGWKESTAKLFFLDPMFKVYIKNNKIEGDAEVNEVIGLHVDAHGGKHTGNNQKRKNTNNLESLTIASLLLQRFLDRSMALDPWYLRDQIKQKNRLKKGEILLKGEKVLKVSEAYRQMTEALSESGALQFIRLCERYYAESDLAKRGGWVYRVASDRKKEVPDSHNDESLLFKCMVKTGSRNNNKEKDCASIFGVIFQSNGVPGFQEFLNFWNTEKIGRGSLKRKCENIEKTRKKYKELFDARLKRELWLSHKDPDRKLNESSKELLAAHESATEAALAFGKFFSHTSEQMKRYNNPFSMAQVYNIIGVTRSGFSSVCKSCNAEDMWRSLSEINNGEVHARATKLTADTGRPFDGQIHFLLKRIAIEIAREKVKHLKQYGLSASDSVKSPVIIEQNSFSFRHQLSILKEKSKKEQNRYLEAMKGLDDEFIEKSDRIKAASAGICPYTGKKIGSFGEIDHIIPRALSRNMSGTVYDSEMNLIYCSNEGNQNKGETLYTLKDLHKNYLLKVFQTDDRDAIRKGIQTTVEKLSVSGNRIVFDMLQLQEQRDLRHALFDEELRTLVFENLIGARTGRVNGTQIYFSKLLKEELRNAFARHFADISIEVMDK

SEQ ID NO: 8076 - protein, 1337 aa, unidentified
  REGION 1..1337: note = Description of Unknown: Cas Enzyme sequence
MGTPTLSSDPNAKLELAFDVGHSSIGWAVLRPVAADVRRLTSTPAKESSQSLVTSAATGIELLGCGVVTFGADDCLASKRRDYRRQRRHARSTRQRIARMEKLLAALNVIPKAELERLHSQAKGHSKQNPHERKGASAPWLLAARVLAARTEEERKKAELDWPELWDVLRWYAHNRGYDGNIRWSGGFRVEAFSETPQVSVSALTEQVDKAKQNEDDPDEDWKKLESAAKRMADYGFTSPTFAEMVAKYLLGPDRTLKPAQPGKPAEVEPTKASFTEADLHKLLFHCEPGFEHHPRHLSNYFKGLRAAFPRRIIKDIDGKPTLVGGTEWEVRYILRAHFGTLTGCDARFEQVVCGGIPEAETDWLALGELLPALYLSDDQKRQLKALRIPKDAFAGDKPGRKREKERLRFLRTAITRDKLVVENRYSGGLLFGQLVPRFDNRIITRCPISGDKVPVKQSPEFLRYRWAMQLANIQVAASAQEKLRKLTADDRAALHKLMQAKGALTEGELKKAVRALPGVARDNLDTMLMHPDAKDALIFDPVQKLLASDELAPFWATLPANLQARFRGKLRHAKAITLADLRTALPDPKAFDVELQRQLDAQNTRKAKKQPAFSRDQFLAQSFDARKALARLSGRAPYARPLLQQAYEQVLAGKDPREEGGCLFRSEEIRQRELHKKLEDQTNNHLVRHRLLILERLLKDLVNAPEFAAGQPERVAQVTIEVNRDLREFSGMTRKAIEMDLGSRLKNFKSVSDKLEKAFDSQTYNGKPVQVTAGLIRKARIAEDLGWQCPYTGQSFEPVHLVSRAVDKDHVIPRSQRPSDSLESLVVTFSEVNKMKGQRTAWQFIQEFGGKPVEGMPNLMIRTPKQFEEFVTKLESFKGHEDDKRRKKRRKDLLLLPKFEDKGFVPRDLTLTSQLVRLGAQVIKRFFAGGARVNNPREAPTDSTARGFVNPRSGPRITSLPGAVTGAVRKGWRVLGCLAQAAPQILEPTGEPKSKTDIRDLTHLHHALDACVLALAAHYFPKDGSLWEAMIVRAPNAAQKQLLHATGFYEFIAEDKPNLKDLPIELKQQIANRLAEKRVVQHIPADMSGMKVEENTRGVVKVENGRATLRQQKRNAEGKLEVKETEEVVGKLVGLHPEPKREAHPSPALRAPSPLAGRGEREESNDAAAGSPPSPFAQRGERDGVRGAAQGKLTPMRGVRVITDNFGVAILDHASNPDDRFVIIPWHKVWHRIEALKEKNGGQPARVLRIGTLIRVPNKSGRSDYRGTWMIRGAQLNQNAGMLVDLSNPDVITYRVSGRKDCKQNVSLKSLVEGGLEILKPSLCGVAQTAQAMAPG

SEQ ID NO: 8077 - protein, 1045 aa, unidentified
  REGION 1..1045: note = Description of Unknown: Cas Enzyme sequence
VALPYRLGIDVGTNSLGWCVLDLGRDGHPCGIRRMGVRIFSDGRDPQKGTSLAVDRRLARQMRRRRDRFLARREGLMRALVRHGLMPADPQGRKALEALDPYCLRARGLDQPLTPHELGRALFHLNQRRGFLSNRKTERASQSEAEASGIKAAVAALERRIAESGARTLGEYLHRQFREGRPVRQRQSVRARLRGEGAKAAYDLYPSRAMYLAEFDALWDAQKAHRPGLADEARATIRRILFFQRPLKPVDPGKCALDPTDRRAPLALPSVQLFRMLSELANLRIVSPDQSQRPLTVEERDRVLAKLRPVATELKFEKIRRILELPADAAFNLESAKRSGLKGDATGRRLAGKDRFGPAWWTLPLERQDAIVETLLEEADDRRVVEIAQRDWGLDAQAAQAVADCPLPAGYGRLGRRALARMLPVMLRGVVRYDDAAREAGYHHSDHRTGEAFDALPYYGYVLDRYVGHSSGEADDPPERRYGRIANPTVHIGLNQLRKLLNALIARYGKPAQIVVELARELKQSQARREEAQKTQAENQRLNDLRRQKLAELGIADNGENRLKLRLWEELNPKEPHNRRCVYTGEMISLERLFGPEVEVEHILPFKRTLDNSPANKTVSMRYANRAKGNATPHEAFAASPAIGGSRYVWADILARAASMPRNKQWRFAADAMERFARDGDFVDRQLTDTQYLARVTRQYLACLYPGEESRVWVTPGRLTEMLRGKWGLNRLLSDHNLKNRSDHRHHAIDAFVVGVTDRAMLQRIAGAADQVRDRLIDDMPEPWEGFRDRLKDRLDRIVVSLRPDHGTAGRLHEETAYGIVRDPAAWGGATLVSRKPLAGLNANEIERIRDANLRERVKAHVEAARAAAPSWGALPLRNALLAFSAQTGVARVRLLKIEEKVIGIGRGSGASYKAYVPGDNHHIDIYELPNGKWAGEAVSTFHANQPGHVPAWRTKHPGAKLVMRVHKGDMLRLEHDGKARVMRVVRLEAKAQRFRLAEHHESGDLEGRHNAPNETDPFRWLFVSFNQLKTRKAKKIGIGILGAS

SEQ ID NO: 8078 - protein, 1203 aa, unidentified
  REGION 1..1203: note = Description of Unknown: Cas Enzyme sequence
RFANLGPFTGYRIGLDIGNGNIGWCILFEQDRLLQFLTAEDIAANNAKLPKGVTRTQLPNLADFVPLGTHKFQARKPGEKIEKSFSKIRAEVRAKERMLDARQRRRLHVRKAISEAGLLPENGICDGIGHEKCHSRISADKLRVKLLNPSFDASAHDLGRALYNLLKRRGWLKPIGRAGEDEGSTFGDKATQYYREALKAFGCETIGAFLDRCAQDAKRDGVHGFRKRHRSLAWQRENQKKQPKDLTKAKSYEVLQFLTPTFELVWEEALLLRARQQRTVPIRDDHWAKIEEAAEFRRSLKAKMPGRCRWFPDEFRCVRALPSYQRFRILEQVSHLRDPHNRVLNDASFGSAVALLEQSEKISVTHLAKELGQDRLRLESDEDKGKRTLVGAKTDIALKSVLGQSWMQLSLDERDAWTMRFLRRHVPMNGQEPRPWTSADEEDLRSDTEKLFGPDALTKVDNIASTSFEDNFASISLKAAKILADAYAKRLDHEQRLAALASAGAPEPELPLYERLPYYGAVMPDQTVPAIGFAPPERMCAEEREHGRAPNPDVHVVMNRVRAVINAIIDMMGGILPTTCVVEVARSALSEDEANAHRKRVMAREKFNQAIIQDIARVFEGLGKRLPRGPGLERLIECWKAAIRQGWRDYDGSRIERSMLIDPTVYQLDHVIPAAFGDFRENNLFVSKYNKIKGRKTPWEAFGNKQDFRPALTAFAEFGLSKRIELLEKALDPKRKLPTKKKAYLEERLKNAREELAELSKSETPRPDVLSALERTLTDKLESLLTCDDSAGDNNAEKGPRRPFDSGDQAALFCRFGPRAKAPEKEFAARDTANIGWSTKLTLRYLRHLGAEVEAIKPWAVHALRSMFGINKERGDLRNHAVDAFFIAHFDSRVLRPAFASLRGGPEWLYSTRLLDSALSHIDGGQGFLNGLERNLDCLDKTLPVIATAHRADNMWNPGDPVGGSFGALGGENIYSFRPTREEREKLTAILAGDGKSPVGHILTRTEILELLKSEPQDKKNRRLLKKLRDAVELRYLSREEKGTKRTLLKISTAMPLSDQPGAFIDVQSKFAIMGPTPNEGRLVVNVADFSAMSLAKRTALFRNARVVYRRGDMITSLGSPFVVTGLTADGRLIAYTADVAQRDKQQKHLLTVPSGIEGKDSNPKTSKPILNKLSIDVLGRRLHRLRKTPGGLAPMPYPLREQ

SEQ ID NO: 8079 - protein, 1064 aa, unidentified
  REGION 1..1064: note = Description of Unknown: Cas Enzyme sequence
MDIREDLTLGIDLGIGSCGWAVIRQNEQSGQILGWGIRTFDVPETDKKRTPTNQLRRGHRSARKVLRRRRQRMDAVRKLFKEAGLLDGNGKSALWVKRGDQLLNPWTLRAEALERKLSGPEFAVALGHIAKHRGFKSNSKRQSNDPASDDAKMLKEIERTTERLKSYRTIGEMFAKDEEFKRRKRNRDGDYSRSIKRDDQEKEVRILFARQRAAGNKHATEELEKKFVDIAFFQRPLADSEDKVGWCPFEPDERRAAKHSPSFEKFRFLSRLTALRIGDVALTAEEIARASTDFGTQNGMTFKRLRKILDLESRVRFEGVAKEDESKRDVVNRSSGNGCMKGTKALRDALGEAAWNSFRNAPEKLDRIAFVLTFREDKASIRKGLAEIVLEPLIVEALMHGVDRGDFSDFRGAGHVSAKVCRAAMPNLMRGLTYDRAMKEAGYEHAAPHGPERGDNLRDTLKKQIAWASERILNPVARKSLIEALKQVAAIVTEYGLTGHIHVELARDVGKSKEERDQIRRGIDERNKAKDKLRAEFRDQIGSEAREGSDDLLRYELWKEQLGRCLYCDGAIHPDQVVSSDNAVQVDHILPWGRSGDDSFVNKTLCHAGCNQEKKGDTPFEWFGTDEARWTRFTACIEGMKEMKGRKKRNYLLKDAKRLEETFRPRNLNDTRYATSLLLDTLARWYPDDVRVLARNAQEANKATQHWYEGDTIPRAKVRVASRPGPLTDRLRRAWGIQDLKKTLEPDGEKRKADDRHHALDALIVAATNQAALARLTLAVQEERRRGGHREFSRMNPPWPAFIDEVREKFPKLFVSRAERRRARGEAHAATIRQIVERDGEMVVFERRSVDALTEKDLARIKDASRNAKLVESIRAWIAAGKPKGTWPKSPKGDDVKKVSLRTNNKPDVLIREGAADRGEMVRVDVFRKCNRKGKWEFYLVPVYPHQVANAKEWPDPPNRAIQAYADETAWPEMGNSFEFCWSVYPLSFIELTKSDGEIIEGYSRNSSRSTGAFTVSPHHSLLESRPGIGARTLSGFRKFSIDRLGRKFPIERETRTWRGAVCT

SEQ ID NO: 8080 - protein, 915 aa, unidentified
  REGION 1..915: note = Description of Unknown: Cas Enzyme sequence
THLLPYLLRAKAAQELVPRYELGRALYHLAQRRGYLSNRQAEAKDDAEDDAEDDGIVNKGITELESKLAGRTLGQYFATLDPREERIRQRWTSRPMYLNEFARIWSVQADAHGLTEEDRQRVFKAIFFQRPLKSQKGLIGRCELEPKHRRAALAMLVAQEFRILQKVIDLRVRFPDGTTRPLTADERQTLIDALQQVGEMTSASARKLLGLNKKGITFSIEEWGEKNLPGNRTNAKLAAIFGRRWLQFTPEERDQIVLEVLHYQKPAALVRRAMKHWGLDRQAAEKLSETRLEAGYARHSLAALTKLNASMRTGMPYMTAVKEAYPARFQAGKPMKLLPPVVKALRDLRNPAVCRALSELRKVVNAIVRLYGKPEKIRLELARDLRRSRKDRKRIAEQQREQETRRRKALERMMREFPNYQAKAGFDPAIEKILLAEECNWECPFTGRKIEMATLLGKNAQFDVAHLFPRRYLDDSFLNKTLCYHDENRHRMHDLLPKQAYGGDPQRWAEIIARVKAFKGSAATLKLERFLAAEVPEDFVESQLNDTRHNSKVAAEYLGLLYGGLWDASGKRRIEAITGGITALLRNAWRLRKDRADHRHHALDAIVLALVDPAQVKSLQESAERASEGSARFRLGELDEPWPGFRDAVRSALEEINVSIRADRKVGGALHAATNYSKPVRAANGSAVHHVRKPLHKLSVTEIEGDAIVDPVVRAAVQQRFADLGGKDPQKSFSDKANHPTLTAKDGRSIPIHKVRVRVREKAKMIAKGTVRQRFVTAGANSNHHCVIVAVLDAAGKETKWEEHIVDRLEANKRRASAPPGGMIQRDWGPARRFKFSLMPNDMLEMADESGTRQLYRVANISKGDYELRLHTDARESKELRSLKQRIRVHAEDLRRGRARKVTVTPLGEIQPAGD

SEQ ID NO: 8081 - protein, 1142 aa, unidentified
  REGION 1..1142: note = Description of Unknown: Cas Enzyme sequence
MPNILGLYIDVNNIGWSLLDSKTLKIIDMGVRVFPVGCENYGSGKRELSKRAYKRTKRTARYRHQRNKIRKIKVLEILLENGLCPLDKKSLKQWKNEKIYPKDELLEWLRMNPYHLRKKAVMKPITPFEMGRIIYQISIHRGFPVSERNRGVKENVMYTGLPEKNKPGINQTQNQIINNTLGIYLNSLLPKEKESYKYTNERIRNRFLTREMFQSELESLWNYQSQFIKELTPALKLSLIGDMDQLPPVRGTVFYQRPLKSQKFRVGRCPYEPKKTKCCISSLHYQEVLAYRWANALKVNGSFLSEEDTQKAVRFFMTNKRFPFGKLKGLFSNPNGHYNLKDDEMIKGSFINATLSHPSLFGNSWFGFNPSKKEEIWHSLYFFDNEQKLKTHAMEKWGLNEIQANKFSSIQLDKNYAPISKKAASNLLFFLKRGISYNLSIILGGIKNCLGKQWDEIAETDIQFLINKLVGLYKEHKITGFIPKLKEFLEEHLEPKNFRFDKLYGITTSLEKKKVLNQFPIDKNSDRDIYQFKNPLLITAVFQLRKLVNEIIEKFGALDEVKGELSAQIKFNKYQRQLLRLDTNRRARLKEKYVKLLGERAENIIPLNLIKFELWEECKNTCPYTGAHIPLNELFTDAVQVVYIHPWHHSMNDSHWNKTLCVKSFSNNILDSSPYDYFKNHEPEKWELVIKRAARLFSNTKDFPSSYRKFKRFIKKHNFRNPLVQQMHDSNVLSREVKEFLSKVAPQVSIAPGQASIHFIEKWRLGQIVASENIKISQDNDFRYSAMLAYVNANRSEEYLKILSNENKYISSQKKIVFPIPYKGFRDDIEYCVHSILVSHKKVKNIVSSRMQKFKKGDQHFNNFCVSVRGSLHKESVFGKRLTPEDQLEAFHIRKPLNAITTLKQLDKIVDSNVRLAVLEAVARSGGFQGEKIPGIAFFGSDHQGFTTPKVFLPNKKGDPVPVKKVRIRESLTGVVQLKEGINQYVNLRNNHHVLVYLNQEQEYCEEVVSFWEVIRRNRFNEPLYQLPKEGSQFITSLKINDLYLLGLEEKNLRLEEESKSFLAKHLYRIQKLSSKFYEFRRVYDKNLNETESENYIRINNFGNRKTGWHTFNPIKVKINTIGTLELENELDYFLKMQRQYV

SEQ ID NO: 8082 - protein, 1402 aa, unidentified
  REGION 1..1402: note = Description of Unknown: Cas Enzyme sequence
MKIKNYNLALTPSTSAVGHVEVDDDLNILEPVHHQKAIGVAKFGEGETAEARRLARSARRTTKRRANRINHYFNEIMKPEIDKVDPLMFDRIKQAGLSPLDERKEFRTVIFDRPNVAGYYHKQFPTIWHLQKYLMITDEKADIRLIYWALHSLLKHRGHFFNTTPMSQFKPGKLNLKDDMLALDDYNDLEGLSFAVANSPEIEKVIKDRSMRKKEKIVELKKLIVNDVPDKDLAKRNNKIITQIVNAIMGNSFHLNFIFDMDLDKLTSKAWSFKLDDPELDTKFDAISGSMTDNQIGIFETLQKIYSAISLLDILNGSSNVVDAKIALYDKHKRDLNLYFKFLNTLPDEMVKTLKAGYTLYIGNRKKDLLAARKLLKVNVAKNFSQDDFYKLINKELKSIDKQGLQTRFSEKVGELVAQNNFLPVQRSSDNVFIPYQLNAITFNKILENQGKYYDFLVKPNPAKKDRKNAPYELSQLMQFTIPYYVGPLVTPEEQVKSGIPKTSRFAWMVRKDNGAITPWNFYDKVDIEATADKFIKRSIAKDSYLLSELVLPKHSLLYEKYEVFNELSNVSLDGKKLSGGVKQILFNEVFKKTNKVNTSRILKALAKHNIPGSKITGLSNPEEFTSSLQTYNAWKKYFPNQIDNFAYQQDLEKMIEWSTVFEDHKILAKKLDEIEWLDDDQKKFVANTRLRGWGRLSKRLLTGLKDNYGKSIMQRLETTKANFQQIVYKPEFREQIDKISQAAAKNQSLEDILANSYTSPSNRKAIRKTMSVVDEYIKLNHGKEPDKIFLMFQRSEQEKGKQTEARSKQLNRILSQLKADKSANKLFSKQLADEFSNAIKKSKYKLNDKQYFYFQQLGRDALTGEVIDYDELYKYTVLHIIPRSKLTDDSQNNKVLTKYKIVDGSVALKFGNSYSDALGMPIKAFWTELNRLKLIPKGKLLNLTTDFSTLNKYQRDGYIARQLVETQQIVKLLATIMQSRFKHTKIIEVRNSQVANIRYQFDYFRIKNLNEYYRGFDAYLAAVVGTYLYKVYPKARRLFVYGQYLKPKKTNQENQDIHLDSEKKSQGFNFLWNLLYGKQDQIFVNGTDVIAFNRKDLITKMNTVYNYKSQKISLVIDYHNGAMFKATLFPRNDRDTAKTRKLIPKKKDYDTDIYGGYTSNVDGYMMLAEITRSDGNKQYGFYGVPGRFVSELDTLKKTRYTEYEEKLKEIIKPELGVDLKKIKKIKILKNKVPFNQVIVDKGSKFFITSTSYRWNYRQLILSAESQQTLMDLVVDPDFSNHKARKDARKNADERLIKVYEEILYQVKNYMPMFVELHRCYEKLVDAQKTFKSLKISDKAIVLNQILILLHSNATSPVLEKLGYHTRFTLGKKHNLISENAVLVTQSITGLKENHVSIKQML

SEQ ID NO: 8083 - protein, 1374 aa, unidentified
  REGION 1..1374: note = Description of Unknown: Cas Enzyme sequence
MKRILGLDLGTTSIGWAIVDEAENKNEKSKIIKTGVRVVPLSTDEKNDFKKGNSITINADRTLKRGARRNKIRYQLRRKDLIKTLIQAGIINNQTILTETDKNSTHETYHIRAKAVTERIEKDELARVLLMINKKRGYKSSRKANNQEEGELIDGMEIAKKLYQQGKTPGQFSFELLKQQKKVLPDYYRSDLQAEFNKIWKHQKRYYSEILTQNHLDNLFQLNKNDTARYFKNQLNIERVQLKGKREDKKYQTYALRSKAVDSQIQLAEIAHILTELNNQINSTSGYLSEISDRSKHLYFNDLTVGQYQYENLNKNSHYSLKNEVFYRQDYEDEFEAIWKEQTKHHSELTDKLKQKMKDVIIFYQRRLKSQKGLISYCEFESWEQEVIIDGIEKKKIVGHRVIPKSSLLFQQFKTWQNINSLIVEHIKSGEKKELDEDTKKELFKVLNWTDKLTSTQTIKWLGYSTKEWKLNFPQIEGNRTNDAFLKIYEQILKDEGYDNIKFSKFNPEELKEAIKSCFEILEIEPDILDFNPLLPGNKFDKQSSYRLWHLLYSYEDDYSKTGNASLLKKLQENFGFKPKHAQLLANIAFQDDYGNLSSRAIRKIFPFLQDGLKYSEACEMAGYNHSSSITKEGNKNRVLDDRLEILKKNSLRNPVVEKILNQMINVVNAIIEDESLGRPDEIRVELARELKNSAEQRKSLTQYIRKTTKEHERYREIIKKEFGLKYVSRNALIRYKLYKELEPNGYKTLYSNTYISPGDLFSKKFDIEHIIPKARLFDDSFSNKTLEARTDNINKGNETALDYVKRKYDIEAYKSRIEELFKSNKISYTKREKLLMSLKDIPEDFLARDLGTTAYIAKKSAQILFKITKKVTLTTGKITDMLRNDWGLIRVMQELNWDKYEKAGLTYYQTNKEGKKLPRIQDWTKRNDHRHHAMDAITVAFTKPAYIQYLNNLNARSKKGSIIQKIEDKYIFRDQNGKRRFIAPFEDIRVQAKKHLSSVLISHKAKNKVTTQNRNKIKTKGKYKTQIIETPRGQLHKETIYGKSRHYVTKQEKVGGKFDYDKIQQVANKKYREALLKRLKEFDGKPKKAFLGKNSLKKNPIYLNGTQETMPEKVKLVWLEDQFTIRKPIDKDLHIDKVVDVGIRKILEKRLAEFNGKKNDAFSNLDENPIWLNKEKGIAIKRVAITGVANAEPLHDAKDHFGKELKTAEGNSIPVDYVSTGNNHHVVIYRDQKGNLQEEVVSFYEAVVRKNAGQPIIRKNHPKDWEFLFTMKQNEMFVFPFEEFNPQEIDLLNPENKTLISPHLFRVQSISVKKYGNSIIRDFQFRHHLETQIINKKEMKGYIFNRIKSLPPLLDIIKVRLNHLGEIVQVGEY

SEQ ID NO: 8084 - protein, 1077 aa, unidentified
  REGION 1..1077: note = Description of Unknown: Cas Enzyme sequence
VKKKYSIGLDIGVASVGWAAMDEDYQIMKANGRYAMGTREFESAQTAESRRLQRGTRRRYNRRIKRIQLLQETLAPLFEDDEGFFIKSEETEKHYWRNHNQFENNSLSEILNSLNMNKHSYPTMYHLRHDLIQKSEKAPARLIYLALHNLVKFRGHFLNEGMNWAKDDGNSTLREKLEQYFELLSNEEHEMRTLSDSEYTEIIQLLEDPRMTKSDKYKTIGKVVGKAFEESIKLLVGAKSVVAKIFPMSDQLEEYKIDNLKIDLTDEKLEEVYEKLTDDEQQIVDKANIIFQDIMLQDILGRHQYVAAAKVNSYEQFAKDLKQLKEVYNHNLGEDLYRKTFITPKSKLTEYKETQKIEHLCLFDKFLKSFKQEEVFYKEIKKQLENIKESSNKSQALIQEILNRLETRQFLRKLKGSQNSAIPHQNNVYEAEQILKQQQTHYPEITDEMIEHVKAIISFRIPYYVGPLIKGDEENPRFGWAIRNKNTHIKPWNFDEVIDKANSAEAFITKMTSQCTYLLEETVLPKNSLIYEKYEVLNELNGIQIRPETEKPNKKYRLNQEQKEWIIENVFKKRKSVTLKQLKRDLEKSEEFKHLAMEGEIFGTQKEDRFATNLSTYQKMTEIFGEITEENESMIEEIIYWITVFEDKDILKIKIEEKYPNLSREQRKSLTSLVLTGWGRLSKRLLDEIPALPDGQDTILDVMTHEMLNFNEVLAVEKYDLKERITKLNSKQQEQSTKIKYADIKALHGSPAIKRGIWQAVQIVEELTDIFGEPENIMIEFAREEGKKTRTKSRKNLINEISKKIEKEDKELKEFLKEASKESESKFNTLRYYLYVTQGGKCLYSGERLEFAQLSDYEIDHILPRSFVKDDSLDNLALVKTKYNQDKRDEKMPLSVISNAAKYEQKKEWSRLRDYNLISSSKFNRLIKPEFTAQDKEGFFARQIVETRQITKHVRDLLQERFDETNIYNVNANLVSNLRSATNTTKIRDLNNKHHAVDAVLAIFPIQFIIQKYGGNLLEFNFKYQEAREKWTKMLTQSGKNFFLFDAIAKYDKFVHFQTGELLNGLEYLEMINDEMP

SEQ ID NO: 8085 - protein, 1059 aa, unidentified
  REGION 1..1059: note = Description of Unknown: Cas Enzyme sequence
MNKVLGLDIGISSVGWGILDQDTGQILDAGVRLFEEAERNANEDRRSFRGSRRLKRRRTHRLNRSKDLFKKYKLPLSGIGKVDPYKARYNAIYGEISKEELTAGLYHLVKMRGTTIDSPIEEKENNNELSTKQQLAKNKKLLVDQFVCEIQLKRKERGNIRGHQNRFRTDDYLKEANAILNRQSSVHEEISDKFIEEFLKLVKTRREYFEGPGSKKSPTPYGSFFINEQGEIEEKSMIDKMRGKCTYFPNELRIAKMSITADLFNLLSGDLNKLQLDGEYLTYEDKEYLVENLIKKGKNITLNQILKYKVLPNDTDVSGYRVDIKSDKALFTEFKGYKEIKKIIEQNNLPKEILEDIDLMDNITEILTAERAYHRREEKLSQIFTDYENQTAKQMIDAFKESTVFKGYHSLSKKVMNLVMNDLWHTNQNQMELFSALGLEEKRLEHIKNKSKITFDDTAILSTVAKRAHRETIKIVNAVRKKYGEMDSIVIETAREKNSKDKRDNYRKFQRQIGKFEKEMAKVLGVNNLGDLKLNGKQHLALKLLKQQNWQSIYSGKAITAHDVVNNRYSFEIDHIIPVSLSFDDSQSNKVVCLHGENQDKGQRTPFEYFQTEKKPRSFDEFKAEVMNLYKGRSINRKKKDYLLEMRDVRNNDEIQKEFINRNLVDTQYAMRSFSMNLRSFFKVNDIDTTVISIRGSFTAALRRRARLNKDRDESYAHHAIDALIVAAIGKMSIFDFFNRFNMNELGVVFDKETGEILSEEEMFNKRFITLLRGLHNYESKIKYSHKVDRKANRAISNQTIYSTREIDGEKYTVGKYKDIYSLNKNQVKPLLKKLNNKPGDFFIAKHNPDLMELVLKIVGDYKNEPNPFTAYYQEHGYILKDGKVPLKTLKYYDMKLGVHLDISQNYKNTRNSIVLRTIRSVRIDLYKNTEGKYKYLGLPYHWFKRSGNRYILDMEKYEQEKAQPYKDIDDSYEFQLSLYKNDLFSFVKSDQLLFRVYRGDYSPRQNKVEVDFIHKKKSNRKDGVITPSTISDVTKYNVDILGNTHKVTKENFKNYLQL

SEQ ID NO: 8086 - protein, 1342 aa, unidentified
  REGION 1..1342: note = Description of Unknown: Cas Enzyme sequence
QGKTAIGSHLFEAGKSAADRRLFRTTHRRIKRKRWRLKLLEEFFDPYMAEVDPYFFARLKESGLSPLDKRKNVSSIVFPTSAEDKKFYDDYPTIYHLRYKLMTEDEKFDLREVYLAIHHIIKYRGNFLYNTSVKDFKASKIDVKSSIEKLNELYENLGLDLNVEFNISNTAEIEKIIKDKQIFKRDKVKKIAELFAIKTDNKEQSKRIKDISKQVANAVLGYKTRFDTIALKEVSKDELSDWNFKLSDIDADSKFEALMGNLDENEQAILLTIKELFNEVTLNGIVEDGNTLSESMIKKYNDHCDDLKLLKEVIDNHIDQKKAKKLALAYDLYVNNRHGQLLQAKKKLGKIKPGSKEDFYKVVNKNLDDSQASREIKKKIELDSFMPKQRTNANGVIPYQLHQLELDKIIENQSKYYPFLKEINPVSSHLKEAPYKLDELIRFRVPYYVGPLISPNESTKDIQTKKNQNFAWMIRKEEGQITPWNFDQKVDRIESANKFIKRMTTKDTYLFGEDVLPANSLLYQKFMVLNELNNIRINGKRISVDLKQEIYENLFKKHTTVTVKKLENYLKENHNLVKVEIKGLADEKKFNSGLTTYNRFKNLNIFDNQIDDLKYRNDFEKIIEWSTIFEDKSIYKEKLRSIDWLNEKQINALSNIRLQGWGRLSKKLLAQLHDHNGQTIIEQLWDSQNNFMQIVTQADFKDAIAKANQNLLVATSVEDILNDAYTSPANKKAIRQVIKVVDDIVKAASGRVPKQIAIEFTRDADENPKRSQTRGSKLQKVYKDLSTELASKAIAEELNEAIKDKKLVQDKYYLYFMQLGRDAYTGKPINIDEIQKYDIDHILPQSFIKDDALDNRVLVSKAVNNDKSDNVPVKLFGNEMAGNLGITIRKMWEEWKNIGLISKTKYNNLLTDPDHINKYESAGFIRRQLVETSQIIKLVSTILQSRYPNTEIITVKAKYNHYLREKFNLYKSREVNDYHHAIDAYLSAICGNLLYPNYPNLRPFFVYGQYKKFSSDPDKEKEIFNKTRKFSFISQLLKNKSENSKEIAEKLKRAYQFKYMLVSRETETRDQEMFKMTVYPRFSNDTVKTPRNLIPKKMGMSPDIYGGYTNNSDAYMVIVRIDKKKGTEYKILGVPTRELVNLKKAEKEDHYESYLKEILAPRILYNKNGKRDKKITSFEIVKSKIPYKQVIQDGDKKFMLGSSTYVYNAKQLTLSTESMKAITNNFDKDSDENDALIRAYDEILDKVDKYLPLFDINKFREKLHSGREKFIKLSLEDKKDTVLKVLEGLHDNAVMTKIPEIGLSTPLGFMQFSNGVLLSENARLIYQSPTGLFKKSVKISDL

SEQ ID NO: 8087 - protein, 1350 aa, unidentified
  REGION 1..1350: note = Description of Unknown: Cas Enzyme sequence
VVMKTKYSIGLDIGVSSVGWACLTPEFRIPKHNGRYAIGVREFESANTAEERRIQRGTRRRYNRRIKRIQLLQQTLNPLFQNDPNFIMKIDANERHFWRNNNQFENRSLSEVLTSLNENPKKYPTIFHLRKALLKSEQKFDPRLIYIALHNLVKYRGHFLNENMGWINTKENETTFEMLNEYFTLLEQVGYGNNQQDQTITENKLLEIVEIIKNKELTNSDKRTTIKKITGKEYHDPISLIVGLKSDMNKLFSNSDNANSYKEEKLKISFTDEDITEVYEKLTDDEQVIVDQANKIFQHVLLNDLLDGHQCVAEAKVTSYDQFKEDLMILKDIYNQHLGEKAYRDMFITPRTNQTKYKNTKDIKLLCTFDRFLKVHKEEDAFYKELKKVFDSIIKSSESTKDNITKVQNALERLNKNVFLQKQKSYLNAAIPHQSNEYEAKTILKNQQKYYPEITDDMIDKVSQIISFRIPYYIGPLLKEATDNDFGWVVRKNTSEHALPWTIDEVIDRSQSAEKFINRMTSYCAYLTNEKVLPKHSLSYQLFEVLNELNGIQIRPEYELPDKKYRLDYEEKQWIIKNVFQKYKNVTHKVLLRELQNSPYKELVLDNQTDNLNNVFGTQKEDRFASSLSSYISLNNIFPNIDQGNEDMIEELIYWITVFEDKDIIKLKIKEKYGNISNKQIELLVQLPFVGWGRLSHKLINELPADINKNLTILDIMKQKPVVFMEVLGTEKYQLNERLTKINFKDNQSFTKIRYKDIAELQGSPAIKKGIWQAILVIEDLVEIFGEPEHIMIEFARDEGIKERTEDRKKQINNLQKAISKDEKELKAFLKEHSRYNEDEYNDQRLYLYITQEGKCLYTGEALNVSRLQDYDIDHILPRNFVKDDSFDNLALVTSKANQAKAGTKMPLEILNDKDKFYQKIQWKKLLDNKLISQSKYFKLMKESFSDQDKESFFARQLVETRQITKHVKDLLNDRFEHTEIHPVNANIVTNLRKHSNITKIRNLNNKHHAIDAAIAALVVQFVINKYGNNFLNFNFKYQEAQKKWKEMMTKYKKNFFLFGDIDKHDKFTHFSTGELLSGREFLNALNNDIPWQTTKKIGSSESAFYKETLFSPKVKQAKYTSNKTSKGVYDEMKTESTYLISYKEVNTKGKDLVKNDFVDLYVIEKYQLGHANSKELAHFLASKVAKGNVTDAIVHTKIEKYQRVLYDNHDFYYISSNEMHNAKQLILQANILNDLTAINKSKQNVDIKYLQSTFKNIASQVIDEFNNFLPDSKINTLEDFYETITDYDGFVHAVSELFKTTSASAARSKLFGYRYTKKLDASELFFIHDSITGLRYRKPKSYKHELWSK

SEQ ID NO: 8088 - protein, 1128 aa, unidentified
  REGION 1..1128: note = Description of Unknown: Cas Enzyme sequence
MLRPAPTGAGFFINYIRKVPYTLSTSIAYRVGIDVGSYSLGLAAIEIDDENRPIRILSAMSLIHDSGLDPDKQKEAVTRLASSGVARRTRRLYRRRRHRVIRLEKFLNQQGWKTLPFEEYKDPYFPWKARVALVNGYITDESERGEMLSAALRHIANHRGWRNPYKKTTTLYNPGAPSDSFESIRKELEEKVGRKIPESATVAQVIAFADWGNDRLRGGGKQADKDKEKAGLADEIKHAVISARLQQSDHAREINEICRVQKIDDTLRKQIIDLVFEAESPKGAQLGRVGKDPLQPKEDRALKASDAFQRYRIAALIGNLRIRTDQKDSAPLTAEQRTLLFDYLVNLDHKKEPTWLDVAELLQIDRGELLGTATLTNDGERAGARPPVHDTNRTILGSKVKPLAAWWTQANDDERAAMLKSLSNAEADDFDSEAGAQVQAFFASIDEKEQEKLDSLHLPIGRAAYSEDTLVRLTNRMQRENVDLHRALRLEFDIPENWAPPAPAIAEKVGNPAVDRVLKGVSRWLEAAAREWGKPESVVIEHVRDGFISESKARQIDRDNNSRAKRNHELFKSMQENLKIEGKLRSSDLWRYQSVQRQNGQCAYCGSGITYSSCEMDHIVPRAGEGSTNTRANLIAVCHRCNLAKGKTPFAVWAKQTTIPGVSLKDALGRTKFWLQDAKLNKREFEAFRNEVCQRLKRTAVDEPIDNRSIESVAWMANELRARVAQRFADHDTKVSVYRGELTAEARNAAGITKKLKFIDGYGKSRLDRRHHAVDAAVIAFTTPYVAETLAIRSNLRRSAYLTNGTDQWKEFTGRGADRQAAWRSWLPRMQQLASLLQKALDEDRIVVTSNLRLRLGNGRAHEDTIGKLSRIKVGAEMSTKLIDRAASEALWCALTREPDFDPKAGLPANPDRRIRIHGTWYDADDEIEFFPVSAGCIKVRGGYAELSRFHHARIYRINSGKKPVYSMLRVYNADLAKYRNEDLFTVELKPQTMSVRQSEDKLRKALAEGNAEYLGWIVTDDELLIDPTKFTSGQIGTFQQEISTVSRWRMDGFYSNSKLRLRPLQMSAEGLGDDVSADSRKVLDRPGWLPAINVLLSSGNFTVVRRDSLGRARLQSTAGLPISWKVD

SEQ ID NO: 8089 - protein, 1351 aa, unidentified
  REGION 1..1351: note = Description of Unknown: Cas Enzyme sequence
MKKKFDDYYVGLDIGTNSVGWAVTNKNYKVLNFNKKSMWGVRMFDAANTAEERRAFRTNRRRLMRRKYRLELLENIFEDELTKIDASFLVNMSEGSLHKEDKSTNNKHTLFNDEDYTDDNYHQKYPTIYHLRNDLIINPKKHDIREVYLAIHHIMKYRGHFLFDGELKSDNNIDEAFQLLNDSTMNLYGDRIFELNQENLEELKLILKDSNLTIRDRNNKIKKLLNPEIDKDTKKIFNKISSLIGGSKLSNIIDVFPDLEIEEKLAIDFKSNSIDEDLDALTILDFDQMQLIEHAKAIYDWGLLEEILDGQKYISIAKVKSYEQHAEELAELKNMVKKGASTEIYNDFFHNKNNKANYAAYVGNGETKTASTDDFYKAVKKLLNSIKGFEKEKTNILSKIETDHYLPKQRVGSNGVIPHQLHLLELESIIENAKEYLPFLSEMDESGLSNAEKIVKIFKFRIPYYIGPLNPYHKEENERQGTAWIIRKKEGKVLPWNFEDMIDVTASAEKFITRMTNQCSYLLGEDVLPKHSMLYQKYMVLNEINNLKLDGQDISIKLKQHMFEDLFVKQYRNITKKQITKWLMDNNYISRDEKIVITGIDDQIKSKLTTLHDMKQIFGDKLPDTETLDTIVYWITLFSDSKDILEEKIKKSYGDIISEQEIKRIRNKNYGGWGRFSRKLLEGIGDNNFFTEPTSIIQALYSTNYNFMELLTDQFEYSKKIEQFNQKKIHIPEKLDYSIVDEYSLPPSVKRPVWQTLRIMDELVSITKKAPKKIFVEMARGGGQAGRRTQSRKNQLIELYKNIKEDSDLLGQLENTDETRLRSKKLYLYYTQRGRCMYSGETISISQLYDENIYDLDHIYPRSVTKDDSMNNMVLVKKSLNQRKGNTYPIEDALRIPSQVYALWGSLRDQGLISNRKYERLIRKEPLTDAEKADFIARQLVETRQSTKAIANIFKQLYPETKIVFVKAGLVSDFRNEQKNVDKETGELKNPEYRDFIKLRMINDFHHAKDAYLNIVVGNVYHTKFTSNPLNYIKKINNYSYNLGRMYDSTVERSNEIAWLPGIDGTIKQVNRMMKRHDILTTWMITDGKGGLFDQTIMPKGKGQVPIKKGRDIEKYGGYNKASIAYYVVVEHNRGKNSIRTIESIPVYIVDQIKTDEDLTQYLVEEMKLHNPIIINNHISARNALFEYDGIKGRITGKSGQQYLVRNEIQLVLPDEYNSTLKEIEKYLSPHNSLSIDKFNINSELLIDIFNELTLKANSQLYKEKLRNFSDILNNSSEKLGEMSNEEIVTVLIEIIKLFKATRETSNLKLIGGSGKSGTLYLGRNISNRNSFYLINQSITGLFENRVDLLK

SEQ ID NO: 8090 - protein, 1320 aa, unidentified
  REGION 1..1320: note = Description of Unknown: Cas Enzyme sequence
VVSTMQEDSYYIGLDIGTNSVGWAVTNTELDLVKAKKQNFWGSRKFESGKTAEDRRLYRGTRRRLNRRKNRIKLLQSFFEEEINKVDLHFFNKMKDSWVSPEDEIKLKGANFVFDKNQQKEKELYYSKFPTIWHLREYLIDTPDAKVDIRLVYLAIHHIMKYRGNFLYTDSEFKDTGSAIEDDLHIFLDYIEQKYEVAVIHDEFIEITKSTLLDTTKTTAEKKDFLGKKLNKYLPIKKQITQFINAILGYKANFHVIFDYEEQNVSDYIKNGMEDEKFEDLKSYLGPDEDVLDSLAQIYSWSILRKLLPDEKNQFISREMVKQYEEYGIDLKELKELFSEYSENKNRFFKSIEEKNNYYQYNLSKKEVSLEDLYKTIDKLLPSSDNLKEDNRYKRYLKRKEDLSFLKVQNTTDKGAIPYQLHLFELKKIIENQAKFYPFLEKDKEKIISILTFRIPYYVGPLNKSSDFSWIERTDEKIFPWNFDDVVDREASEEKFIHSMVGNCTYLTEEKALPLESLIYQEYILLNEINTIRINNHHLDVKTKKDAIEQLFKTNKTVTVRKFQNWLDKYFGENNTYEITGLSDKNKFNGSLSSWVDFTKINFDLTNPNEYKIAEDIILWATIFSDKQTLRNRIKRKYPFLTEKQLHSVSQLRFKGWGRLSKKLLSELKFTLPNTQEITIIERMRVTNDNFMQIINNKEENFAQQLEEVMIESNEADSVLNQIQEIPGSPAIKKGIHQSILLINEIIEIMGQKPKKIFLEFAREDQEKKETTSRYNRLKDIYKQLEKENSSYINLATDHYLGELKNNQKLLDNERVFLYFMQNGKCLYSGREIDWNHLDSSEYEVDHIIPRSYTKDNSFSNKALVFRTENQRKKDDLLLDESIIEANKTFWKFLRKKELISEKKYYNLTRTDITLRAQKEFINRQLVETRQISRHVKNLLINLYPETKIQTIKAQFASDYRRDKKLYKLRSLNDYHHAHDAYLAIFLGEFIDHRIPWINNFDPLQRKQYDKQIKDIYRDKQTFNKKNKYGILELINKDSEKINWNATEQNLKVEKYLNYKDCFITYKPEERTGEFYNQLAIKAKDKSKKYPLKAGLDTTIYGGYTGQRNAYFSLVEVENKIKPIPIPVQVSNQINNKVLSIEEYIKEIEPDGKVVRNRVLVNTIFEYNGHPFLARSASERGNAKQLLIPKQLHKLIYSAEKGFNYERKIMDFENYLNVLVNKLTKEFVHLANSQGFIKLVEENYNSLLELENDDIDHFINESLNYFQANTQNPNFKIKSINDLKNKSRFGRMGNPIKNWKDQTVIIDQSITGYYESRMNL

SEQ ID NO: 8091 - protein, 1245 aa, unidentified
  REGION 1..1245: note = Description of Unknown: Cas Enzyme sequence
MKNYSIGLDIGTNSVGWAVMSDDLKLIRKRMKINGNTKKKHIKKNFWGVRLFDAGETAEARRLKRTTRRRYTRRRQRIKYLQDMFQLEMDQVDPNFFHRLNDSFYVEDDKTYSKYPIFGSVEEEVKYHKDYPTIYHLRKSLADSKEKEDLRLIYLALAHIIKFRGHFLIEGELNSENTSISRAFSEFLDIYNETFSKGIEYLEADEEIVEEFLHDNVSRTRKFERVLQLFSGEKSNGLFAQYLKLIVGNLGNFKKPFNLEEDAKLQFSKETFEEDLEQLIGVVDESYLDVFLAAKNVYDSIELAGIISDSHIPTRAKLSNKMIEFYEEHENDLATLKKFIREKAPSLYYDLFNDSNKNGYAGYIDGSTTQGDFYKYVKSKLNKVDGSAYFIDKIDRELFLRKQRSFYNGVIPHQIHLHELRAIIQKQSHFYPFLSELEEKIVELFKFKIPYYVGPLARGNSEFAWLTRKNNEKITPWNFDEVIDRDTSAINFIERMTNYDTYLPTEKVLPKRSLLYQKYMIFNELTKVTYTDDRGTTHNFSGHEKLDIFNSLFKANNRVTSKKLIEFLRNSYHIESAQLKGIEDSFNASYSTYRDLRKIEGMSKLLDTPDNDDMFEDIVKILTVFEDRKMRKTQLNKYNDVLSDKQINQLSRKHYTGWGRLSAKLINGIRDIETNKTILDYLIEDDGPKRNINRNFMQLINDELLSFKPKISEAQAVDQNEQLADVVSELPGSPAIKKGILQSLKIVNEIVEIMGYQPDSIVVEMARENQTTSQGRNQSIPRYTRLEKAIKELGSKILSEEPTNNQEIQKERLYLYYLQNGKDMYTNRDLDLHNLSNYDIDHIIPQSITTDNSINNKVLVSSAGNRGHKADDVPSEDVVKKMKTFWESLHKAGLMSERKFQNLTKAERGGLSENEKARFLNRQLVETRQITKHVANILDSHFNTEQDDQGKTIRDVKIITLKSSLTSQLRKEFGIHKVRSINDYHHAHDAYLNTVVANKLLKVYPQLAPEFVYGDYPHYDSFKENRATARKQKMTNIMKFFASEDIRVSEEGEVVWDVQRDIRTIKNTLSSKQINIVKKTEVQSGGFSKESIQPRGDSDKLIARKNNWDPVKYGGFNSPVIAYSVAITHEKGKKAKVTKALVGISIMEQKRFERDSISFLEEKGYINPNVLMKLPKYTLYEFENGRRRMIASASEAQKANQMVLSNHLVELLYHAERYDEINFPKSFKYVNENVEKFAEVLKEVE

SEQ ID NO: 8092 - protein, 1346 aa, unidentified
  REGION 1..1346: note = Description of Unknown: Cas Enzyme sequence
VNKQEYFLGLDLGTGSVGWCVTDTDYQILKRNRKPAIGSVLFSTADTAKGRRTVRCARRRLRRQQERIRCLQELFAEEIEKVDEGFFHRLAESPYVREDKRNADGTTPTLPCALFVDQDYTDKDYHRQYPTIYHLRKELMDHVSAHDIRLVYLAIAHILKHRGHFLSNIDVNGQGESFEELMLQFLNTWNSFFDLEIFLQTDEMENLKAVLLDPGITKTEKKAQIVALMQTKEKQVKELAALLVGASVSLDKLFDQEAYKNLEESKLQFDSASYEEKEGYYQEALGDFFELIARAKAVYNWCALSRILKNNPHGRISDAKVADYEKHKKDLQLLKKVLKEKFPPEVRKKILNESQKGLANYPAYIGMTRHNGRKEVIEGHCSREDFYKLLDKEVLKNLEDCEEKAYIQQQITLGQFLPKQKGSDNSVIPYQIHEKELKQILKNAEEYLPFLKEKDESGFTVSEKILQLLTFRIPFYVGPLNNAHQKEGYAWVVRREKGKVYPWNFEQKVDLEKSAEEFILRATNKCTYLKKEEVLPAGSLLFEKYKVLNELNTVKIQGVRLTVSIKQKVYEDLFCHHQRVTRKRLVQYLKKEGYYEDIGPEDISGIDQDFQSSMRSLLAFKQIHFDTHVSDSVMEDMIRDITLFGADQKLLKKRLLTKYPAYEKQIPAIVKTVKCDGWAPFSRKLLEGLAVETKEGEPIGTILYYLWNEQLNFNEILFQPQYGFQRLIQQENDDLTEKTDGIRYELVENLFVSPSVRRQIWMALKVIDEVQSFMGGAPKRVFVEMAREKQESKRTSDRKSQILQLYAYTKVNKELLEELKGCTNEELRKDKLFFYFMQMGRSAYTGDPIPFSALSDNSLYDIDHIYPRSLTADDSLDNRVLVEAKYNREKKQDKYPIDKKVRDRMAGIWRMWHEKKYISDEKYYRLTRATELTQDELCGFVNRQLVETRQSTKALTELLHQLMPDKTEIVYVKARHVVNFRHRFDLLKVRDLNDFHHGQDAYLNIVVGNIFHLKFTKDVRKYFQEKGTQRTYNLYKMFDYDVEFQGEKAWVSGQTIHTVKTMIASSKVLTARQTYEEKGELYDLQRMKKGKGQVPLKESGRISDIEKYGGYNKATNTYFMLVKAEDKKGKSGTWLLPVPLYLKNRIEDYNEYAKEYFEQEYQLKQVEILRKVKMQTLFIYQGFKMRLAGRSGSQLVFHNANQLILPRKYHQTIRQISKHMLELQKDKRALLPDNQLLKESDMDELYLELCRKLKDSIYQVMLGRFLDTYESGYRRYQELSIEKKAEALYQMLKLFQCTPEMPNLTLIGGNAKPGPIRIGMNVTDRSSLAIVHQSVTGIYEQIERII

SEQ ID NO: 8093 - protein, 1342 aa, unidentified
  REGION 1..1342: note = Description of Unknown: Cas Enzyme sequence
MEDMERYHIGLDIGTSSIGWAVIGDDFKIKRKKGKNLIGTRLFNEGATAAERRGFRTQRRRLNRRKWRLKLLEEIFDPYMAEVDEYFFARLKSSNLSPKDSNKKYLGSLLFPDKSDSNFYDKYPTIYHLRRDLMEKDEKFDLREIYLAIHHIVKYRGNFLEKVPAKNYKNSGASIGFLLEEVNSLYKDIIGDESIAILNSEKFEDVEKIILDEETRNLDKQKSVGKLLVEDKKKKNIVTAFSKAIFGYKFNIEDLLLIENDEKNKLTFNDENIDDIFNELSHSLDDKQMDLLTKTREIYFKFKLNMIVPTGYTLSESMIEKYEMHKAHLKMYKEFINTLNTKDRKILKNAYSDYINTEKAKAANAQENFYKTVKKIIKDNNSDTAKKIIVLIDEGNFMPKQRTGENGVIPHQLHQIELDIIIENQAKYYPWLAEANPVEKNRKFAKYKLDELVTFRVPYYVGPLIDKTESNKNEKETKFAWMVRKAKGTITPWNFENLVDRTESANRFIKRMTSKDTYIIGEDVLPASSLLYEKFKVLNELNNIKVNEKKLDIEQKQDIYLNLFTTAKNVTKKSLATYLNCSADSISGLSDGEKFNSSLSSYIDLKAILGNIVDDCNKNEDLEKIIEYSTVFEDGNIYKEKLSEISWLTDEQIEKLSNIHFKGWGRLSKKLLTQITNENGERIIDALWNTSNNFMQIINDESIQAKLAEINGKYAGKSDLEDILSEAYTSPQNKKAIRQVMKVVEDIEKAMQCEPTSISIEFTRKKQKSRLTNTRYKKISDVYEKIADEVISEYELRKLQSELDSNANNMRDRYYLYFMQLGRDMYTGEKINIDELHQRYDIDHILPQSFIKDDSINNRVLTRKDVNNKEKSDKTAADLYAVEMSDFWRKLRKQGLITEQKYKNLLTKSDSIDKYAKKGFIKRQLVETSQVVKLVANILQDKYSDTKIIEVIAKLNSNLREEYKLIKNRAVNDYHHAIDGYLTTFIGQYLYKTYPKLRSYFVYNDFKKLDSNYLKHMKKFNFLWQLQDDKTIDIYDNVNNKFVLNVPEMKKYIQKIYNYKYMLVSKEVTTKNGAFYDQTKYNAKTVNLIPIKKNKPTNIYGGYKGKVSSYMMLVKIRKKKEVIYKFVGVPRLWTDELDRLKDTTERKILLNEIAKNSLSKTEQDFEVILDKVYYGQLIIDGNQKYTLGSSEYKYNAMQLHLSKHALEVLAKENVKDAEITDKDLVSVYEEILSVVNKYFELYDINKFRQKLNEGLEIFRKLPVYNVYESNKIKQVGKFEVLNRILMGLHANAMITDLKVLGIKTKLGQMQVNGGIKLSPDAKLIYQSPTGIFSRAVRVKDLG

SEQ ID NO: 8094 - protein, 1028 aa, unidentified
  REGION 1..1028: note = Description of Unknown: Cas Enzyme sequence
MGVRIFPEADVSNNDGRRTMRGTRRLLRRRAHRLERIKYLLKEYDIVQNVDSISYEDMVTPYHIRVKGLSKKLSKNDLAIALLHIGKRRGIHNVDAVEDDKGQDNELSTKQQITKNQKALKESFVCEVQLKRLNNKETGEKVRGHENRFRTEDYVKEARKLLSTQGQFHPEIDEEFIEKYIELIEVRRTYDEGPGFGSEYGWDQDVKKWYEQMMGKCSYYPDELRSVREAYSAQLFNLLNDLNNLILNRPEHDKVTQQEKEALVNNVFKKYKNVTLKRIAKVLNVAEHDIKGFRVNASGTPIFTKLTIYHDVKKITNNETIIENADILDAIAERATIYQTPQDIAEELKTLNLPLTQNELNNLSMLNYAQTHALSLKLIKQVLPDLWSTTKNQMQLFTEMGLKPKTVKLSGKRYIPYNHIDEWILSPVVKRSFKQSIRVVNAVIKKYGIPGEIVIELAREKNSQDKKTFLNKLNKQNAALNRQVKEKLESKNISSTKGLFNKLRLWHLQDGECLYSMTAIPLENLMNRPDDYEIDHIIPRSVSFDDSMNNKVLVKKEENQKKGNLTPFQYMRSSRTNVSYHDFKVHILQLSKSREKMSKKKMNYLLEERDINKFDVQKDFINRNLVDTRYATREILTLLTAFFNENNKDVKVKSINGSFTDSLRKLWRFKKDREIDFKHHAEDALIVAMAGYIFEHKKEFAAQNIILTEDKVVDSQTGEILNESTFKATFTDKYDKVQSIKNYKDFKYSHKVDMKPNRQLMNDTIYSTRIKDDKEYIIEKYKDIYNKDEDRLVKKVMKEPEKLLMYHHDPKTFESLKQIIERYADAKNPLYKHYEETGEYLRKYSRKGNGPIVKSIKYYGNQLKEHADISHKFSPKDKRVVNLSIKPYRMDVFLEEGIYKFVTVRYNDLIEEKDGLKVNMGVYNEKLKAKNISNIKNFEFSLYKNQILEINDDEYRLIGVNHDSGNRIEVNNITNDYKTYANMEKIKTKRLYKTISKNTVKSLNKISTDVLGNRYINRNEKLKLFYAK

SEQ ID NO: 8095 - protein, 1277 aa, unidentified
  REGION 1..1277: note = Description of Unknown: Cas Enzyme sequence
MTKQDYFIGLDIGTNSVGWAVTDEKYNIKKAKGKTMWGIRLFEDANTAEERRIFRASRRRHKRKKERIKILQSYLEEEIFKLDETFFIRLNDSKFYEEDKKYKQPNTLFNDENYKDRDYHREFPTVYHLRKALIENDKKYDLRLIYLALAHILNNRGHFLFEGQDLSKTDSFKVIYENLSLLAFDELQIELNCKNIEKVEEILKDREISTSEKNKFIVKYFENPNTQVKEIIKAITGMKFSFEKLFNDTSLKELENDGAKFSEGNYEDKEDEIRAELGERFLLIEELKAIYDWSILEEILQGEKYLSFAKVESYEKHKKDLKLLKKAIRKYFGKEKYYEIFRDENKKDNYVSYIKDNFTNNKKINAKNSCTQEEFCKFIKKALKDIDSKDSDISYIVNECELNTFMPKQRNSDNSVIPNQVHKMEMDKILKNAEKYYPFLKEKDENNLSISEKILKILTFRIPYYVGPLNGYHSDKGGNSWVVKKTEEKIYPWNFEKVVDIEESANRFIRRMTNKCTYLFMEDVVPKDSILYSKFSVLNEINNIRLNGDLISVELKQEIYKNVFLKRKNISKKQIENYLISTGHMTKSDILTGIDINLGSSMKSLIDIRDILGEKINDTEMVENIILWISLYKDDRRLLKNKIKKEYKDRLSDKEINKLSKLNYSGWGRFSKKFLLDIEGVNLDTGEILNIIDALWETNNNLMELLSGKFNYLEKINKINKIDLKDEKLDYDLLDNLYISPSVKRGLWQTLKIVKEIIKIQGKNPKRIFIEVARGTDGKGRTTSRKKQLLDLYKACKKDSNTWIDTELTIKEIDKLEDANLRSKKLYLYYTQMGRCMYSGEIIEIDKLFTNNYDIDHIIPRSLTKDDSILNNLVLVKRKENADKEDIYPLKREIQSKNKKLWAYLNKKKFINEIKFNRLMRTEKLTADEKAGFIARQLVETRQSSKAAADILKRVCKDSEIVYVKARHVSDFRHDFNLLKCREINDYHHAKDAYLNIVVGNVYHIKFTKDPRNFMKNSKYREYNLKTLFDNKYNVERNGEIAWDKDNSIKIVKKHMNKNNILYTRQSFEKRGEFFDQQIMPKGKGQYPIKTKDNRLLNIEKYGGYNKVKGAYMVLVEHREKKKLVRTLEFVPIYLADKIEKDENLLEDYLTNNLKLKEINIIRRKVLMHSLLEIDGFKAHVTGRTDKRILLANAIQLCIDSEKEIYIRNLIKFKQRFENSKLKIDEIKVRKGEDINREKNIELYDEFIYKLTKTIYEKKLSYMGNTLIENRDKFIDL

SEQ ID NO: 8096 - protein, 1144 aa, unidentified
  REGION 1..1144: note = Description of Unknown: Cas Enzyme sequence
NYFKKQMGIERVQLKGSKNDKDYQTYALRSRAPSKKIELDEIAHILTEINNQINRTSGYLSEISDRSKKLYFNGLTVGQYQWKELQDNPHHSLKNEVFYRQDYDKEFEAIWKEQSKHYPELTDKLKRKIKETIIFYQRRLKSQKGLIAYCEFESWKQDVVINGKKKRKTVGKRVIPKSSPLFQQFKVWQNINSLRVVNIKTREEKEPDDDAKKELFQELNWRDKITKAQTLKWLGYSSKEYKINFDHLEGNRTNASLLDVYKKIVLDEGYDNIKFTKDDPEQFAEDIQNCFEVIGIHPNILEFDPLLKGNEFDKQFSYRLWHLLYSYEDDYSKTGNASLLQKLEENFGFKQKHAQLLANITFQDDYGNLSSRAIRKIFPFLQDGLIYSEACKMAGYNHSSSITTEGNENRVLDDRLEVLKKNSLRNPVVEKILNQMINVVNAIIENDALGRPDEIRIELARELKNSAEQRKSITQYITKATKEHEKYREIIKKEFGLKYVSRNDLAKYKLYKELELNGYKTLYSNSYINPGDLFSKKFDIEHIIPKARLFDDSFSNKTLEVRTDNIDKGNETAFDYVKRKYDIEVYKNRVEELFKSGKISYSKRTKLLMSLKDIPEDFLARDIGVTAYIAKKSAEILFQITKKVTLTTGKITNALREDWGLIRVMQELNWDKYEKAGLTYYQINKEGKKLPRIQDWTKRNDHRHHAMDAITVAFTKPAYIQYLNNLHARSKKGGVIQKIEDKYIFRDQNGKRKFIAPFEDIRIQAKKHLSSILISHKAKNKVTTKNRNKIKANGKYKTQTVETPRGQLHKETIYGKSQHYVTKQEKVGGKFDYDKIQQVANKVYREALLKRLEEFDDNPKKAFLGKNSIKKNPIYLNDTQETVPEKVKLSWLEDQFTIRKPIDKDLRIDKVVDVGIRKVLQKRLDEYEGKRNDAFSNLNENPIWLNKEKGIAIKRVTITGVANAEPLHDAKDHFGKELKSAKGNPIPVDYVSTGNNHHVAIYRDQKGNLQEEVVSFYKAVARKNADQPIIRRTHPKGWEFLFTMKQNEMFIFPSEDFNPQEVDLLNPENKMLISPHLFRVQKISAKNYMFTHHLETKAITGDDLKNRKELASKIYYFIQSEKHLKGIVKVRLNHLGEIVQIGEY

SEQ ID NO: 8097 - protein, 1010 aa, unidentified
  REGION 1..1010: note = Description of Unknown: Cas Enzyme sequence
QKKYRQVFITSREDWRAYRETKDAKLLCAFDQFIHEKNKFEENFYKAIKADIEKALKNESDELKVNELNEVINRLARSQFLLKQKTYFNASIPHQNNVYEAEIILKNQQAFYPELTDEMIEKMKKIINFRIPYYVGPLVKNKKQSEFGWLVRKKDDVPILPWNIDEVIDRSASAEKFIKRMTNNCMYLLNETVLPKHSLLYEKFEVLNELNGIQIRSTLEKRNSKYRLTKDEKEWILNNVFLKRKNVSTKFLKDSLVKSDTYKSLIIDHDEETLKEIYGTQQEKSFSTSLSSHIDMLKIFGDINEENYDMIEELIYWITVFEDKNIIIQKINEKYPEIKEKQINQLLRLNYNGWGRISKKLLNELPTKDNETIIDTMLNNPLVFMEVLSDDRFNLNERIAKRNKTTEEKKTKITYNDIADLQGSPALKKSIWQAAQVVEELVSIFGEPENIMIEFAREDSDKRRTQNRKKQIEDIQKALLKDEKPLKDFLKEQLKNEQTKFQQRRYYLYVTQQGKCLYSGESLDLNRLHEYEIDHIFPRNFVPDDSIDNLALVTTEMNDKKSGEKMPLEIINESERHVRKMHWKKLHDNKLISDKKYSRLMKNGFSDQDKESFFARQLVETRQITKHVRDILQERFEQTEIHTVNANIVSNMRKHSEVLKMRELNNKHHAVDAFMAALVIQFIMKKYGKNFLTFNFKYQEARKKWREMLVKFKDKFFLFGEIDTYDKFVNPETGELLNGRQYFQYINYEIDWQSTKKIGTEESAFYKQTLYSPKVNIPRYDSQKAIHGVYKEMKNDSTYLISYKEVNKKGQETLKSTFVDLYVIEKYQMKKYSEKERAIFLAQKDSKHEVVDAVIHTNIQKYQLIENDGYPLYFISESEKHNAKQLILSVKTMKKLQHVLAHSKEVTLDELQDLFQMISEEVVIAFDGFLPDKNKETIQGFPEEITDYETFMSGLNELFKTTSASAARSTKFGYRFLRKLNPSEVKFIHQSVTGLRSRRPRSYRHELWKL

SEQ ID NO: 8098 - protein, 1015 aa, unidentified
  REGION 1..1015: note = Description of Unknown: Cas Enzyme sequence
MTHRRYSIGLDIGVSSVGWACMTQDFRIPKYNGRYAIGVREFEVAQTAEARRIQRGTRRRYNRRIRRIQLLQQVLNPLFQDDPGYFIRNDEQEKHFWRNSNQFDNNSLSETLKYLGMNTRTYPTIYHLRKSLITQNKKTHPRLIYIALHNLVKFRGHFLNENLSWTSNSNTNSSKKLVKEFFEELLNHFYETEHISEKDFEDIVKLLENKDLTNADKRTEILRILGREFRQPVSLFLGLRANISLMFPNSENINAYKEEKLGLSFSKDDVEETINKLTDEEGNVVEKAYVIYQHILLKDLLGESNYVSEAKVKEYDQFGEDLKTLKKIYNDHLGEQAYRDMFITSRKNWSEYNKTRKQNLLCTFDQFLRIHKTEDNFFRDIKRNLESLIKKKSLKNKEVKPVQTVINKINEGNFLQKQRSHLNAAIPHQNNVYEAETILKNQQLYYPEITDEMIERVKQIISFRIPYYMGPLIKDNQNAKFGWASRKSDDRVKPWTVNEVIDRSQSAENFINRMTSFCSYLKNEKVLPKNSLIYQKFELLNELNGIQIRSSNETPNRKYRLDQKVKNWIIENVFMKYKNVTHRRLKTELKKSPYKDIILDENTDRLKEIHGTQKEDRFGTSLSSFIDMNRIFGDIKTVDQKMLEEIIYWISVFEEKDIIELKIKENYPHITTSQIRSLTNLSYTGWGRLSKKLLNELPADKQNHLTIIEVMKEEALVFMEVLSIEKYNLEDRILEMNKKDNDKFGRIIYQDIEELHGSPALKKGIWQAILLIEELVDIFGEPEHIMIEFAREDGEKRRSVTRKKRINDLQRAVQKDEIELKEFLKNHSSYDEPKYRDNRLYLYITQQGKCLYSGEPLNISRLQDYEIDHILPRNFVKDDSFDNLALVKQHMNQVKGSDKMPLEVIKSSQRQKQRMFWKRLYDNKLISQTKYFRLMKESFTDQDKESFFARQLVETRQITRHIKDLLEERFCTTEIHPVNANIVTNLRRHSRAIKIRELNNKHHAVDAAMANLIVQ

SEQ ID NO: 8099 - protein, 906 aa, unidentified
  REGION 1..906: note = Description of Unknown: Cas Enzyme sequence
MIKKDYNIGLDIGATSVGFAGIDEQYNPIKLKGKTVVGVNLFEEGKTAAERRGFRNTRRRLNRRKWRLSLLEEFFDPYITPVDPTFFARLKESNLSPKDNNKNFSGSLLFPDITDQKFYEKYLTIYHLRYALMTENKKFDLRAIFLAIHHMIKYRGNFLNSTPVAHFDTSKINFASDFNELNSLYLNEDSNNIFEINLQNVKEISDILMDHSIKKLEKQKQVAKLLLTSQNDKELDKINKQVATQISKAILGYNFSLNEILKIETEDKSKWKMDFSSADIDDRLTNLISELDESQESILNIILSLYSRLTLNGIVPSGMSLSEAMLDKYDTHKEHLDLLKKYVKTLPIKNRKEIAEVYAEYVGNSSKKTGHISQEEFYKVVKKNLDKSETAQKILGLISEEKFMPKQRTNQNGVIPYQLHQKELDQIIVNQSQYYPWLAELNPVKEHKDAKYKLDEFIAFRVPYYVGPLIDPKTTPQTEQGNKNALFAWMVRKENGRITPWNFDKKVDRISSANNFIKRMTTKDTYLIGEDVLPAHSLIYERFKVLNELNMIRVNGHKLDVSVKQNIYNDLFKQHKTVTKKRLINYLQSNLQMPERPQITGLSDPEKFNSQLSSYIDLQKILGSEIVDDANKQDDLEKIIEWSTVFEDSRIYKVKLQEIEWLTEKQKNELVSHRYQGWGRLSKKLLVELKDKNGRSIIDLLWNSQRTFMEIQSRPEFAEQIANENQDKLTEDNYEDVLDAAYTSPQNKKAIRQVIKVVDDIVKAAGKAPRFISLEFARSDERSDRVKSRKTQIQKIYETTAKELLKDDQLIKELGSVSDLSDRLYLYFTQLGRDMYTGKPINIDEISTMYDIDHILPQAFLKDDSLDNRVLVRRQDNNAKSDTVPALKFGKMKPFWNKLQKHGLIS

SEQ ID NO: 8100 - protein, 982 aa, unidentified
  REGION 1..982: note = Description of Unknown: Cas Enzyme sequence
MNTKYNVGLTVSPTSVGYSAVGDDLKLVRLQKVGGKNAYGLRKFQEGESTEDTRMARIARRNNRRKVGRVKWLGKVLEPEINKVDPLMFDRIKQSGLSTLDDSKKFRSQIFDRPAVTAYYQRKFPTIFHVEKYLMETDDKADIRLIYMALHSLLTHRGHFNNTTPLSQFKPGKVDIESTLESLDDLFELSDFDLNIVNSKDIEKIILDRHTFKKDKAKEILKKLVIPVEDKKIAKRNDNIAKQLINAFLGSSIKFDKLFLQDLDREEAKEWSFSLDDPDVENKIQNISSKLTTNQQLITAKLQEVFASIALADILKGYTNLPDVEIASYKKHKKDLNLYRKFIDLIDKGEGKTLKDAYNLYINNSHYNLVPAKKRWGNNIPRDAESFYKVVSKIVDAVKNDRVDPDDDKSAFKYNEQIRHYADVILDQIDKKNFLPKQRTTNNVYIPWQLNALTYNKILENQGKYYPVLVEKNPCKHDVREAPYKLSQLMQFTIPYYVGPLITEEEENEENLPQRDRFGWMIRKEKGEITPWNFYDKVDVVETANHFIQRAIAKDTYLLSYPVLPKNSMIYQKYMVYDELSNISINDSKLKGSLKQWIYENVFKKHTTVTKKTLIKELEDNNRYNRIVKVTGFSDIKHPKFNSTLSTYNSWKKVFGHIIDEPSYQNDLEKMIEWSTVFEDRKILAVKLNEIEWLNDEQKKFVIGQRLTGWGRLSKKLLLGLKDHKGKSILRNLMTTKKNFMQVINDPVYQNQIEEIACNVTKNETLDSILDRSYTSPSNRKAIRQTIKVVDDLVELNNGAVPDKIMLRFQRSEAQKKELSISQTQWLRKKYSEVQSSKSQLYRDALSNELKNTVKDHSALTDKEYLYFQQLGRDAFSGEVIELNKLRSYRIVHIIPRSKLIDNSNNNLVLTKYNGVKDSAIKEYGNNMISSLKMSVKELWNSWNKLGLISKGKLNMLETDLNTINQYQADGFVARQLVETNQ

SEQ ID NO: 8101 - protein, 1022 aa, unidentified
  REGION 1..1022: note = Description of Unknown: Cas Enzyme sequence
VPRILSLDLGSASLGWALIDASAKSITDAGVRIFPEGVDRDQQGGELSKSKQRRVARGMRRQIARRARRKKILRAALVQAGLYPSDPKEQDKWHSINPYPLRARAVHERLESFEIGRVLIHLNQRRGFLANRKTDRTTKKEQSEMLKEISDLGQRIAEHGGTLGSLLAQDVARPGEPAAPSHRVRGQHTHRQMLLSEFDAIWDKQRGFHPSLLTDRLKYGARGAGAYPADPIHRGKRSPLEAFGLHGIMFFQRPMYWPREAVGFCELLPSKRRCPRADRLAQRCRIYQEVNNLRLIEGASERDLAADERAKLVDYLMAARERTFDEIKKHLGFAFPEQVRFNLERAASGDDISVGRSKVKGMETDAILSNKNLFGKAWHQREEAEKDAIVRVLLDPALSEKTLFETATTRWGLTAAQAERLVGLELPQGYAKFSRDALARLEPHLRCGLPLMRNDPAAGTTPDDAIHAAGFLRPDERSVKPLDQLPDPPDLPNPLVRQALFELRCVVNALIGKYGKPDAIHIELAREVKGSLEKRRRTRLEQFAQEKRREAAAQAIRDLKLGVHPNRANINRYLLWQEQREVCIYTGRTIPPEKLFGGDIDIDHILPYPRSLDNSLANKVVCYRYANNQEKRDQTPYEWLAERDPQRYEQVLQAAKKLRHFGKHARFLRKNVELKEFIERQLVDTSYIGRAAVQYVRQLGVDVLGTKGQYTADLRWLWGLDTVLRHDELPVKNREDHRHHALDAIVIAFTDRKLLQKVAELRRTGEDIPPPWPSFREHVEAVISKVNVSHRVQRGVRGALHEETIYGPTEQQHVYVKRYDLAALTPDMVTRIRDDVVRQKVIERLQAHGIAIGRGGAGIPASVWQEPLWMNGRKGIPIKKVRVCKPEESVVGIRPGADGEPSAYVKPGSLHHLCIFEFPNGKKRRREAIFTSMLEAARRRRAREPLVRRVHPTRPDARFIVSLSRGEAVIGPKGGDQLMIFNTAASTQGQIYFHHHTDARPANKKQKFVVTANSMSRDARKV

SEQ ID NO: 8102 - protein, 1098 aa, unidentified
  REGION 1..1098: note = Description of Unknown: Cas Enzyme sequence
MTPKAMDGGANGLAAGSRSRGEFTGLGGVRLDGAGKPEGILAMGSRIFSDGRDPKSGASLAVDRRAARAMRRRRDRFKQRQAALIKYLIRDGLFSADQAQRQQLAIEDPYALRARALDEKLSLPELGRALFHLNQRRGFQSNRKADRKAGDDAGKIAIGVDRLVEKMQERDARTLGEFLHMRRQDAENANHIPSVRTRLRPETGEGAKGDGYDFYPSRKLIADEFEQIWAAQADYHPDALTPEVHRRLHEIIFHQRPLKAPPVGQCTLVPGETRLPKAHPLFQKRRLLEEINALAIVRAGEVAQRLTPEQRDTLYLALKTRAKMTFAAMRKQLKLDPADRFNKESENRTELKGDEVAAEMGAKTRFGTRWPHLSVEAQWGVVERLMALETDRDETAFQDWLRQTHNLSEEGANAVLGARLPDGHGRFGPTATTTLIDSLLHDRTEDGRVVVYSEAVQRSGLGHHSDFRRDDSDAATDALPYYGIALERHIMPGTAEPTDPDEMRIGRLTNPTVHIGLNQLRHVVNRLIRAYGPPAEIAVELARELKLNDEEKKRRNRENTDNRLAAEGRSRKLSEIGQRDTGANRALLKLWEELNPGNVLDRRCIYTGEQISIDMLFSDRVEVDHILPFAETLDDSNGNKLLCLREANREKRRRSPYEAWGHTDRWPGIAERASRLPKAKRWRFEPDAMQRFTQDGGFLARHLVDTQYLGRLAREYLTWLYPGRGEGTGHVWVSPGRLTEMVRRKLGLNDLLPDHNFGGGADQPKNRLDHRHHAIDAAVVAIVDRGMLNAIARASGQDGSEGRERIHIPAPWEKFRDDLRAAVNRIIVSHRADHGTVSKAGLRAGRDQTAGRLHNETAYGLTGETDAKGNSIVVRRVPLSSIKKPADIARVRDPMLRDALAEFTQGLDGKAFDARIARFGELGPLLYRGIHRVRVTEPLAVIPIRDGQGRAYKGYKGGSNYRYDVWELPDGKWVPQVTSMFEAHQPGTIDRPHPAARKVLSLHQSDVLAIERTPNERQLMVVTQFWQNGQVRLIAHNEAGKLDDRHKNPDDPYTNFSPTCGGLKKLRARQVRIDQLGRVLDPGFPARKSVRPTRTEAA

SEQ ID NO: 8103 - protein, 1349 aa, unidentified
  REGION 1..1349: note = Description of Unknown: Cas Enzyme sequence
MKKILGLDLGTTSIGWAYIHEAENNNETSSIINSGVRIVPLTSDEESDFKKGNSISINADRTLKRGVRRSLQRFKQRRNALLETLSKNQFINSDFVYAETGKSTTFSSYQLRAKAAAEAVSKEELVQVLLMLNKKRGYKSSRKAKTAEEGEAIDGMKIAKEIFENNLTPGQWVYRSLLKGNRFIPDFYRSDLYKEMNAIVRFQNKFYPELINNKLLEDIQGKTRTQTSQHFSKTLNIELAENKGTREEVKFQHYNWRNEALSKELDLKILAFIITEINNQINQSSGYLGAISDRSKELYFNAETVGQFLFKQLEKNRHAKLKNQVFYRQDYLDEFERIWETQKQFNPELTDLLKTEVRDITIFYQRKLKSQKHLVSFCEFEKSHKAVPKSSPLFQEFRIWQNLNNIVVKNEVTKEPYILDEDLKKIIAQQLSFKDSMTDAQILAICGLKKGSHTVNFKKIEGNRTNSEIYKAFEKILVLEGYDDLDFSKLNPKEIYKIINSAFVDLEINTAILDFDAAIQGNDFDKQPYYQFWHLLYSAEEDDKLKDKLKSKFGFKENHLPFLLNINLQTDYGSLSAKAVKKILPHLKDGHFYDKACTLVGYNHSSSLTKEQNNDRVLKDTLELLKKNSLRNPVVEKILNQMINVINAILNNPELGKPDEIRVELARELKNNNEQRSEMTRAISKSTAEHDQIRKLLHKEFGIQRVTRNDIIRYKLWKECDGISLYTGKPIPPSLLFTKDYDIEHIIPRSRLFDDSFSNKTICERKLNIDKSNKTAYSYLQEKLSAEEFEQFEKRVKSLFGKISRTKQNKLLLSDHEIPEGFIERQLRETQYIAKKAKEILLEISRNVTSTIGSITDKLREDWELVDVMKDLNWNKYDKLGLTYIEEGKNGERLYKIKDWTKRNDHRHHAMDAITVAFTKPAYIQYLNNLNAKTQGDKKADSIYGIEAKYLKRDKNNKLRFIEPMPNFREEVKKHLEGIIVSHKAKNKVVTKNKNITKKQGGTNEKIQLTPRGQLHNETVYGKMHQYTTKEEKVGSTFTAEHISKVAKKQYREALLKRLQENDNDPKKAFTGKNALSKAPIYINEEENITVPEKVKMVWLEADYTIRKDISPDLKVEKVIDSGLKKILEKRLAEFGGDPKKAFINLDENPIWQNKDKGIALKRVTIKGVSNALALHTKKDHFGKEILDENGKPIPADFISTGNNHHAAIYKDDKGNLHEEVVSFYDAVVRSNLGLSVINKNHELGWDFQYSLKKNELFIFPSESFNPQEIDLLDPQNYHLISPNIYRVQKFGELGSSGFWFRHHLETTLDNSKTLKSITYKEIYSHKGLEGIVKVRINHLGKIVQIGEY

SEQ ID NO: 8104 - protein, 909 aa, unidentified
  REGION 1..909: note = Description of Unknown: Cas Enzyme sequence
MTPATTIWAFDLGKGSLGEAVRDLQTDQFLHTTTLLLPADLAQRGPARQAGTPASRYRAWKVRHAHRERERWLATVWRATGLTPLQTREVWQNPSTGRWELKHPADYRLEREFAPTLGEKTRDGAPSDEAGANLCYTSCLLRIKLLRWKPGDPPLEKWQVYKALRSAMQKRGYGRVPWAVKEARARGKTPEELEAEEQKQLEQADPRYREAAGKWPDFKRAVPAEFHFPCYYDALYMGLWSPDQPGHLRLRPDHRAASTRNVRFDRADVRKELIALGNNAAAMLPQLQQAFERWQHDGWKFLHPVTGQEVTYPVRARTFGEFLCDGPAGQPDETSFEAFLNQRREGGIRIGTFEEWMAALGQKTPKFDNRILAPCVLIPRYHACKVDARLEKDRAGRLTGKLVPDSLLASEVTLLLKLKNLLVADADKGQRKLTVEEIRDIFAFAQRRLRTLPLLNPKGEPVKEWPKKVANCFAITPSDWPKLAAETECLKGLARLTVSDNGTSRPLTSEEAEALLHAVAGGRRAAQTALPAHLLPLLKRAADTWRQAKQAAEGNVLRPLPGHEEVNAPRTSGRSAYSRVALRILKELILSGDAPSAFHARLVRREPVLLQRLGPAPDKPLAIFDDSTASNEAQRKQADAENRKRGLLVSELSFLRQMRKDDGSPDSWENLFIPAQTLEALQQRHTENGRLDADAAVRELLGTIKDPVVRHRLGVFDERLRKLRFGDAREGLPGFGVPEAIVLEFVREDFMGEEAKRRLRSFQRQREAERKRAREETAEAGATEKSAPLKYELLTAQGGLCLYCGQALTLKKLEQYAIDHIVPVGAQGSDALFNKVLAHQECNAAKGKQTPFEWLHGTPGWDAYVARVKARAATLRNKKVQLLTREDAPELVERYTALAETAWISKLAQ

SEQ ID NO: 8105 - protein, 1045 aa, unidentified
  REGION 1..1045: note = Description of Unknown: Cas Enzyme sequence
MKTEYQKSGSVLGLDIGPTSVGWALIEENEQQPCRLIDMGVRIFEAGVEGDIESGRDESRAAKRRMARLHRRQLERASRRLKVLAEELQRRSLLPPGDVSTPDARKRFFDELDKLLAQGLDNPALLPFILRARALHERLDPHETGRALYHLAHKRGFLSNRKSQPKEDEELNTIAQAVGQLRQAMQETGAQTPGEHFAALLRNNGRVRGHHTFRNMNAQEFDLIWDTQRAFHPDVLSDEARKSIGKKIFFQRPLKSNKGLTGRCELEGARRAPLALLVSQRFRMLQKVNDLRLVSPDGLQRELTASERAELLRHLELQQNMKFTAIRKKLKLQGKFNFEIGGEESLPGNRTAARMASVFGQQRWQSMTPGEQDLAVQHVRSIRKPEALERAAADYWKLDPNAARDFAKIPLEEGHVMLSQKAMVKLLPLMERGMPFATARKELYGAAPPPRAYDKLPPVHSPEMPAVTNPAVRRALTEMRKVVNAVTAKYGKPGLIRIELARDMKRPRKARQQISKRIRANKNKRDAARQQLLKEASGALGSAWEPKRSDIEKWLLRDECGGICPYTGKPISFHSLFVEPEFDIEHIIPFSRSLDNSFLNKTLCCATENRIKSKRTPWEAYGGTARWDEIIGRVRKFTGDANVAKLQRFQIRDADKEIDGFAARELNDTRYISRLAVQYAGLLYGAGADGVDPSGRRRVQAARGQITAHLRDVYELNSLLGDGGEKYRGDHRHHAVDALCVALTTPRAVKQLSDAAAAGEDRRRAWYDTRLITDPWPGFLDDARNAVNAIVVSHCPSRKVNSAMHDETVYSKPHADPMGRECVHVRKPLAALTDKMVDNIVDDRVREKVRQALNGRAPKDAFKDSASLPFFETRDGRRIPIKTARIRVYQSVNSLGRNAAARNVVPGSNHHVEIFAVEQEKGGVKWEGRMVTTIEAMARLHPKSRIPVVNRAHENGGKFLFSLSPGDTVRVTLDGEQKLLRLRTISKNNQGRLRLDAVCIREARKKAEIMQDKKWIIFPTLHALADMQFQKVTVTPLGEVFPCND

SEQ ID NO: 8106 - protein, 1063 aa, unidentified
  REGION 1..1063: note = Description of Unknown: Cas Enzyme sequence
MLAGKTHPSGSRTAASEYLLGLDIGTTSIGWALIALKNEEPCGILRAGVRCFEAGVEGDIEEGKDSSRAKPRRIARLARRQIWRRAARARKVFRVLQELDLLPPGEARSPHARHALLHALDQKLLQKYDLARDHVKAHLLPYLLRAWAVKRRLERYELGRALYHLAQRRGYQTNRRAEADNDDEDNEKQRKIVQGSIETLQQDLAGRTLGQFLATLDPCQRRIRQRWTSRSMYQDELARIWQRQAAALGLTEEDRKQLYKAIFFQRPLRSARGLIGQCDLETGQRRAPLASLVAQEFRILQQVNHLRVRLPDHTERPLTDQERATLIQALMHQEELSCAEARKLLKLTKRGTKFTIELAGEKSLRGNRTQARLVAVLGPRWDTFTPQERNELIWDVIHYEKAAALARRAQKRWGLDPQTAEKLANVRLETGYAAHSAAALEKLNERMRAGEAYATAKQAVYPHAHQPDRVVSRLPPVKEALGELRNPAVLRALTELRKVVNAILRRYGKPKAIHLELARDLRRSRKEREKISAEQAKREKARRDALQKMLREFPNYQPKRGYDPAIEKILLAEECDWECPFTGKKINMQTLLGKSPQFDVAHIYPRRYLDDSFANKTLCYHEENRHRMLDRLPMEAYAGNPQRWQEILARVKRFQGPYAAEKLRRFQTEKVPDDFVSRQLNDTRHSTKLAAQYLGLLYGGPYDAQGHRRLVAVSGSITAHLRRAWRLGVHPGPDQAGPGKNRDDHRHHALDAIVVALTSHATIQKLSTFAARSQPGQQRLITGDLQEPWPSFQRDVRQALMAIYVSFRAEHKLAGPLHAETNYSPPIPTPDGKFVHHVRKSLSKLTETEIRGDAIVDPVIRALVQKKFEELGGKQPEKVFADPANHPYLTARDGRRIPIHKVRIRARANPVRIADDPARQRWVAPSGNHHAVIVAQLDPQGRESRWEDHVVTRLEAHQRLRQAGPRPRNQLIQRDWGPGKRFKFSLMLNDMLELDAPGGGRQVCRVLGISKGDYELCLHYDARSQTEIARQKQRIRVNAEKLRLLRARKVVVTPLGDIQPAGG

SEQ ID NO: 8107 - protein, 1081 aa, unidentified
  REGION 1..1081: note = Description of Unknown: Cas Enzyme sequence
MESKRLKQPFVLGIDLGVQSLGWAMLSLDDDDNPTGVVRLGVRCFDSGVGSEEEVAQGKEQSQNVERRGARLLRRQTWRRARRIAKVFHALQRFGLLPAEPAPTPEQRDALIKQLDADLRAEFLPAGDRAAFHLLPYRLRALGLDQPLPPFAFGRALLHIAQRRGFLSNRKAEGKENEKERSVVKESISFLQNELVRTGARTIGEYFAGIDPEEQRIRGRYTARQMYLDEFEKLWAVQAPHHQLDESAKKAIHQAVFFQRPLKSQSGLIGLCELEPGQRRAPAASLEAQRFRYLQKVNDLQIITPDGFILAPSEEQRRSLIDYLEHHAEITFDKLRTLWGLKLPRKSKKKSPAASGSDGDSDLASDAAQSDERPGYNFNLERGGEKKLKGNVTRARIEAALGCDLDELPAHVREPLVADVLEYENADALQRRLVQRYGLAEEQAAALAETHFEDGYASLSLAALRKFLPLMEQGMPFATARKELYKDSRQFQPHDILPPLFMVKAQLRNPAVSRGLNELRKVVNAVIRRYGKPKYIRIELARDLKQPRKVREERSKSMRKNEALRQQIIDDIRRFGIANPSETDILKVRLADECNWQCPYTGKAISMETLLGPHPQFDIEHIQPYSRSLDNSFTNKTLCDVHENRIAKRNLTPFEAYSGDEQRWHEIIARVRRFRGPASPAKLRKFLAKAIDSDFVERQLVDTRYMSRAAAEYVGLLYGGAVDSQGTRRVQVSPGGVTADLRRLWGLNRVLPRDPGDDERPGKKSRSDHRHHALDAAVIALTSPAMVQQLSRCAQDALLIGSRRFVALELPFPSLIDDLKKAIDEIVVSYRVKRKVRGRLHDQTYYSPPKPACDENGRTVEYRHVRKPLASISADRIEKIVDPVVRKTVQEHLARHGGDLKKAFGNPNNLPYLTAGDGRIIPIRRVRIRENISVLPIGKPPQLRFAAPGTNHHMEIVEVTDARGRVRWEGKLVNMFEAYQRRRQHLPVVCRDHGPNANFLFSLACGEYVEMEHVPGQRKVYRVTTISGERLEFRLHCDARPITVLKKLPKARINRSASTLLEAKARKVFVDPLGNVYPAGD

SEQ ID NO: 8108 - protein, 1115 aa, unidentified
  REGION 1..1115: note = Description of Unknown: Cas Enzyme sequence
VKDKPSAEPLTFGFDIGVASVGWAVLAPNRIVALGVRAFDKAETAKEGESLNLIRRNARLTRRRLRRRAWRLRKVARVLKQHGVIADTHLFSPQRPFSPSLWRLRVEGLDRQLKAEEWARVIYHLCKHRGFHWISRADDKKAEADTKGEGGKVKQGLAATARLMHEKGYRTAAEMVLSEFPEAQRNKQGDYSKALSRALLSDELALLFRRQRELGNPHATNELEREILGTGDRKSGLFWLQKPALAGADLMKMLGRCTFERAEYRAPKASFTAERHVWLTRLNNLRLFVDGRTRPLNEDERRIALPLPYQQAGDFKYRQLRAALVKETGLPETARFVGLAYPSEAQKADGKAKDPEDDTLVKLPAWQALRLTLKKAGLETEWEEMAAAAIDGRPELLDQIAYVLSVFKDDAEVEAELRKFELPNADRMIDALLDLHFDKFHALSLKALRKIVPYMETGLRYDEACEKAGYRHSQPPSAVAGGHKYPPPFYARRDKDGRMVLNEDLDVPRNPVVLRALNQARKVLNALVREYGAPHEVRIEMARDLSRPLDERRQIEREQQEYRERNEKNRAMFVEHFGREPKGAEFEKWRLYREQQGKCAYSVEPIDIGRLLEEGYVEIDHALPYSRSFDDSKNNKVLVHAKENRDKGNRTPYEYLGGAEDSERWQRFVAFVESNKAYRQAKRSRLLRKNFGEDEAKEFRERNLNDTRYICRFFKNYVEQHLKLSNDSESERCVVVSGQLTAFLRARWGLLKIRDESDRHHALDAAVVAACTHGMVKRLSDYSRRRELEQVRAGFVDMETGEIVAPAAFARLERDFPKPWPDFRYELETRLKEDDPVKLRAAMKELGTYPEAALNTLRPLFVSRAPQRRNGGAAHKDTVYGQPQRLKVQGSVTQRVPLASLTLKDLDHLIDPHRNEKLYAAIRTRLQAHGGKGERAFPPHDPLRKPDRDGNPTGPIVRTVTMVIDKLSGVPVRGGIAKNDAMLRVDVFKKDRKFHLVPVYVHHRVKGLPNRAIVAFKDEEAWTLIDDSFGFCFSLYPNDLVRVTLKKGSLLGYYAGCDRSGGTISLLPHDRDKRIGADGLIRGVGVKMAVSVEKLHVDILGNIYPAPPEVRRGLA

SEQ ID NO: 8109 - protein, 1046 aa, unidentified
  REGION 1..1046: note = Description of Unknown: Cas Enzyme sequence
MASELVFGFDIGTTSIGSAVVRLDTSAGTGEILHMGVRIFPEARDPDGIPLNQERRRRRMMRRQLRRRRSRRRDLNCLLSEAGFLPPFSKDKLSPWASVMAEDPWRLRTRALSEPLSPHELGRALYHLAQRRHFRGRDLETADIADDRKKDEAAPDEAKAASQRETDRKALKESGLTLGAFLARIPERTGRRRGHHFARDDVKAEFQSILAAQAPHHPRLADPDFAACLEETIFAQKPVFWRKATLGACRFVPDGEPAASASWVAQEKRMLEKLNNIRIEEGNGRPLDNEERAAILALLRKQDSVSWSGIHRHLKLYWRKNDLPERPTFNLQRGGEKGLVGNKLENRLAAIMGDRWQSEPDLRDRMRREIHARLYEADYGRIGGRIVIRREAERRKQRAMERERLKSDFQLTDEQAEALAKLTFAPGWERFSEEALWAFLPRLEQGASFGALLNGPDEEGWRERTFPNRDRPTGAWVNRLPTPGNSKEEIERQKSVRNPTVLRVQNELRKVVNNLIAAYGKPDRIRVEVAREVGKSARERAEELKRNRDREKERKTAAEELRKGGIAEPTRDDIEKWLLWQECNRQCPYTGRMIDFSALFDHGEFQVEHIWPRWRSLDDSFANKTLCHRDFNLRKSNRTPFEAFEHDPEGWEQALKRVRDFAGPPGRVAIKARRFAAAEIPADFAARQLTDTGYAARQAIGFLKMLYPDFGQEGEVRVATLSGRVTSRLRHNWGLNGILSDTGDKTRADHRHHAIDALVAALAHPGYTQRLSRWFQARDSATPLPEPPLDPPFPDVRHQAEAKVAEIIVSHRVRRKVSGPLHKDTTYGDAGPAEGTGGVAYRWFVTRKPVEMLTKSLLADDDAWPDAHVRDTVRAWVETHGGDPKKAFVNGYPTVSPGGAPIRKVRIRVKQQRKLMAPLKNGYADLGNNHHAAVFRRPDGAVETEIVSLFEAAQRLRNRQPVIERSRDVAAFVMSLAQGDMLEFPDGKLKGLWVVQGVWAAGQIVLWRAEDATGSSVFRPTAGSILKSDGRKVAADPIGRIRPARD

SEQ ID NO: 8110 - protein, 932 aa, unidentified
  REGION 1..932: note = Description of Unknown: Cas Enzyme sequence
MKWRLALDLGTNSIGWAALKLNHEDSESRVSEIIDMGVRIFSDSRRAKDGTPLNEERRMCRQMRRQKERRIRRKRAMRTFCVAHGLLPSDPEERKKIAQLNPYQLRTEALERPLAPHELGRILMQLAGRRGFKSSRKESVNTDSEVTGMKAGVERLSKILGEKTLGQWLYEQQAKGKPVRFRAKHEGAKIIYDLYPSREMYEKEFSAIRAKQAPLFPDLNWDRAHWIIFFQRPLKRPERGKCQFYTNEDRAYKAQPSAHRFRIAQDVMNLCYYDENNRRIEISQEGKQRLLRELDQVKNLSFKKIRQLLDLSATIQFNLESERRDKLRGNDISVDFRKDTYFGEQWDRLSWEEQDEIIEQLITEEDEHKLKELLHEYNLSETNIATILGYQFPTGTTMLSAHFMRDCTRIMHEGLLPYHEAVTALGLHHSEETQPPLHRRLPYYGTILTALVQNAHGAVPPDRQFPNKQAEIEYIYGKIANPTVHVALNQVRKLVNALVDRYGRPHEIGMEVARELKLPKYKKQEFEKKQTINQKNNDRARRELQLLRLLVPSKEDIKKYLLWEELGSDSVARACPYCGRPISASQLISNEIEIEHILPYSKTLLNTRDNLTVAHRECNQVKGQRTPYEAFSSNPEGYNWQDIVARAQRLPANKRIKFAPDALQNYLDENQFLQKQLSDNAYISRSTKQYLAAICDKKRIWVSTGRLTAMLRGFWGLNTLLNKDHDTWFKNRFDHRHHALDALTIGLCDRGLINRIARLNSQGKYAQIVVPEFPFERSKVAEKLKKLVVSPKGDHGKEGKIFKETAMGCIKKIRKINPEELEETMINDIIPPAIRGKVQELVKSRTFRAIKSELPQKFTHFYIAEKIWVTTCDVTALSQSDIEEGRVIDPHIRAALREFYEKNKEVCTTNTELAKKLKEFSDEKRIRRVRYA

SEQ ID NO: 8111 - protein, 908 aa, unidentified
  REGION 1..908: note = Description of Unknown: Cas Enzyme sequence
VHDKPVTEPLTFGFDIGIASVGWAVLAPNRIVALGVRAFDKAETAKEGESLNLTRRNARLMRRRLRRRAWRLKQLARLLRRHGVIEDVRVLAPAHHPSTSPWRLRVDGLDRKLNGEEWARVLYHLCKHRGFHWISRAEEKKAEADSKGEGGKVKQGLAATARLMHEKGYRTAAEMVLSEFPDAQRNKQGDYGKALSRALLSEELALLFQCQRKLGNPHATSELEREILGTGDRKTGLFWLQKPPLAGADLLKMLGRCTFERAEYRAPKASFTAERHVWLTRLNNLRLFVDGRTRPLTDEERRIALPLPYQQAGDFKYRQLRAALAKDAGLPETARFAGLAYPSEAEKAEGKAKDPEDATLVKLPAWQALRLTLKKAGLETEWAGMAAAAIDGRPELLDQIAYVLSVFKDDAEVEAELRKLGLPNADKMINALLDLRFDKFHSLSLKALRAIVPHMERGLRYDEACEKAGYHHSQPPRAATGAHKYLPPFYAKRDKDGRMVFNEDLDVPRNPVVVRALNQARKVLNALVREYGSPHEVRIEMARDLSRPLDERRRIEREQQEYRERNDKDRATFVEHFRREPKGAEFEKWRLYREQQGKCAYSLAPIELGRLLEEGYVEIDHALPYSRSFDDSKNNKVLVHAAENRNKGNRTPYEYLGGAEDSERWRQFVAFVESNKAYRQAKRNRLLRKNFGQEEAKDFRERNLNDTRHICRFFKNFVESSLGLADGSKSKRCVVVSGQLTAFLRARWGLLKLRDESDRHHALDAAVVAACTHGMVKRLSDYARRRELEHVRAGFVDAETGEIVDPAALARLERHFPQPWPHFRLELETRLKEDDTAKLRKAMEALGTYPPEALNHLRPIFVSRAVARRSEGELHAATIRALKDGADTVAVEKVPLTKITLAKLEKMV

SEQ ID NO: 8112 - protein, 1135 aa, unidentified
  REGION 1..1135: note = Description of Unknown: Cas Enzyme sequence
MSTDMKNYRIGVDVGDRSVGLAAIEFDDAGFPIQKLALVTFRHDGGLDPTKNKTPMSRKETRGIARRTMRMNRRRKQRLRDLDMVLTNLGYSVPEGPEPETYEAWTSRALLASIKLASADELNEHLVRAVRHMARHRGWANPWWSLDQLEKASQEPSETFEIILARARELFGEKVPANPTLGMLGALAANNEVLMRPRRNYNAKEANNPKKAGKYLADYGTQPLMAAKVRQEDQLAELRRICEVQGIEDQYEALREAVFTHVRPYVPKDRVGKDPLNPSEIRASRASLEFQEFRILDAVANLRVRTDSRAKRELSEGEYDAAVDFLMSYTGKEQPSWADVAEEIGVPGNRLIAPVLEDVQQKTAPFDRSSAAFEKAMKAKTEARKWWESNDDDQLRSLFIMFLADATDDTAQAAIEAGLYELFESWPEEEREALSNIAFEAGRAGYSATTLSKLSEYMHEHRVGLHEARKAVFGVDDTWRPPLAKLEEQTGQPTVDRVLTILRRFVLDCERQWGRPQAITVEHARTGLMGPAQRQDILREQKKNREENERIRNELRESGVENPKRVDVRRHLVIQEQECQCLYCGTMITTTTSELDHIVPRAGGGSSRRENLAAVCSYCNGQKNNTPFYRWASPERFKETIDRVRQLKAFKDPKKAKMFKNQIRRLKQTEADDPIDERSLASTSYAAVAVRERLEQHFNEGLAPDDKSRVVLDVYAGSVTRESRRAGGIDERILLRGEHDKNRFDVRHHAIDAAVMTLLNRSVALTLEQRHQLKRESAETKRDNGWRDFAGLYPASQKKFLEWRKAATVLGDLLAEAIEDDSIAVVSPLRLRPQNGSVHLETISAVKKQTLGSAWPSDAVKRIVDPEIYLAMKEALGKLKELPEDSARSLELPDGRFVEADDEVLFFPENAASILTPRGVAEIGESIHHARLYGWLTKKGELKVGMLRVYGAEFPWLMRESGSRDVLRMPIHPGSQSFRGMQDGVRKMVESGEAVEFGWITQNDELEFEPADYITHIRKNKLGQFLELMPEKRWRVDGFNDAGRLKIRPALLSWEQLPDEIQDKMNAGTLNEDEKNLFKIVKEGTLVSVGDFFQLETSKVIRRNNLGFPRWRGNGSLPTSFEVRFSALRALGVEG

SEQ ID NO: 8113 - protein, 1420 aa, unidentified
  REGION 1..1420: note = Description of Unknown: Cas Enzyme sequence
MTQKVLGLDLGTNSIGSSVRNLDLSDDLKGQLEFFSSDIFRSSVNKESNGREYSLAAQRSAHSRSRGLNEARRRKLWATLDLLIKYGFCPMSPDSLMRWRTYDKQRGLFREYPIDDKDFNAWILLDFDGDGKPDYSSPYQLRRELVTHQFDFNQPIERYKLGRALYHIAQHRGFKSSKGETLLQQETNSKQSLTDETTDVAGEMKASEEKLSKGLSTYMKKNNLLTVGAAFAQLEDERVRVRNNNDYRAIRSQFQREIETIFKFQQGLSVEKELYERLVSEKKNIGTIFYKRPLRSQRGNVGKCTLERTKPRCAIGHPLFEKFRAWTLINNIKIRMSEEEQAEQLPMKLRFELYNDCFLAFVRAEFKFEDIRKYLEKRLGVHFSYNDKTINYKDSTSVAGCSITARFRKLLGEDWESFHVDGQKQRQAHGKNNASFHTVSYTVDDIWHFCYDAEEPEAVLSFAQETLKWEKKKADELVRIWSAIPQGYAMLSQKAIRNINKMLILGMKYSDAVLLAKVPEIVEIADEEILSVTEYYHRVEAQVGHEKQINNIVNALIAKYKSTSEEYRFADHNYDYQLDESDEKDIIKQIESNIGTRKWSLLDADEQTDILQKVRDKYQNFFRSHERKFVESPKLGECFEEYLMKKFPMIEGEQWKKLYHPSQIAIYRPVSAGKDRSALRLGNPDIGAIKNPTVLRVLNTLRKRVNQLLDDGVISPDETRVVVETARELNDANRKWALDTYNRIRHDENEKIKKILKEFYPKRDTISTDDIDKARYVIDQREVDYFTESKTYNKDIKKYKFWLEQGGQCMYTGRTINLSNLFDPNAFDIEHTIPESLSFDSSDMNQTLCDAHYNRFIKKNHIPADMPNYDKAVRIDGKEYPAITSQLQRWIDRVERLNRNVEYWKGQARRAQNKDRKDQCMREMHLWKMELEYWTKKLERFTITEVTDGFKNSQLVDTRVITRHAVLYLKSIFNHVEVQRGETTAEFRKILGLQSIDEKKDRSLHSHHAIDATVLTVIPSAAKRDRMLELFYRIEETKKALKNYNENNKAGLNLELKGLEEKLDKEKKDCRVGRRVNELDRFINENIIVSHHTKDQALTPAHRRLRKRGKIVGGKEHQRWQTGDSLRGEIHKASYYGAITQFAKGANGKVLMKDGQAQIDPTIYYVIRRELKYKRSTQDSGFINWEDLEKVIVDTDLFGLMKGQFPEGTSFKDACEQGFYMIKKGKNGEGDVKTHRIRHVRCKAVKTALRIKEQTYRSSKDYKQFFYAAVGELYVMCSYTDGKKRDFKIYSLYDISNHRKSGTEDIPKFITDKNGNRLTLDYELHKGDMVLVYKDSPEELYDMEQTKLKRRLYMVYGFENGGMRIRMSNHLFDTDDKAESVKDYKNLPTAIRCGIKTIKFLIMGKHRDFVIRNGNIEFNH

SEQ ID NO: 8114 - protein, 1197 aa, unidentified
  REGION 1..1197: note = Description of Unknown: Cas Enzyme sequence
MSKHVLGLDLGVGSIGWCLIALDEQDQPAEILGMGSRIVPLTTDDLNEFSQGKAISKNQKRTTQRTIRKGLDRYQLRRKVLSEKLAEHGMLPDKDLMQLPVLDLWELRARAASPGEKLSLPEIGRVLYHINQKRGYKHAKSDEAEEATKRGKEKGYVATVKGRYAELQQEGATVGQHFACKLKEHRQESPSGGFFYNYRIKDQVYPREAYIEEFDRIMGVQSVFYPEVLTSAFIQELRDKVIFFQRPLKSCKGLVSFCEFEKQERVVQLKRVNREGKEELQERKITIGPKVAPKSSPIAQLCKLWESIHNIRIYYPDGKERPITLEEKRKLLAYLQTHDKLTFTALKKELKISDRERLWCDKLLKGGIKGDTTRVLLRKALAGYKRYEPLLRMDLKLRDSQEVDPETGLIRPIVDESYLSQPLYRLWHILYSIEEREAMRRALIDQLGFLEEDLDGGLLDKLYQIDFAKQGYSNKSAKFICKLLPHLQEGHGYSEACELAGKRHSASSLTKEELEERPLLEHIPLLQRNELRQPIVEKILNQMINLVNALRQKYGSIDEVRVELARELKMSREEREETSKRIRSREKENKEIAERIKEYELYPTKSRIQKYRLWQEAGEQCLYCGRSIDVVQFLRGDGVEIEHIIPKSLLYDDSSANKTCACSRCNKDKGNRTAYEYILAEGREAEYLDRLESLFHDGKLSYSKRRRLQWKKADIPADFIERQLRLTQYIARQAQEILRQGIRRVGASEGSVTAKLRHLWGYDDILRELNFERYQSMGETEIVSQKEKDGSITKSERIKDWSKRKDHRHHAIDALVVACTRQGYIQRLNSLNSEEDSLQMQEDSKQMREKMGGQKRPTADKHSILENWLILQPHFSPQEVKSKVAEILVSFRPGKRTVSTGRNTYLRSGKKETQAGVLIPRGPLSDESLYGQILRNGEPTYVKKVALESLSKTQIEQIVDLKLRREMVARAQPSDGAKLNPKLLLATPFYSDAAGTQRVRSVRVAIKQGKNSIVPLRYNESGKAITFVNPGNNHHVAIYRTPKGKLVDSCVTFWEAVDRVRYDIPAIIRKPREVLDQVLLKKDIPETLLANLPAPDWEFVEYLQANEMFLIGLTDEEIQTALAESDLLTLSKHLYRVQKVSSKNYMFRYHLETEVADEKNNTGDIPKFYHLQGLSTAYLKENPRRVKVNLLGEITLP

SEQ ID NO: 8115 - protein, 1386 aa, unidentified
  REGION 1..1386: note = Description of Unknown: Cas Enzyme sequence
  MOD_RES 1314..1317: note = Any amino acid
MKKILGLDLGTTSIGWALVYESENTDEKSSIVRLGVRVNPLSVDEKGNFEKGKSITTNADRQQTHGARINLQRYKLRRENLKDCLQKQGWIGAEALCEEGKASTFETYMLRAKAAEEEISLHELCRVLFMLNKKRGYKSNRKANNKEDGKLFDGMTVAKKLYEEHLTPAEYSLKLLSSGKKFKQEYYRSDLKEEFDRIWNEQQKYYPEILTDDFKQQLQGKSKGNTSKIFLGKYGIYSADLKGLDRKLQPLKWRVEALKQRVNKEVLAFVISDLNGQIASTSGLLGAISDRSKELYFNKQTVGQYLWTSLKETPHVSIKNKPFYRQDYLDEFEKIWETQATYHKELTPELKQEIRDIIIFYQRPLKSKKGLISVCELEQRKVKVTIDGKEKEISIGPKVAPKSSPMFQEFRIWQNLNNILLIDKGNNSIRPLYEEERNLLYEELSVKEKLSKAEALKVLNKNSKQWDLNYKEVEGNRTQAVLYDCYNRIIVMTGHEECNFKKLKASEIRSYVKTIFTGLGFNTDILEFDSSLTGHELEKQPMYQLWHLLYSYESDNSRTGNDALLRKLETAFGFPKEYAAVLSDVVFEDSYGNLSVKAMRKILPHLQAGLDYSQACEEAGYKHSRRSLTKNELDQKEYKEKLELLPKNSLHNPVVEKILNQMINVINAVVDEYGKPDEIRIELARELKIGAAERENMTRSINQGNAENKRIREILEKEFALSYISRNDIIKYKLYEELKSNGFKTLYSDTYISKDKLFSKDFDIEHIIPKARLFDDSLSNKTIEARDVNIAKSNKTAFDFISEKYDQQGIEAYKKKLDILLQDGSISKAKYNRLLMKEADIPSGFIDRDLRDTQYIAKKAYEILSDLVRTITPTTGAVTSRLREDWQLVDVMKELNFEKYQKLGLAEVIEDRDGRKIKRIKDWTKRNDHRHHAMDALTIAFTKPSYIQYLNNLNARSDKSSSIYGIENKELHREDNKLRFNAPLSINEFRAEARRHLKSILVSVKAKNKVMTQNVNVIKTKHGVIKKVQLTPRGELHNATFYGTKKRSIIKMIKVGAALDEATIKKVSSSFIREALLDRLHEYNGDAKKAFTGRNSIDKNPIYIDEEHKKTVPSLVKTIEWEMYHPTRKMISPDLKIDKVIDKGIREILRTRLAKFNGDAQKAFSNLDENPIYKDEAKKITLKRVSLEGVSSVIPLHKLKDMGGKPVVGKDGKPVWGDYVQTSNNHHIAFYMDENGNLQDDVVTFFKAARRKSQGVPVIDKNYNHDKGWHFLFTMKQNEYFVFPNEATGFIPTEVDLMDEANYDMISPNLYRVXXXXRVQKMSKTKQGITDKRDYWFRHHLETVLNNDLKVRNSIFKQINSLKPLEGIVKVRINAIGKIVAIGEYD

SEQ ID NO: 8116 - protein, 1370 aa, unidentified
  REGION 1..1370: note = Description of Unknown: Cas Enzyme sequence
MEKQEYYLGLDMGTSSVGWAVTNTKYELLRKKGKDMWGIREFDEANSAAERRTHRVDRRRRQRQLVRLGLLKSYFSEEIAKIDPDFFIRLENSKYFLEDKDERVRTKNGVFNDDDYKDVDYYRQYPTIFHLRKALLDLDHHGEKFDVRLVYLALANMFKHRGHFLLNAEGDALNTEQVDIVYQEILDRLENDYEIIIEHKSIQQVIDVLGSTDIGRKKKHEELQKLFGVGKKDKRVNEFLRCLCGLSVNAKLIFDENAEEKVTLCFNDFSYTDKISELMEQLTEEEYALIEQLKSIYDYAVLAGTLKGYDYLSCARVELYEKHKKDLKLLKELYRKYKTEEEYNRMFRSNTDGTYSAYVNSLNSTDAILNSNEVVEDSKYRRNMKKRKSEDIYATIKKAFKDITEDKDVSFVLEKIEKEQFLPKQLTGANGVIPNQVHKKEMERILQNAETYLPFLKDKDESGLTVSERIIQLFTFQLPYYVGPLGENSKTGWIVRKEKGAILPWNIHDKVDMSATSEAFIGNLIRTCTYIQGEKVMPKASLAYERYCVLNEINNLCIDGERIDTKLKQQIYKDCFMKGKRVSKKQLCSYLAAQNAIHSEEQLTGIDKNINNSLSSYGKMYAIFGERLKEDAILAAAEDIIYWGTIFGDSKKMLKQRLKKYVEEGIIDEKQLKRILGYKFKDWGRFSKSLLSLSGCDKSTGEIITLGQAMWEYSLNFMELINSEEFTFKEEMEKHTKVAMKQLSEFTYEDLEDSYFSVSVKRMIWQTLLVVREIEQVMGCAPKRIFVEMTRTEEEKGDKGRKESRGNQLLELYKSIKNTESHNWKEEIAAADKDGKLRSKKLFLYYMQMGRDMYTGEEIDLGRLYDDNLYDIDHIYPRHYVKDDSIMNNLVLVNRRANQDIKKDLYPIPEQIKANPKVRELWNALHKQKLITDEKYARLNSNTAFSEKQLGDFIARQLVETGQGTKGVADLLEQLFKNTVIVYAKASNVSDFRKDNGFLKSRLVNDFHHAQDAYLNIVVGNVYYTKFTKNPWNFIRKDYEQDKEKNRYNLARMFDWNVVRGSETAWLANGKDGAGTITTVRKMMQKNTPLLTRMNFEQHGSIANATLYSAKKAKSENYLPLKTADEKMSDVKKYGGYTSMSIAYYFIVHHKEGKKENVTIEALPLYCKDKVEREENGLEKYCEEVLGYGEVNIIRRKLKIQTLLEFNGYQVHLSGKTGNQLILRNAISLCLSTKWITYIKKLEKAVNIQIVEEVVTSEENIKLYNLLADKHANTVYSKRPNAYGEKLLADREAFIKLDLRQQCEVLLQILSLTKIGTTEANLLLIGESEHSGKILISKNLKASDRPAVISQSPCGLYEKKEWIFDKIVEK

SEQ ID NO: 8117 - protein, 1179 aa, unidentified
  REGION 1..1179: note = Description of Unknown: Cas Enzyme sequence
NYLTKRTIMTQKYSYSPKKYSLGLDIGTSSIGWAVLDLDKERIHDLGVRIFEKPEHPKSGESLAKPRRDARSARRRLKRRRQRLNNLKQFFIDQNILTRDRIEEVLSDKSEFNKLDVYALRLKALTEELSPEELLKVMYQIAKRRGFKSNRKVEEESEKEGGRVSKALKTNEKFLAENGYKTVGEALSRDENFASHKRNKHDDYTNSFSRSDFLHELEEIIEVQKRYVLKNVSNTAINEMLYGLDDDKNVVNVSAIMYQRPFMTEELIKKMVGNCTFEENEKRAPRASYSFEIFRLASDLSHLVFIPRDASKRQAKRENLEIRLSSDQINKVIEAAKNQKSLTYKKVRSIAGISEDYVPKYTHGKKKDGDEFGEGNAFGGLKAYYDIKTALKDLPEDWAKIDNESTINQIAYILTTQKSDEGIKAKLNALPISDDAKNAIIKIKATNFGSFCHLSIKALQKITPHILNGMTYDKACEAAGYDFKKQSASLEQITNPVVKRAISQTLKVVRAIEHKYGKPYFIKVETARDLAKNFKERNAIKKENEENQGYNEDIKSIIADGYEASPKTKGGKQLLSHLKELSVPLNKNADFNGQQIIKVKLYREQNGICPYSGKPIDFDTMLQDDNAYQIDHIVPFSRSNNDGITNKVLVLTEENQKKSNKTPFEYFGADENRWKEFVARVESIYKTRDIKTDDKATNAINYKYNGYAMKKKQNLLLQDYKNDSWNVRALNDTRYITRFIQNYLRQNIDFAEGEEKQRVIVPSGTTTAYLRKRWGLAKDRSEDVLHHAKDAAVVAAISPKIIYQANLFSKEQEMKLYLNNAKTIDEKQQILLQSTDENTGEITDEATFTQTQKDLAQAEYFKLRSDKKTKNRFPDPWTDFSKEIRKRSLNTDIATLQNELRGLDNYDEDFRLSVKPIFVSREIRHRIRGEAHESKLRSNRNRNGQNLIRVPLTELTLQRLENSLAKEEFDSQKNKNGSSLYEKLLARLNECNGDAKKAFNPPFKLYKGPKQDKNGNPISPVTAVKVYDKRGVVSVGRKANAPVALAEMVRIRVYKKDDQIYMIPDYRINILENKEPMELLKPFNGVSKIDNSFNFIGYLYKGDLITIQKDDQTFVGYFVQFEGDNRITIKSHLAADSSRNSKSTVKRESLSGINYLKIHKVDVLGDVHFSKGVVWPGAS

SEQ ID NO: 8118 - protein, 1390 aa, unidentified
  REGION 1..1390: note = Description of Unknown: Cas Enzyme sequence
MNSNNYSIGLDIGTNSVGWAVITDDYKVPSKKMKVLGNTDKHFIKKNLIGALLFDEGTTAEDRRLKRTARRRYTRRKNRLRYLQEIFSEEISKLDSSFFHRLDDSFLVPEDKRGSKYPIFATLAKEKEYHKQFPTIYHLRKQLAESNEKADLRLIYLALAHMIKYRGHFLIDDPKFKVQNNDIQGLFEKFVEEYDNVQETSLSKIKLNVTEILTANIPKSEKQEQLLKNYPSEKKNTLFGNLIGLALGLTPNFKTNFSLENDAKLQISSESYEEDLGNLLALIGENFIELFSAVKNLSDGILLAGIVSDESPHAPLSAKMVIRFKEHEEDLASLKQFIKNNLPEKYDEVFSDQSKDGYAGYIGGKTTQEAFYKYIKNLLSKFEGVDYFLDKIEREDFLRKQRTFDNGSIPHQIHLQEMNAILRRQGEHYPFLQENKEKIEKILTFRIPYYVGPFARGNRDFAWLTRNSDQAIRPWNFEEIVDKASSVESFINKMTNYDLYLPEEKVLPKHSLLYETFAVYNELTKVKFIAEGLRDYQFLDSGQKKQIVEQLFKEKRKVSEKDIIQFLHNVDGYDGIELKGIEKQFNASLSTYHDLLKIIKDKEFMDDSKNQEILENIVHTLTIFEDREMIKQRLAQYDSLFDEKVIKALIRRHYTGWGKLSAKLINGICDKQTGNTILDYLIDDGYSNRNFMQLINDDGLSFKEIIQKAQVVGKTDDVKQVVQELPGSPAIKKGILQSVKLVDELVKVMGHAPESIVIEMARENQTTAKGKKNSQQRYKRIENAIKNLAPGLDSTILKEHPTDNIQLQNDRLFLYYLQNGRDMYTGKPLEINQLSNYDIDHIIPQAFIKDDSLDNRVLTSSKENRGKSDNVPSLEVVEKMKAFWQQLLDSKLISYRKFNNLTKAERGGLDERDKVGFIKRQLVETRQITKYVAQILDSRFNTEVTEKDKKNHNVKIITLKSNLVSNFRKEFGLYKVREINDYHHAHDAYLNAVLAKAILKKYPKLEPEFVYGDYQKYDLKRYISRSRDPKEVEKATEKYFFYSNLLNFFKEEVHYADGTIVKRENIEYSKDTGEIAWNKEKDFATIKKVLSLPQVNIVKKTEIQTHGLDRGKPKGLFNSNPSPKPSEDSKENLVPIKQGLDPRKYGGYAGISNSYAVLVKAIIEKGAKKQQKTVLEFQGISILDKINFEKNKENYLLEKGYIKILSTITLPKYSLFEFPDGTRRRLASILSTNNKRGEIHKGNELVLPEKYTTLLYHAKNINKTLEPEHLEYVEKHRNDFAKLLESVLDFNDKYVGALKNGERIRQVFIDWETVDIEKLCFSFIGPRNSKNAGLFELTSQGSASDFEFLGVKIPRYRDYTPSSLLNATLIHQSITGLYETRIDLSKLGED

SEQ ID NO: 8119 - protein, 1064 aa, unidentified
  REGION 1..1064: note = Description of Unknown: Cas Enzyme sequence
MEYILGLDIGVASVGYAIIDENYNVLISGVRLFREGTAEENVARRGFRSSRRSMRRSRHRLDRLKELLSSALGVSGDQSYTNLYEIRVRGLSNKLSSDELIATIIQLAKHRGIFYLSPEDLATEDGSNQSSADIIRTNENKLKDGIYPCHVQLEKLNTTGKVRGIENKFTHESYRSELIKLLEVQSSFYPKLKGIMDEVLCIYDSKREYYEGPGSYKSPTPYGSYQLDESGNVIKINLIDKMRGTCTYFPDELRAPKWSYSACLFNLLNDLNNLTIQGVKITEVQKQELISEYVNKGKSVTIPAIAKVCGVKKEDIFGFRIDKSEKPIFTKFEGYNELLKIAKSVNEEDVIEGKKQLVDDISEILTKEKSIDVRERKLVDDLNLSTSLAKEIAKSGGFTTYHSLSFKAINLILDDLLKTSKNQMELFTEAGIKRYNHKFSQSYQLSANLSDWIVSPVVKRSINETIKVFNALRKYLKTQNGDDTEFSDVVVELAREKNSQEKKDLIKKIQKANEEKRYKIMELVENRKLTSAEFERISLLLEQDFKCAYSLEPIELSDVFKAGLLEVDHIIPLSISLSDAQSNKVLVYQSENQAKGQRSPFQYFSSGKAKITFERFKEYVTKNLNFSNAKKRNLLYLGNPVEDMKGFINRNLADTRYASRETYNLLKSFFDYHNINTKVKVINGSATSYFRKKAYLSKNREETYAHHAQDAMIIAGFVNTKLMKFFSKIGAFSESLNNKDSIVEVDGNIINSETGEVLEQELFDKSENVSNYIQFLKRIESIEPLYSHKVDRKPNRALYDQQIKATRSFVEDNKEVTYIITKYSDIYNTGTGNSGSKLKKMILESPDKLLMYHHDPKTFEIFQKIVEQYGDESNPFAAYKEDHEPIRKYSKKGNGPIIESVKFRDKQLGSHRVNTKQNGYNKSVFLKIKSLRTDVYQDGENYLVLNVPYDMVSFVNGKYIIDQDKYNKSKQAQKIPESATFVTSLYRGDRITYEENGEIVECIFKCINNEKAHKIEISYVNRPTDKQVMKGIKTSIKNLTKYNVDVLGNKYKVTDEKLEFDVTI

SEQ ID NO: 8120 - protein, 1453 aa, unidentified
  REGION 1..1453: note = Description of Unknown: Cas Enzyme sequence
YFYFSFLFVIFASPNYKTMKNILGLDLGITSISFAHIVEDENKEKSEIKELGVRIVSLTTDEQSDFEKGKSISTNANRTLKHGARLNLDRYQQRRKYLIDLLQKANLITSASILAENGKNTTHSTWQLRAKAVTERIEKEEFARVLLAINKKRGYKSSRKAKTEDEGEAIDGMAIAKRLYDENLTPGQLSLQLLQQNKKLLPDFYRSDLQKEFDLVWNFQEQFYPNILTDAFYKELQGKGKDATSKAFSKRYHFDTAENKGSKESIRLQAYQWRSEAVSKQLSKEEVAYVLTEINNNLNNSSGYLGAISDRSKELYFNRQTVGQYLYAQLQENRHNSLKNKVFYRQDYLDEFQRIWETQASFHKELTDELKKQIRDVVIFYQRKLKSQKGLISFCEFESKEIDIEKDGKTITKSIGARVVPKSSPLFQEFKIWQILNNVTCKRKGIRKKKSSTNPTQLDLFNEPSQTIFSLDMECKQLLFDELNLKGDLKSDKVLKLLGYSPQEWEINYNQLEGNRTQKALYEAYLKIIEIEGYEVKDILQIKSAKDDWSLDESPLSASEIRESVKTIFQTLGICTKFFYFDPLLPVKEFEEQDSYQLWHLLYSYESDDSTSGNETLYQILEKKYAFKREHARILANVALQDDYGSLSTKAIRKIYPYIKENQYSTACELAGYKHSKLSLTTEELEARELKNIIPLLKKNALRNPVVEKILNQMINVVNALIEKNSERDAEGKITKYFHFDEIRIELARELKKNAQERYEMTQNINKAKLEHQKISEKLQKQFGIKNPTKSDIIRYRLYQELEHNGYKELYTNTYIAPDVLFSKNIDIEHIVPKARVFDDSFSNKTLAFKEFNIKKGEYTAFDYITSLNCEGEFNQYLTRVENAYKTKSISLTKYKNLLKKASEIGDGFINRDLRDTQYIAKKAKEILFQVTKNVLSTSGSITDRLREDWGLVDVMKELNMPKYQSLGLTEVEERKDGNKVTVIKDWTKRNDHRHHAMDALTVAFTKPSYIQYLNHLNARKDENNKNYSVILAIEKKETIKVPTNNGKNKRVFIEPIPNFRQVAKKHLEEIFISHKAKNKVVTKNINKPAGTDKQQITLTPRGQLHKETIYGKYQYYVNKEEKVGVKFDERTITKVSNPLYREALLKRLQANDNDPKKAFAGKNALFKKPIYLDESKTKTLPEKVNLTYLEEDFSIRKDISPDNFKDLKSIEKVIDQGVKRILIKRLQAYDNDPKKAFVDLEKNPIWLNKEKGIAIKRVTISGVSNAQPLHIGKDHLGKTTLNKEGKEIPVDYVSTGNNHHVAIYRDKEGNLQEQIVSFFEAVVRAQQGLPIIDKTYKQAEGWQFMFTMKQNEMFVFPNEATGFNPAEIDLLDPKNKKLISPNLFRVQTISIVKYGNSVVRDFKFRHHLEATLQDDKILQGITFQQIKSLEPLRNIVKVRINHLGDIVNIGEY

SEQ ID NO: 8121 - protein, 995 aa, unidentified
  REGION 1..995: note = Description of Unknown: Cas Enzyme sequence
MLRIVKYAGVYMDKELDKKEPYSIGLDIGTGSIGWAVIDDDCKLRRYKHQNMWGAHLFKEADKAATRRSFRSSRRRLARRKRRITLLQQIFDDEIQKIDPHFYLRLSESMLHLGDKNSALELDANILFADHSFTDKSYREKYPTIYHLRSDLFHNTDRQDIRLVYLALHHIIKYRGNFLVEGGVDSVISSFDNQNLQKFMDFIGADERVAKEIKNILLDRSKSRSARKSAIDKQMQLTPSTKEAIKAVVGLKWDAGKLFEDSSLDAKGEFSSKDYEEQRDAIATAIGDENYELVATLESVYRWTVFSQFIRKDSCLSDIMIERYDNYHQDLSDLKALFHKFLSKDDYKSFFHGDTAEFELYNSHKSKNSIDDLYKSIRKRLGNIAKDDLRYQRFEKRAELGEFLARQRIRDNGAIPHQIHQYELEEIIDNQAQYYPFLAQNRDKIVSIFTFKLPYYIGPLKTGGNFAWSVKKKDGVIYPWNYDEMIDDEASAEKFIDRMRNHCTYLPDEEVLPKNSLLYQEYEVRNELKNITVNGERLGADVQNDIVDKLFTVVSSVTRKKLVDYLYENQIYDTDSLAIEGFSNEKGFNSSRKSYIDFTQKIGIKITPGNQQAVEEVIKWITLFEDKKILAKKIRREYGNIFNEEKISKILRLNYSGWGRLSRKLLDGITACVQGNELTVIETMRRYKHNFMQIVQSDQYEFKKVIDKILSANQCAEIIYDDIKNLAGSPGIKRALWRSVRTIDEIVDTIGYEPKLISIEMARNEGEKVSTNSRKSQLEKMYKELIGDEADEALQHYLTPIDDVHLAPNAFCDSQRKIAALFRDAPDNDHTRRLRNGLYSLTEEVLFLHDPYTPDRYHPRISAARSLRYRELNPDKRAAFDQLYDDFFFVRHHDFWRDTALRRLRPLTASTQMLVCGEDLGMIPDSVHEVMERLRILSLELGRISKTYGVEFTDLHSAPYLSVCTTSTHDMAPLRLWWQTDADRTRRYPPPPPPP

SEQ ID NO: 8122 - protein, 1135 aa, unidentified
  REGION 1..1135: note = Description of Unknown: Cas Enzyme sequence
MSDLVLGLDIGIGSVGVGILNKVTGEIIHKNSRIFPAAQAENNVERRTNRQGRRLTRRKKHRRVRLNHLFEESGLITDFTKVSINLNPYQLRVKGLIDELSNEELFIALKNMVKHRGISYLDDASDDGNSSVGDYAQIVKENSKQLETKTPGQIQLERYQKYGQLRGDFTVEEDGKKHRLINVFPTSAYRAEALRILQTQQEFNPQITDEFINRYLEILTGKRKYYHGPGNEKSRTDYGRYTTKKDSEDEYITLDNIFGILIGKCTFYPEEYRAAKASYTAQEFNLLNDLNNLTVPTETKKLSEEQKNQIINYVKNEKAMGPAKLFKYIAKLLSCDVADIKGYRIDKSDKAEIHTFEAYRKMKTLETLDVKKMAREELDKLAYVLTLNTEKEGIQEAIEHEFADGTFSQEQVDELVQFRKANSSIFGKGWHNFSVKLMMELIPELYATSEEQMTILTRLGKQKTTSSSNKTKYIDEKQLTEEIYNPVVAKSVRQAIKIVNAAIKEYGDFDNIVIEMARETNEDDEKKAIQKIQKANKDEKDAAMLKAANQYNGKAELPHSVFHGHKQLATKIRLWHQQGERCLYTGKTISIHDLINNPNQFEIDHILPLSITFDDSLANKVLVYATANQEKGQRTPYQALDSMDDAWSFRELKAFVRESKALSNKKKEYLLTEEDISKFDVRKKFIERNLVDTRYASRVVLNALQEHFRAHKTDTKVSVVRGQFTSQLRRHWGIEKTRDTYHHHAVDALIIAASSQLNLWKKQKNTLVSYSEDQLLDIETGELISDDEYKESVFKAPYQHFVDTLKSKEFEDSILFSYQVDSKFNRKISDATIYATRKAKLDKEKKEYTYTLGKIKDIYALGTKTPSKTGFYKFLDLYKKDKSQFLMYQKDRKTWDEVIEKILKQYRPFKEKDKNGKEVDFNPFEKYRIENGPIRKYSRKGNGPEIKSLKYYDSNLGNHIDITPKNSKNKVVLQSLKPWRTDVYFNKNTGKYEILGLKYADLQFEKGTGTYKISQEKYNDIKKKEGVDSDSEFKFTLYKNDLLLVKDTETKEQQLFRFLSRTMPNVKYYVELKPYSKDKFEKNESLIEILGSADKSGRCIKGLGKSNISIYKVRTDVLGNQHIIKNEGDKPKLDF

SEQ ID NO: 8123 - protein, 1064 aa, unidentified
  REGION 1..1064: note = Description of Unknown: Cas Enzyme sequence
MGHILALDMGTASTGFAIIDENYNVLITGVRLFREGTAEENVARRRFRGSRRSIRRNHHRLDRLKELLSNVLGRSGNQSYTNLYEIRVRGLSNKLSPDELIAAIIQLSKHRGIFYLSPEDLATEDGSNRSSADIIRANENKLKAGIYPCHVQLEKLKTRGTVRGIENKFTHESYRNELIKLLEVQSKFYPQLQDITEDILCIYDSKREYYEGPGSYKSPTPYGSYQLDESGNVIKINLIDKMRGKCTYFPDELRAPKWSYSACLFNLLNDLNNLTIQGLKITEPQKQELINEYVNKGKSVTIPAIAKVCGVKKEDIFGFRIDKSEKPIFTKFEGYNELLKIAKSVNEEATIEGNKQLVDDISEILTKEKSIEVRERKLVDDLKLSTSLAKEIAKSGGFTTYHSLSFKAINLILDDLLRTSKNQMELYTEAGIKPYNHNFSQNNQLCANLSDWIVSPVVKRSINETIKVFNALRKYLKTQNGDDAEFSDVVVELAREKNSQEKKDLIKKIQKANEEKRYKIMEFVGNRKLTRAEFERISLLLEQDFKCAYSLKPIELSDVFKAGLLEVDHIIPLSISLSDAQSNKVLVYQKENQVKGQRSPFQYFSSGKTKIAFERFKEYVTKNMNFSNAKKRNLLYLGNPVEDIKGFIDRNLVDTRYASRETYNLLKSFFEYHNINTNVKVINGSATSYFRKKAYLSKNREETYAHHAQDAMIIAGFANTKLMKFFSKIGAFSESLNHKDSIVEVDGNIINSETGEVLGQELFDKSENVSNYIQFLKHIERMEPLYSHKVDRKPNRALYDQQIKATRSFVEDNKEVTYIITKYSDIYNTGTGNVGSKLKKMILESPDKLLMYHHDPKTFEIFQKIVEQYGEESNPFAAYKEDHGFIRKYSKKGNGPIIESVKFRDKQLGAHRVNAKQDGHNKSVFLKIKSLRTDVYQDGENYLVLNVPYDMVSFVNGRYIIDKDKYYKSKQVQKIPESATFVTSLYRGDYITYEENGETVECIFKCINNEKTHRIEISYVNRPTDKQVMKAIKTSIKNLTKYNVDVLGNKYKVTDEKLEFDVTI

SEQ ID NO: 8124 - protein, 1339 aa, unidentified
  REGION 1..1339: note = Description of Unknown: Cas Enzyme sequence
MKKFEDYYLGLDLGTSSIGWAVTNEKYDILRFNKKFMWGTHLFDMGNTASERRIFRTSRRRLKRKKNRIELLQTLFSAEMSKKDFGFFQRLKESQYFIEDKTIKNKNTLFMDKNYTDQDYHMEYPTIYHLRKALIDNEESAFEIRKLYLAISHILSHRGHFLFEGELSDNLDFDDIFNEFVKYLNEELNIDFKIKSSASLQAIKEILTDKTLNRTKKKEKLSELLEEEKNKIYQEIWKLLVGNEAKMSTIFDDKEYEEAKIAFSKGNYDEKEEEYESILGEKILFVQKAKAIYDWILLQNILKEDKYLSYSKVKLYDEHKKDLRILKEVLKKLDKKAYKEVFSENGLYENYVKKNGKEELYKKIKSYFNNENTDEIVKNILNKIELDSFLPKQKIKDNGVIPRQVHQKELETILKNAEKYFKWLIEKDETGLSVSEKIMKIFKFKIPYYVGPLNSKSPFAWIERKEYGKILPWNFESMVNTSKTAEKFIKRMTNKCTYLPEKDVIPKNSLLYTKYMVLNELNNLKIRGEKITVDLKQKIYTELFQKNKKIGMRTLVEFLKSQNIAVTKPEITGIDGTFNTSLGSYIDMKKIFGEKKIVKDSYKKMIEDIILWITLYGEEKKLIKSKIEEKYPEKVTPEEMKLILKLKYRDWSRLSKEFLTEIETMDEETGELISIIEMLWRKNENIMELLSYKYDFSNRIKEYNGINEKEKNITYEDLVKDLQISPSVKKMIWRALVIVKEIKKVTNKSPKKVFIEMARDTQTEKKRTEKRKDKLLELYKNIKNDDSIKELEKNLKDKTNDDLKSKKLYLYYLQLGRCMYSGEVIRLEDLMNDNLYDIDHIYPQSKIKDDSFDNTVLVKKQINADKTNEYPIDKSIQNKCKAFWTSLKERGLMSNTKYERLTRTEGFSDDELAGFISRQIVETRQATKVLADLLKVIFGSDTRVIYVKAGLTSDFRQKFGIYKFRELNDYHHAHDGYLNIVTGNIYNTLFTDNPYNFIKDRKKDNRTYNLNKVFERENDVWNPDVMLSKIERYIYKIRPLFTRASYEQKGGFSDQNISSEKDKLRPLKSSGVLSNIKYGGYDKIKNSYFFIVEYTEKKKRVRSIETLPIYIKKSISTKEDLEKYCKEELKLQEPKVLVSKLNYKSLVHSNGYEYYLNSRTADSINIQNGIQIILIKENYETYRKIYKNLEYLKLIYKDEKIREEKFLEKLPKILKKNKNDRDLSEDEISEKFWKLYKEIIEKIETGIFSKFKSTLPIYIEDCKKLKDFTTLNNYAKSRFIQEILKCLNSQQGEFDTKYTHNYSKKYNTKLSKSKILENDFYIINQSPTGLFEKKVSLDK

SEQ ID NO: 8125 - protein, 1438 aa, unidentified
  REGION 1..1438: note = Description of Unknown: Cas Enzyme sequence
FLPEHYAACIGWDRNDNATYAKFLPETEPKLAWRKADDGEHRFIFMQSFDEMLEDFKESQPSLLANGKRVPLDWTLYYLRNKALTKPIAKEELAWILLNFNQKRGYYQLRGEEDEEIPSKRVEYHELKVVKVETTDEGKGGNIWYNVLLENGWVYRRQSKYPLDKWLGQTLPFIVTTDLEADGVTPKRDKESNVKRSFRSPKEDDWTLVKKRTEDHLEKSGLTVGAFIYQHLLANPSDKVRGQLVRTIDRKYYKHELQAIIAKQMEFHPELRDAELLKACAEELYRNNGEHRAQLMAKDFKHLLVEDVLFYQRPLKSKKSLIANCPYETRQYINKETGEIKDVNVKCIAKSNPYFQEFRLWQWISNLRLLRQIDGQDVTADYIKGNDDKERLFDLLNNQGEIKQEHILRDFLKLKKPKGGEFPLRWNYVDDKVYPANETRHAMNKAIKAMIAAKEEKEAIGQLLVQPAVEYMLWNLLYSITDRNELTSALRRFALAHGISSVDAFVESFLKVKPFKKEYGAYSEKATKKLLQVMRLGKYWCGDELPEPAKRTKGNKQAVYDEMAHRGICKQTLQNISNIIEEDIDERLMGALLNPERPLMELSHFQGLSVSDACYVVYGRHSEVAEIVKWKDAGELNTFINNFKQHSMRNPIVEQCVLETLRTVRDVWEQEGQIDEIHVELGRNMKRTAEQRARDTQAIQRNENTNMRISLLLTELKNDPSISDVRPYSPSQRELLKIYEEGALENLTNQDEDIAKISRLAQPSSSELRRYKLWLDQKYVSPYTGRPIPLAKLFTPAYEIEHIIPQSRYFDNSFSNKVICEAEVNKLKDKLLGMEFIKKFGGKTKGILDEEAYKLHVTTNYAHNPAKRSKLLMEGLPTDFNSRQLNDTRYISKTVMAMLSNVVREEGERETRSKHVVVCTGGVTDTLKKDWGLQDVWHNLVYPRFIRLNNLTGSQNFGYWRYLNEENSKKGEESKKVFQITLPPECQRGFVKKRIDHRHHAMDALVIACASANIVNYLNNQSAANPHIHENLQRLLCDRKRVIRKPWPTFTQDAQKALEDLVVSFKNTVRVVNKASNTYLRYDKDGKKKRFKQEGEGLKAIRKPMHKETYYGEVNLIRKEMLPLKRALDDVNAIVDKELRASIKGLLRDGFNLQQVLANFKAKDFKFNKRDIKKVEVYVSSAKSTPMVATRKSLDTSFNAKRIADITDTGIQKILLNYLKANDNSPEQAFTPEGIAYLNEHIAEYNNGKPHQPILKVRVSEVMGAKFAVGQTGSKKTKFVEAQSGTNLYFAIYEDKDGKRNFETIALNVSAERLKTGQTPVPETNGAGIPLKFYLSPNDLVYVPTDEDRAAAHPSIDKRRIYKMVSATYKQCFFLPFTVASVISDKVEFEALNKMERVVDASEYSSAYDSSHVKKVMIKNVCWKLEVDRLGNITKIVR

SEQ ID NO: 8126 - protein, 1103 aa, unidentified
  REGION 1..1103: note = Description of Unknown: Cas Enzyme sequence
MDTKELKYVVGLDIGIASVGWATLLLDSQDEPVRILDLNSRIFDKAEVPKTGASLAAPRRMARGVRRRLRRRKFRLHRVRQYILRHHILDKVGLECLYKPKTDIDIFALRTAGLDRLLEPEEWARILLYMAKHRGFKSNRKSAAVAGGDDGVMLDAIRKNKEVLSKYRSVGEMFDKDEKFSAHKRNKGGSYEFTVARSMLEDEIKLLFEKQRDFGSAFAEKDAEEEYIELFSAQRNFDEGPGGDSPYGGNQIEKMIGLCTFEGKNGEKRAPKASYAFMATNLWQKINQIRIIEKGTERPLTAEEAGKIDEKAWKKGAMTYKDIRSEISLGDEAYFKGLSYKWTETDKEETESKVKFSLVKEYHTLRKVLDKVEKNRILQLSHDDIDNIAYIFSVYKNDDKIREALEETDLDSKDIDVLIEHLGTFSKFGHLSLKACYKILPYLEQGMVYSDACTAAGYDFRKSAQGSIADIPNPVVKRAISQTMKVLKAIKQKYGCPPVEIHIEMARELAKSFDERQKMTKSIEENQSHNERIKERLQKEFNVPYPSGQDIVKLKLYEEQNETCAYSQKHIDAAKLFHDPNYAEVDHIIPYSRSFDDTYNNKVLVLTAENRQKGNRTPMEYLSGDEARKKQFVAWVKSDIKKQRKRENLLREKFTADAENDWKARHLQDTQYISRFMLNYLQNNYELTPGNTDRKRRIIPVNGAVTAYVRKRLGISKIRENGDLHHAVDATVIAAVTQGVVNSVSKYSKRHELQYHVDEHGNCVDLVTGKLMGDAFKENHKIKGFPEPWPQFRAELEARVSENAAEAIRTLNLPTYSSDEEIKTPFVSRMVRHKTTGQAHEDTVRGKSNVADNEYVKKVALTELKLKDGEIEGYYNRPSDRLLYEALKKRLEQFGGKGKDAFKEPFYKPKSDGSPGPIVKKCKILDKINLAVQVHGGKGATANANGSMIRVDIFKAKEKNGKYSYYAVPIYVADTVKEELPNKAVCNKEYNRWPKMKEEDFAFSLYPNDVVYIGGKEIKMNAAPGCTLETTRSIQDVNLYFRGMDISTGAIRVVNHDGTYKQKSLGIKQLPLIEKYEVSVLGDLVKAIYKPRETFKHKVRRSK

SEQ ID NO: 8127 - protein, 1341 aa, unidentified
  REGION 1..1341: note = Description of Unknown: Cas Enzyme sequence
MGKGYYVGLDMGTGSVGWAVTDESYQILRRHGKAMWGVRLFESAKTAEERRMFRTGRRRLDRRGWRIEILQEIFAEEISRVDPGFFLRMKESKYYPEDKRDIQGNCPELPYTLFVDKTFTDKDFHKKYPTIYHLRKMLMETEDTPDIRLVYLALHHMMKHRGHFLLSGDISQVTEFKNTFNQFIENIRNEGMDFEIELDESAVQMIEETLKDKNLTRSAKKAKLVKGLNAKNVRDKAFLTLLSGGTVKLSDLFGMEELNEGERPKISFADNRYEEYAAVVEMELGELYYIVESAKAVYDWAILSDILGGSTSVSDAKVRAYEKHKADLKYLKAVVKEYFPKEVYNAVFVESSDKLNNYPAYIGMTKKNGKKVSLEGKRCSREEFMDFLKKNIVVKLPDEETKMYLQSELEKDSFLPKQVNKDNGVIPYQVHKYELKKILDNLGDKIPFLKENAEKIEKLFSFRIPYYVGPLRTGNGENSKFAWAERKSTEKIYPWNFENVIDVEQSAENFIRRMTNKCTYLIGEDVLPKDSLLYSKFMVLNELNNLRLDGQKISVELKQKIYRDVFCRSRKVTQKKLKSYLIREGIAGKNVELTGIDGDFKGSLTAYHDFKEKLTGVELTQKEKEEIILNIVLFGDDKKLLKQRLKKKFPQLTEKQINTVTALSYKGWGRLSKKLLEEVTVPAPETGEVWNIITALWETNDNFMQLLGKEYQFSDRIEEFNEEKADPEVSYQTIEDLYVSPAVKRQIWQTLQIVQEIEKVMGEKPKRVFVEMAREKQENKRMESRKKTLSDLYKKCKKEEPEWIETLCTSLEKHEEHQLRSDKLYLYYTQKGRCMYSGEPIDLEDLWDNTKYDIDHIYPQSKTMDDSLKNRVLVKKEYNAKKSDTYPIAADIQKKMMPFWKSLLTGGFIPKEKYDRLVRNNPLDANELAGFIERQIVETRQSTKAVAEILKKILPDTEIVYVKAKTVSKFRQDFDFIKVRDMNDLHHAKDAYLNIVVGNVYFVKFTKNAGWFVKENPGRTYNLEKMFIWDVARDGEIAWKAGKSGSIVQVRAMMEKNHILVTRRSYEVKGGLFDQQILKKGKGQVPVKESDERLRDIGKYGGYNKAAGAYFMLVSSKDKKGKEQRTIEFVPIYLKDRVEKDMESARNYLMEERGLREPKILIKKIKIDTLFKVDGFYMWLSGRTSNQLIFKGANQLILSKEDMKTLKKVVKYIQRQKEDKNVKISVRDGITEEELLKLYETFLDKIRHSIYGVRLSSQEKTLVNGKEKFIDLSVEAKCQVLYEILHLFQCQSGASNLKMIGGPASAGILVMNNNISKCKNISIVNQSPTGIYEKEIDLLRV

SEQ ID NO: 8128 - protein, 1059 aa, unidentified
  REGION 1..1059: note = Description of Unknown: Cas Enzyme sequence
MRYRLALDLGTNSIGWAVVLLDEQNPPQPVRLIRLGSRIYSDGRNPKDGSSLAAERRGPRQMRRRRDRYLKRRDHFMLALIECGLMPPFEAARKSLVPSNPYLLRRDGLDKALQPYELGRALFHLNQRRGFKSNRKTDRSAGKESGKIKLAIAAFREAMGDARTVGEALARRLDAGKSVRARLIGKGKEEHYELYVDRQWIEDEFDALWVSQRRFHPELLTDSAWGRLKGILTHQRPLRPVVAGKCFLEPDERRAPAALPSAQLFRLYQEVNHLRVETLVDRRERPLKRDERDSLVKTLAESPKKGFEILRKTLFGANREAFRFTLESENRKELKGCDTACKLARKEAFGAQWHRLSLEEQDELVLLLLDSENEAALQKALMERYGLGEAQARHVVGINLEEGFFRFSLKAIRKVLPPLRALWNDAENAPLTYDKAIIAAGYAAHTIQLPDVLLSALPYYGESLWRYTQDAPTARNPDERKWGRIANPSVHIGLNQLRKLVNALIEKYGPPSQVVVELARELKAGLEEKKRIRQAQAENTERNRKVRARLEELGQRDNAENRLRLKLFEELEKPGSRCIYSGKQISLGRLFSYDCQIDHILPFSKTLDDGFNNKLLVHRDANKYKSNRTPFEAFGKSLDGYDWEQIVDRASRLPKDKRKRFEPDAYESWLRHEADFLARQLTDTAYLARVAKQYLASICSGKQVYVSPGRLTSMLRGKWGLDRILAPYDENGELRSIKNRNDHRHHAIDAAVIGVTDRSLLQRVATLAGRAREVDTERLLANMPWPWDSYRLEVEEAIRRCVVSHKPDHGPEAALHNDTAYGIDEGPREDGKYLVHHRVALTALKPGDESRIRCETPLHEAICVALGQKEPKAREASLDALSARYGQRKVRYVEPMSVVTIRPRGKDGQSLPDSFPYKAYKGDSNYCYELFVNERGRWDGELITTFRANQKAYRKFSENKLRFRRETAAGRPLLMRLCVNDMVALEEGGVRRLMRVAQLSEGKIVLAEHFEGGPLRDRDRSAGDPFKYMTKSPGVLRELKARRVFVTLLGQVLDPGFRG

SEQ ID NO: 8129 - protein, 936 aa, unidentified
  REGION 1..936: note = Description of Unknown: Cas Enzyme sequence
KCSTLGEYFYTLYQKGKKIRGEYTHRIEHYLTEFNFICNKQNISTEIKEAIEKAIFFQRPLKSQKGLVAKCPLENRKACVPISHPDFEEFRILSYLNNVKIKYPTDEKLRLLNEEEREQIQSLFFRKSKANFDFIEIAKKLTPKGLVPKCYKDKEVSNENVLFNYNLGSNVAGCPTIANLVDVFGTNWRDYLLSNFVKNTKVENNSRVPKSIEDIIDDVWHVLFRFDNDKLLKQFAFENFHCDEKTATKFSKIKLKQDYGSLSLKAIRNILPYLRQNLIYSHAVFLANMKNILPTEIWNNEENKKVINNEINSIIENYKLYSNNIDIVNGLIKNVKKENGTWSSSNDFVAEAYRNGLNKQVKDFFGTKKWNETPEIYQNKILTECFELFSNQMKRNSGRGEFAKKHTIDEILKTFLSDNFDVTEESLKKLYHPSAIEVYKKAKRSDEDGKKYLGSPLISSIKNPMAMRSLHQLKKVINQLIKDDMIDEDTLIHIEMPRELNSSNERVAIRQWNEDLKNRKNKYSEEIKSIFRGEIKTEYCDDANSKYNDYEPTESDILKYQLWFEQNKVCLYTGKTICLSDFIGNNPKFDIEHTIPRSRSLDNSQMNKTLCCATYNRQTKKDKIPFECPNHDEISPRIKHWYARYKALEQQLKDLSKKVKAASTKEKRDKYIIDRTKLRFEYSYYFNKYKSFTREEVPEGFKNSQSVDIGIISKYGNLFLKTVFNKVYPIKGKTTANLRQMWGLNEKSRDNHAHHAKDAVVVACCTRDINDALANYYHDLEQFEFFGKPKPSFSHRIPWEGFHKDVDDFDNNTLISHHTPDNLPVQSKKAIRKRGIIQRNEKGEIKYKQGDTVRGALHKESFYGAIKREEVDKKTGEIIETIKYVKRQAIELFKDTDLKNIVDDKIKEIVTNGREKEKQLKKEIEELKKQLKNLKE

SEQ ID NO: 8130 - protein, 1376 aa, unidentified
  REGION 1..1376: note = Description of Unknown: Cas Enzyme sequence
MSDFDKYKDQICTHKGFKRGNYFIGFDIGTNSVGWAVTNEKYELLKFKSHKMWGSRLFAEAQTAVDTRMKRSARRRLQRRKFRLLLLEELFAKAINAVDDTFFLRLHESKYHVEDKTNPVKYTLFMDKDYNDVDYYKEFPTIYHLRHHLMTEGTKDIRLLFLAIHHILKYRGNFLYGKKEFSVDGEIYSVLRSTLEELGFGSYVEDASVLQSIANLVLDRGIVRGEKVKQIEPLITQGKKLSSVEKNRLKAWAYLIMGFKANLVNLFTDEDVEVPLPEEKEFKSINLHEGIYEDVRDAYEDAWGDRFVIVDQCKILHDIIVISSIIKPGQSLSEAKIESYNQHKEDLGLLKSVLKEDQKLYDDMFVVDIDKGTNYIKYIKQGVNGNTSTTQEAFYKYVRKVLSVLPETEHTRCIVQKIEEGLFLPLQRISKNGVVPYQLHKEELVRILDKAKVNFPFLNEVENGLTVADKIISILEFKIPYYVGPLNPTHSIENGGFAWVVRKEAGQVLPWNFEQKVDVQASAVKFIENLTNKCTYLIDQDVLPKYSLLYAEFSLLNELNNIRVNDKPLPADVKQAFIRDHFMSLQDSKTATKKVVTKYLVDNNYVSQPPIITGMDQQIATKLTSHRDMTRILGEHFDHAMAEDIIRYITIFGESKDMLRQVLKNYYGDRLTTEQIKKLGKLTYTGWGRLSKKFLSDIWGMKKNDDDAEAGTIIKHMREGQENLMQLLSSSYSFIDVVQEYVTNVLGAKEKTAFEMLEDLSLSPMVKRSVWQTLRILDEIVSIRKELPKKIFVEVARTNKADKKRIQSRKALLEELYEQIKDEDVHVLQQELESKEDSALNSKKLYLYFTQMGRCMYSGRRIDIHELFTDTYDIDHIYPRSLTKDDSWHNIVLVEKQLNAEKTDRFPILSAIQSKQKGFWKLLWDRGFISEKKYDRLVRTTDLTDEELNQFINRQMVSTNQSVKAVTTLLHQLYPETEVVFSKAENVSDFRHDYDFVKVRSINHHHHAKDAYLNIVVGNVYHEKFTKNFLSFAKQKGTHRTYNLTKMFEYEIKLTEESKKVIWDPNIHMEIVKKMMKSNDVRVTQRAVPQKGGLSDETIYKKGIAKRGVYLPLKSSDERVRDVEKYGGRTSITISEYIILNIRDTSDQDRIEIFSLPLYIAGKKDIHKAIEEAYLSTCKKPASVVDIQILYRGLYIGSKVNINGFTYYMGGKTGSNVSVDSAVDVVMDITSSVYIKLLEKVAIKKIENSKTFRIENIKTSYNHKEVTVSKEQNIALYQELLKKLDTPLFSKMKGNKLEEFRTVGFDTFIALSLEDQASVLLEVLNVLTNFKTKRDITKIGMTSSRSTLGINISNTEQFSVITTSITGLYEQEIKIK

SEQ ID NO: 8131 - protein, 1485 aa, unidentified
  REGION 1..1485: note = Description of Unknown: Cas Enzyme sequence
MKNILGLDLGTNSIGWAKISIDDNGKYIKDSIKLGSRIIPMSQDVLSNFSKGVTLSQTSERTSFRGARRLRERTLLRRERLHRILHLLGFLPKHYEKAIGWDRNDNKTYGKFINHAEPKLAWCKDNNGKMRFLFMDSFHDMLSEFSEKHPELLANGKKIPLDWTIYYLRKKALYKAITKEELAWILLNFNQKRGYYQLRGEEDRDSEANKKEYLELKVIGVEATGEKKGNDIWYNIHLENGWIYRRSSKNPLNDWLGKVKSFIVTTDLDADGNPKKDKDGNIKRSFRAPSEGDWTLIKKRTESLLENSGQTVGQFIYNHILEEPSAKIRGNFIRTIERKYYKDELKAILEKQKEFHHELSSESLLTECAKELYKRNIAHQEVLLKKGIIHLLLNDILFYQRPLKIKKSLIDNCPYENYKYVDKKSGDIKVKSIKCIAKSNPFFQEFRLWQFVSNLRLYRKSDDKDVTSEHLVTTDDYANLFTYLNNRKDIKQSVLLKEYFKIKKVKTINGAEYPVRWNYIDDDNKTYPCNETRYDILHALSKTELKSEWLTPERTYRLWHLLYSIESKEETKKALNKLNLSDNFTEAFLTIKPFKKEYGSYSEKAIKKLLSLMRMGYLWSEDEAIKQVGAEIEKTIEGELPDYVLQRLEKSQHNYNKISDFSGLPLWLASYIIYGRHSEAKEIIHWDNPESMMAYIKDFRQHSMRNPIVEQCVLETLRTVHDIWKEIGHIDEIHIELGREMKSTSEQRKAITQNVLHNQNTNIRIKLLLQELKNDNNITGVRPYSPMQQEILRIYEEGALQGLTKEDKDYNDILKISQTAQPTSNELTRYKLWLEQKYRSPYTGKAISLSKLFTSAYQIEHVIPQSRYFDDSLSNKVICESEVNTLKKAMLGMEFIKTCGGQKVHCTLLGDVEIYNEEDYKAFVNEHYSNNRTKRNKLLMEDIPQEFINRQLNDSRYISKMVKQLLSAIVRGQEEVEATSKFVIPCTGGITDRLKKDWGLNDIWNNLVSPRFQRMNALTGSEYFGHWENKEGKRVFQTTMPIQLQQGFSKKRIDHRHHAMDALVIACASRNIISYLNNETAQDTERRRDLRQKLCDKGGSVRKPWDSFTQDTQYALKDIIVTFKNYVRIINKATNYYEHYKTDGKKGMISQKGDELWAIRKPMHKETVFGKVNLRRPKRVSLSKAIDSVDIICNRKLKKYIKARLNEGLQKKQILNIFKELNNVWEGIDVNKIDIWEMSNDKEPMVATRKQLDTSFDEKKIRSISDTGIQKILLNYLITKNNNPELAFTPEGIQEMNSNISEYNDHKKHQPIYKVRVTEPLGAKYPIGTMGNKPKKFVEAQAGTNLYFAIYEDKEGNRNYDTIPLNIAAERLNQQLSPVPETNENNIPLKFYLSPNDLVYVPSEEERHSGNNIQLDKNRIYKMVSSTSKQCFFIHHRVAISLVDKKEFSAQNKMERSIDNEQVMIKSVCWKLITDRLGNIIKVIK

SEQ ID NO: 8132 - protein, 1150 aa, unidentified
  REGION 1..1150: note = Description of Unknown: Cas Enzyme sequence
MAVTLPKDDVHYKVGIDVGLNSIGFCAVEVDGDDQPIRLLNSLVFRHDAGVDPSAQKSSLTRKKISGVARRNRRANRETKKRLVALDRLLSEELGWPLPNLEGYPDPHEPWHVRAQLLDSYIANDAKRKEKLSIAMRHIARHRGWRNPYMKPALLASLSYPSDFLTKLNEDTSRVIGRKFAAEATQGQLVDAFILGSLSLATTPELQVLEESEKDNSKNKPRDIVLGRVRGDKGVIGGKLHQSDNAEEIRRICATQKISQEQVQRLIEAVFKAKNPREVGAAYKLVGHDELPGQEKYIRAERAHPAFQKFNIVATLTNLRINEAGSKRSLSSKKLQTLTNYLSNVGPKDEVTWFDVAEKLNIDRSDLQGTARASYDGQAALKRPPRDLTSVSINKSKVKTLKNWWKQAPEDQRGQLIDYLSNSGGSDTPQTDHELDDLTKLTQSFSEKDLEELEKISLPAGRAAYSVNSLTKLTELMLEEGIDLHEARKRLFNIGDDWKPTPEPINSPVGNPAVDRVLKQVARWIDMATERWGIPVSVNIEHVRGGLISDKVAKKIIRENQARKEKKDEAGEKLAEQLRLSGRAKDNLIKKQFAIQRQNSQCLYCGTELEFGEAEMDHIVPRTNGGSNNRRTNLAAVCKDCNSSKSNTPFAAWLSSGKAGPKVSWEEVKGRVNSMILEKADLPEDYDDDSLIEFYSKNESKKFRKEIIARLESKKPEEEFDGRSLESVAWMAVELRGRIVGYYESLLKDTGQKVPQVGVYRGDIIAEARKASEFEDRVELLGRKGKTRLDRRHHAMDALVIALMNQSVSQALSWRRQLRDSQRISGKPETWKKFHGSDRDGDRHWEAWAKAMRIAVELFNNALEKDEVHFSENKRLGISLAKAHDDTIKSLCSYALGGAFSVELIDRAETPALWTALTNQPDFDVKNGLPADPTRHITVNGKHFGPTDKVNFFTSDAPAIKVRGGFAGIGDTIHHARIYRINGKKTTYAMVRVFQTDLRRMKHKDLFTEPLKPSTISMRTASKTIRKALTDGTATQIGWLVEGDEIRIETDHYPSDDIGKLLDEYSEASSWRVCGFPDVLKIRLRPNLLSEEGFDDNTAAAVRKIVSGAGWRVSMNTLLSGGLVTVIRRNALGEERWVSRAHLPVSVDLS

SEQ ID NO: 8133 - protein, 1323 aa, unidentified
  REGION 1..1323: note = Description of Unknown: Cas Enzyme sequence
MKNNGNNLQQGNYYLGLDVGTSSVGWAVTDTEYNVLKFKGKSMWGARLFDEASTAEDRRIHRGNRRRLARRKYRLLLLEQLFEKEIRKIDDNFFVRLHESNLWADDKSKPSKFLLFNDTNFTDKDYLKKYPTIYHLRRDLIHNPTEHDIRLVFLALHHLIKYRGHFIYDNSANGDVKTLDEAVTDFEEYLNENDIEFEIENKKEFINVLSDKHLTKKEKKISLKKLYGEITDSENINISVLIEMLSGSSISLSNLFKDIEFDGKQNLSLDSDIEETLNDVVDILGDNIDLLIHAKEVYDIAVLTSSLGNHKYLCDAKVELFEKNKKDLMILKKYIKKNHPEDYKKIFSSPTEKKNYAAYSQTNSENVCSQEEFCLFIKPYIKDMAKSENEDEVRIAKEVEDKSFLTKLKGTNNSVVPYQIHERELNQILKNIVGYLPFMNDKQEDISVVDKIKLIFKFKIPYYVGPLNTKSTRSWVYRSDEKIYPWNFSNVIDLDKTAHEFMNRLIGRCTYTNDSVLPMDSLLYSKYNVLNEINPIKVNGKAIPVEVKQAIYTDLFENSKKKVTRKSIYIYLLKNGHIQKEDIISGVDIEIKAKLKSHHDFAQIMEENKCTPEEIEKIIKGILVYSDDKSMLIRWLKNNIKGLSDNDIKYLAKLNYKEWGRLSKTLLTDIYTINPEDGEACNILDIMWNTNATLMEILNNKKYQFKQNIEDYKVENYDVKQSLHEELDDMYISPAARRSIWQALRIVDEIVDIKKSAPKKIFIEMAREKKSTMKKKRTESRKDILLELYKSCKSQADGFYDEELFEKLSNESNSRLRRDQLYLYYTQMGRSMYSGKRIDFDKLINDKNTYDIDHIYPRSKIKDDSITNRVLVEKDINGEKTDIYPISEDIRQKMQPFWKILKEKGLINEEKYKRLTRNYELTEEELSAFVARQLVETQQSTKALATLLQKEYPSAKIVYSKAVNVSEFRNRKDKELPKFREINDLHHAKDAYLNIVVGNVYDTKFTEKFFLNIRNENYSLKRVFDFNVSGAWDAKGKTFDTVKKYMAKNNPIITFAPYEVKGELFDQQIVPKGKGQFPIKQGKDIEKYGGYNKLSGAFLFAVEYKGKKTRERSLETVYIKDVDLYLKDPIYYCESILGLKEPRIIKPKILMGSLFSINNKKLVITGRSGKQYVCHHNYQLSISDKDAQYLKDIAKYLQEEPEGNIERQNVLNITTINNMKLFDVLCTKFNSNIYENVLSSLKNDVNEGREKFSGLDILEQCKILLQLLKAFKCNRESSNLEKLNNKKQAGVIVIPHIFTTCNVFKMVNQSITGLFEQEVDLLK

SEQ ID NO: 8134 - protein, 944 aa, unidentified
  REGION 1..944: note = Description of Unknown: Cas Enzyme sequence
YDKKAYNDMFRKMTDKNYSAYVGSVNSNITKERRNVDNRTIEDLYEYIKKIALKNIPDDNQDKIEILEKIQTGEFLKKQLTASNGVIPNQLQSRELRAILKKAENYLTFLREKGEKNLTVSEMIIQLFEFQIPYYVGPLDKNPNKDKNSNSWAIIPSSGRILPWNFEEKVNVKDSAEKFIEKMVRKCTYLSQEHTLPKQSLLYEKFMVLNEINNIRVNGEKISVEAKQKIYNDLFIKGKKISQKAIKQELISLNIMDKDSVISGIDIMCNASLSSIGKFRGIFDDEINNQSIINMIEDIIFWKTIYNDEKKFVKEKIEEKYEGKIDKNKMKRILGLKFSNWGNLSKSFLELEGADTDTGEVRSIIQSLWETNFNLMELLSSRFTYTQELEKRVKKLEKPLSQWTIEDLDDMYLSSPVKRMIWQSMKIVDEIQTVLGYEPKRILVEMTRKEGEKVRTKSRKDKLKELYKKIKDDSRQWIKELDAKEESYFRSKKMYLYYLQMGRCMYSGESIDLDKLMDDNLYDIDHIYPRSFVKDDSIDNLVLVKKDINNRKQNDPITPQIQAQCQGFWKVLFDHGFMGNEKYSRLTRKIQEFSDEEKLSFINRQIVETGQATKCMAQILQKSMGEEVDVVFSKANLVSEFRHKFNLFKSRLVNDFHNANDAYLNIVVGNSYFVKFTRNPANFIKDARKNPDNPAYKYHMDRFFERDVKSKSEVAWIGQSEGNAGTIAIVKKTMAKNSPLITKKVEEGHGGIINETIVGVKKIKFGRSKEEKADKTPKKINFKAYSPIKTSDVRLCNIERYGGRTSISTSGYCLVEYTKKKKTIRSLEAIPVYLGRKNNLTEDVLLEYFKYYLNEDEKNTVTNIRICLPFIPLKSLIKVNGYLYYIGGKTNEQLYINNAQQFKMKKEEVDYIRKIEKAVLLSKFDEIDREKNPVITQEKNINLY

SEQ ID NO: 8135 - protein, 1140 aa, unidentified
  REGION 1..1140: note = Description of Unknown: Cas Enzyme sequence
MNGLVLGLDIGIASVGVGILKKDSGEIIHTNSRLFSAATADSNIERRGHRGGKRLTRRKKHRSIRLHDLFEDFGLLTDFSKVSINLNPYQLRVQGLDNQLTNEELFIALKNIVKRRGISYLDDASEDGGTVSSDYGKAVEENRKLLAEQTPGQIQLDRFEKYGQVRGDFTVVENGEKRRLINVFTTSAYSKEAERILRKQQEFNKKITDEFIEDYLTILTGKRKYYHGPGNEKSRTDYGRYTTKKDPEGKYITLDNIFGILIGKCTFYPDEYRASKASYTAQEFNLLNDLNNLTVPTETKKLSEEQKKTIVEYAKTAKTLGASTLLKYIAKLIGASVDQIHGYRIDPNKKPEMHTFETYRKMQSLETIRVEELPRKVLDEFAHILTLNTEREGIEEAINATLKDTFSQDQVLELVQFRKNNSSLFSKGWHNFSLKLMMELIPELYETSEEQMTILTRLGKQKSKETSKRTKYIDEKELTEEIYNPVVAKSVRQAIKIINEATKKYGIFDNIVIEMARENNEEDAKKEYIKRQKANLDEKNAAMEKAAFQYNGKKELPDNVFHGHKELATKIRLWHQQGEKCLYTGKNIPISDLIQNQYKYEIDHILPLSLSFDDSLSNKVLVLATANQEKGQRTPFQALDSMDDAWSYREFKSYVKDSKLLGNKKKEYLLTEEDISKIEVKQKFIERNLVDTRYSSRVVLNALQDFYKEHQFDTTISVVRGQFTSQLRRKWGLEKSRETYHHHAVDALIIAASSQLRLWKKQNNPLVSYKAEQFVDQETGEIISLSDDEYKELVFKAPYDHFVDTLKSKEFEDSILFSYQVDSKYNRKISDATIYATRKAKLDKENKEYTYTLGKIKDIYALGTKSPSKTRFYKFLDLYNKDKSQFLMFQKDRKTWDEVIEKIIEQYRPFKEYDENGKEVDFNPFEKYRIENGPIRKYSKKGNGPEIKSLKYYDNLLGKFVNITPSESKNPVALLSLNPWRTDVYYNTETSKYEFLGLKYADLCFEKGGSYGISEVKYNKIREKEGIGKESEFKFTLYKNDLVLIKDTETNCQQIFRFWSRTGKDNPKSFEKHKIELKPYEKARFEKGEELEVLGKVPPSSNQLQKNMQIENLSIYKVKTDVLGNKHFIKKEGEEPKLKF

SEQ ID NO: 8136 - protein, 1359 aa, unidentified
  REGION 1..1359: note = Description of Unknown: Cas Enzyme sequence
LEEQMKKFYLGMDIGTDSVGIAGTDENYNLLRARGKDLWAVRLFDEAKDASARRMKRTARRRLQRRKQRIEWLQELFAPYIEDKCFFLRLNNSGFEKEDKHESLQSQYSLFADAGYTDREFYKKYPTIFHLRRALAERASEEKTDLRLYYLALHHIVKYRGHFLFEGDSISDIRDIKKLFEEFNAVAEDIFPEGDIRLPLEKAEAFRALALSAKGIRDKKKTGEELFETNSPALAELVGLLLGAKAKIGVIFGEEYGEYKEEKLSFKEILDEDFEAKQELYGDNYPLLEAARSIYNYFVFEKILDGNHCISAAMVAVYERHRRDLRLLKNFVKTQFSKEIYYKIFRSEKEAANYCNYISYTKTEKKKIFVKKCKYGDFCKFLKKTLTENRDCVKDKKTLDDILFKIENGDFLPKILNADNGLFPHQINGAELDKILANLCKEYPCFAEKEADGFSVAEKIRKIFLFKIPYYVGPLNNYHEENGNSWVVRKSGKITPWNFEDMVDTASSNEKFIRRMTNKCSYLYGKDVLPKCSMYYQAFDVLNQLNKIKFNEQPISVEMKQELFHSLFLRHRKVTKKLIKEYLTATGKYTSAEAKELSVSGFDGELKANMGAYITLKNCLGDYVDEHPETCENIILWHTLNTDKTIVERQILSHYGDVPVIKEKIKALKGITSFKEFGRLSKELLCELIGGEDPVTREVYTILNRLYHTNFNFNELLFSDTYRFNSAIEAMNAGKDGDVGYDDVKELYVSPMVRRGIWQALTMADEYVQAVGRVPDKIFIEVTRQGDEKKKPTVSRKNQLLENYKGLGQDCRNIDELLTELNDKTDSQLRQERLYLYFKQLGRCAYTGQLIRLEELNGDLYDVDHIMPRSITKDDSLENKVLVRREKNAQKSDEYPLPAGFTDQQRFWKLLRDKGLMSEKKYALLTRTKPLTEDDFRDFINRQLVVTNQTVKAVAELLKRKYGEKGTRIVYSKAKNVDGFKNQYDIVKCRETNDLHHARDAYLNIVVGNVYDTKFTSAYDYYYRKGDAWREYNLKTLFERPVKDAWIGREGIAFVKDVLRKPSMLITRYAYINKGEFYNETIYGKDDKGISAPRKSIEPYNKTEKYGGYKSLTTAYFSVVESKDKKGKLIKTVEAIPVLADYQSKGDREAVLAYLSRMGLREPKLLLPKIKIKSLVSVNGFKVWLAGVTGNRLIIHNAQQWFTDEKTDLYIKNLGKLVEWERTGKIAEEEKARETFSMIKNRKEEVSLLIDRSQNVALYREIVAKLQTKLYRGLSAARSFAEKLSAKEEIFVSLSVLEQAKVLLQIARFMKCNAEAADLSLLKDGAACGILLIGKNITDVDFAVIHQSPCGINTYIQRV

SEQ ID NO: 8137 - protein, 1031 aa, unidentified
  REGION 1..1031: note = Description of Unknown: Cas Enzyme sequence
MNAKTQNYILALDLGVASVGWGVVGLDEQERPNSIIDLGVRLFDKSEDPKTGESLNSARRAYRLQRNAYKSKKVLVKQVKALLLKHNLLQNTELSQHNLSHKTWELRVKALDNKLSNKELASILIHIAKNRGFQTKANNSDDKKAGLVLSSISNNHQLLNAYRSLAELAVKHFQLNDSHIRNKAGNYTHSFARQDIVNEIELIFKNQRQFGNQNATIELEKAYIELINYQKPSLTGDSLLKMVGKCTFEKEQYRAPKASYSAERFILLSSLTGLKVLENGEQRTLTQSERELLIQKAYELNKITYAQIRKWLGLSDSAIFNFLRYQKLDKVNVETKVFVELKHYHQLKKAFENANLENEWNVISNNGQLLDEIAFTLTICKEESEIRQKLAKLNELNDKVIDVLVNIRFTQFINLSLVCLNKINPLMEMGKTYLEATSEVYGAYNRKTGTKLNQLLPVIPVSDISNPIVLRTVTQARKVINAVIRKYGQPAYIHIESGRDLGKSYQERQAITRQQAKTAKENEKLKVRLAKEFNVRDTNSNVLKLKLFEQQNGKCLYSGKNIDRNKLFSNGYVEVDHALPYSRTYDDSANNKVLVLASENQTKRNRTPYEWLNGADNSTQWKNFKSLVEASDFSYHKKQILLTKQLSDNEFKARNLSDTRYINAYLSKFIADNLLLVGKGKQKVFTPNGRITSFLRYNWGLTKNRQENARHHALDAIVIACANEYMQKEITQFAQKRECNELAVNEYVDVKTGEIKQLNFPEPWAGFPKELMARVYSDDPKAELGDMENIDLNNVKPLFISRMPTGGASGQGHKETIKSVKNAGENRSVKRVDLKSLNLDMLERFVAKDTEKALYKSLKKRLEESKNDPLKAFTEPLKQRGKVVRAIKVWETQKSGLQVRNGIADNGDTVRIDIYTKDGKNYIIPVYAHHIAKKVTPNAMITNGKTEDEWDKLDDTYQFKFSLFPNDLIKISNKKESFIGYYKGADRSNGGLTLLSHDCVDANKIKRFGPKTATIEKLEVDVLGNVTGLKA

SEQ ID NO: 8138 - protein, 1371 aa, unidentified
  REGION 1..1371: note = Description of Unknown: Cas Enzyme sequence
MIKKPYSIGLDIGTNSVGWAVITDDYKVPSKKMKVLGNTNKHFIKKNLIGALLFDEGTTAEDRRLKRTARRRYTRRKNRLRYLQEIFTEEMSKVDSSFFHRLDDSFLVPEDKRESKYPIFATLKEEKEYHKNFSTIYHLRKHLADSKEKADLRLIYLALAHMIKYRGHFLYEESFDIKNNDIQKIFNEFLCIYDNTFEGNSLSGQNSQVEAIFTDKITKSAKRERILKLFPEKESIGLFAEFLKLILGNQADFKKHFNLEEKAPLHFSKDTYDEDLENLLGQIGDDYTNLFLVAKKLYDAILLSGILTVTDPSTKAPLSASMIERYENHQKDLASLKQFIKNNLPEKYDEVFSDQFKDGYAGYIDGKATQEAFYKYIKNLLSKFEGADYFLEKIEREDFLRKQRTFDNSSIPHQIHLQEMNAILRRQGEHYPFLNENREKIEKILTFRIPYYVGPLASGNSDFAWLTRNSEEAIRPWNFEEIVDKASSAEDFINKMTNYDLYLPEEKVLPKHSLLYETFAVYNELTKVKFIAEGLRDYQFLDSGQKKQIVNQLFKEKRKITEKDIIHYLHNFDGYDGIELKGIEKQFNASLSTYHDLLKIIRDKEFMDDPKNEAILENIVHTLTIFEDREMIKQRLAQYNSLFNDKVIKALTRRHYTGWGKLSAKLINGIRDKQTGNTILDYLIDDDKINRNFMQLINDDGLSFKEIIQKSQVVDKTDDVKQVVQELPGSPAIKKGILQSIKIVDELVKVMGHNPESIVIEMARENQTTARGKKNSQQRYKRIEDSLKNLASGLDSNILKENPTDNVQLQNDRLFLYYLQNGKDMYTGEALDINKLSNYDIDHIIPQAFIKDDSIDNRVLTSSKDNRGKSDNVPSLEVVQKRKAFWQQLLDSKLISERKFNNLTKDERGGLDERDKVGFIKRQLVETRQITKHVAQILDSRFNTEVNEKNQKIRTVKIVTLKSNLVSNFRKEFKLYKVREINDYHHAHDAYLNAVVAKAILKKYPKLEPEFVYGEYQKYDLKRYISRSKDPKDIEKATEKYFFYSNLLNFFKEEVHYADGTIVKRENIEYSKDTGEIAWNKEKDFATIKKVLALSQVNIVKKTEVQTGGFSKESILPKGNSDKLIPRKTKDILWDTTKYGGFDSPVIAYSILLIADIEKGKAKKLKTVKTLVGITIMEKAAFEKNPITFLENKGYHNVRKENILCLPKYSLFELESGRRRMLASAKELQKGNEIVLPVYLTTLLYHSKNVYKLDEPEHLEYIQKHRYEFKDLLNLVSEFSQKYVLADANLEKIKNLYADNEQADIEILANSFINLLTFTALGAPAAFKFLGKDVDRKRYTTVSEILNATLIHQSITGLYETRIDLSKLGED

SEQ ID NO: 8139 - protein, 1107 aa, unidentified
  REGION 1..1107: note = Description of Unknown: Cas Enzyme sequence
  MOD_RES 560..563: note = Any amino acid
MSIINFQRRRLMETQASNQLISSHLKGYPIKDYFVGLDIGTSSVGWAVTNKSYELLKFRSHKMWGSRLFDEGESAVVRRGFRSMRRRLERRKLRLKLLEELFADAMAQVDSTFFMRLRESKYHYEDKTTGHSSKHILFIDKNYTDQDYYKAYPTIYHLRAELMKDGTDDIRKLFLAVHHILKYRGNFLYEGASFDSNASTLDDVLKQALENITFNCFDSSAAIGSIGQILMELGKTKSDKAKAIERLVDTYIITDEVDTSGKTQKEQVKEDKKRLKSFANLVLGLSASLTDLFGSVEDLDEDLKKLQIIGDTYDERRDDLAKVWGDEIHIIDDCKSVYDAIILMSIKEPGLTISESKVKAFNKHKDDLAILKSLLKSDRSIYNTMFKVDEKGLHNYVHYIKQGRTEETSCNREDFYKYTKKIVEGLSDSKDKEYILSQIELQTLLPLQRIKDNGVIPYQLHLEELKAILAKCGHKFPFLNEVADGFSVAEKLIKMLEFRIPYYVGPLNTHHNVDNGGFAWAVRKASGRVTPWNFDDKIDREKSAAAFIKNLTNKCTYLLXXXXLLGEDVLPKSSLLYSEFMLLNELNNVRIDGKPLEKAVKEHLIEAVFKQDHKKMTKNRIEQFLKDNNYIPEKHKPEITGLDGEIKNDLASYRDMVRILGNNFDLSMAEEIITDITIFGESKKMLRETLRNKFSSRLDDEAIKKLSKLRYRDWGRLSRKLLNVIEGCDKAGDGTPETIIILMRNFSYNLMELLGDRFSFMERIQEINDKLTEGQIVNPHDIIDDLALSPAVKRAVWQALRIVDEIVHIKKALPARIFVEVTRSNKAEKKKKDSRQKRLSDLYAAIKKDDALLSGLTNEEFGGLKSGLAKYDDAALRSKKLYLYYTQMGRCAYTGEVIDLSQLNTDNYDIDHIYPRSLTKDDSFDNLVLCKRTANAQKSDTYPISKDIQKAQKPFWTFLKQQGLISERKYERLTRITPLTADDLSGFIARQLVETNQSVKAATTLLRRLYPGVDVVFVKAENVTDFRHDNDFIKVRSLNHHHHAKDAYLNIVVGNVYHERFTRNFPAFFKKNGANRTYNLAKMFNYDVNCTNAKDGKAWDVKTSMDT

SEQ ID NO: 8140 - protein, 1164 aa, unidentified
  REGION 1..1164: note = Description of Unknown: Cas Enzyme sequence
MKKFEDYYLGLDLGTSSIGWAVTNEKYDILRFNKKFMWGIHLFDMGNTASERRIFRTSRRRLKRKKNRIELLQTLFSAEMSKKDFGFFQRLKESQYFIEDKTIKNKNTLFMDKNYTDQDYHMEYPTIYHLRKALIDNEESAFEIRKLYLAISHILSHRGHFLFEGELSDNLDFDDIFNEFVKYLNEELNIDFKIKSSASLQAIKEILTDKTLNRTKKKEKLSELLEEEKNKIYQEIWKLLVGNEAKMSTIFDDKEYEEAKIAFSKGNYDEKEEEYESILGEKILFVQKAKAIYDWMLLQNILKGDKYLSYSKVKLYNEHKKDLKILKDVLKNLDKKIYREVFSENGLYEEYLRIEKKKIGSKEEKTKDILYNRLKKIFETRDNMAIEDILNKIELDSFLPKQKIKDNGVIPRQVHQKELEIILKNAEKYFTWLAEKDETDLSVSEKIIKIFKFKIPYYVGPLNLKSPFAWIERKEYGKILPWNFENMVDMSKTAEEFIKRMTNKCTYLPEKDVIPKNSLLYTKYMVLNELNNLKIRGEKIKVELKQKIYTELFQKNKKIGMETLIEFLKSQNIVVTKAEITGIDGTFNTSLGSYIDMKKIFGEEKIVKDSYKKMIEDIILWITLYGEEKKLIKSKIEEKYSDKITSEQIKLILKLKYKDWSRLSKEFLTEIETMDEETGEMINIIQMLWRKNENIMELLSYKYEYSDRIKEYNGIKEKNMTYKDMVEELQVSPSVKKMIWRALVIVKEIKKVTKKSPKKIFIEMARDTQTEKKRTEKRKDKLLKLYKNIENDDSVKELEKNLKDKTNDDLKSKKLYLYYLQLGRCMYSGEIIRLEDLMNDNLYNIDHIYPQSKTKDDSFDNIVLVKTGINQAKLNIYPINKDIQDKCKALWTSLKEKELISNTKYERLTRTEEFSDDELAGFISRQLVETRQATKILADLLKNVFGSETRVIYVKAGLTSDFRQKFGIYKFRELNDYHHAHDGYLNIVAGNIYNTLFTDNPYNFIKDRNKENRTYNLNKVFERENDVWNPNTMISKIERYIYKIRPLFTRVSYEQKGGFSDQNISSEKDKLRPLKSSGVLSNTRYGGYDKIKNSYFFIVEYTEKKKRIRSIETLPIYIKKSIITKEDLEKYCKEDLKLKEPKILISKLNYKSLVYSDGHEYYIN

SEQ ID NO: 8141 - protein, 1373 aa, unidentified
  REGION 1..1373: note = Description of Unknown: Cas Enzyme sequence
MENKNYSIGLDIGTNSVGFAVITDDYKVPSKKMKVLGNTDKRFIKKNLIGALLFDEGTTAEARRLKRTARRRYTRRKNRLRYLQEIFVGEMSKVDSSFFHRLDDSFLVPEDKRGSKYPIFATLVEEKEYHKKFPTIYHLRKHLADSKEKADLRLIYLVLAHMIKYRGHFLYEESFDIKNNDIQKIFNEFISIYDNTFEGSSLSGQNAQVEAIFTDKISKSAKRERVLKLFPDEKSSGLFSEFLKLVVGNQADFKKYFDLEEKAPLQFSKDTYDEDLENVLGQIGDDFADLFVAAKKLYDAILLSGILTVTDPSTKAPLSASMIERYKNHQKDLATLKQFIKTNLPKRYDEVFSDQSKDGYAGYIDGKTTQEAFYKYIKNLLSKFEGADYFLEKIEREDFLRKQRTFDNGSIPHQIHLQEMNAILRRQGEHYPFLQENKEKVEKILTFRIPYYVGPLAHGNRDFAWLTRNSDQAIRPWNFEEVVDKASSAEDFINKMTNYDLYLPEEKVLPKHSLLYETFAVYNELTKVKFIAEGLRDYQFLDSGQKKQIVNQLFKEKRKVTEKDIIHYLHNVDGYDGIELKGIEKQFNASLSTYHDLLKIIKDKEFMDDSKNEEILENIVHTLTIFEDREMIKQRLAQYDSLFDEKVIKALIRRHYNGWGKLSAKLINGICDKQTGNTILDYLIDDGKINRNFMQLINDDGLSFKEIIQKAQVVGKTDDVKQVVQELPGSPAIKKGILQSVKLVDELVKVMGHKPESIVIEMARENQTTAKGKKNSQQRYKRIEDAIKNLAPGLDSNILKEHPTDNIQLQNDRLFLYYLQNGRDMYTGKPLEINQLSNYDIDHIIPQAFIKDDSLDNRVLTSSKENRGKSDNVPSLEVVEKMKTFWQQLLDSKLISERKFNNLTKAERERDGLNELDKVGFIKRQLVETRQITKHVAQILDARFNKEVTEKDKKNRTVKIITLKSNLVSNFRKEFGLYKVREINDYHHAHDAYLNAVLAKAILKKYPKLEPEFVYGDYQKYDLKRYISRSRDSKEVEKATEKYFFYSNLLNFFKEEVHYADGTIVKRENIEYSKDTGEIAWNKEKDFATIKKVLSLPQVNIVKKREVQTGGFSKESILPKGNSDKLIPRKTKDILWETTKYGGFDSPVIAYSILLIADIEKGKAKKLKTVKTLVGITIMEKAAFEENPITFLENKGYHNVRKENILCLPKYSLFELENGRRRLLASAKELQKGNEIVLPVYLTTLLYHSKNVHKLDEPEHLEYIQKHRNEFKDLLNLVSEFSQKYVLADANLEKIQNLYADNEQADIEILANSFINLLTFTALGAPAAFKFFGKDIDRKRYTTVSEILNATLIHQSITGLYETRIDLSKLGED

SEQ ID NO: 8142 - protein, 1382 aa, unidentified
  REGION 1..1382: note = Description of Unknown: Cas Enzyme sequence
MENKNYSIGLDIGTNSVGWSVITDDYKVPSKKMKVLGNTDKRFIKKNLIGALLFDEGTTAEDRRLKRTARRRYTRRKNRLRYLQEIFAEEMSKVDSSFFHRLDDSFLIPEDKRGSKYPIFATLAEEKEYHKQFPTIYHLRKQLAESNEKADLRLIYLALAHMIKYRGHFLIDDPKFKVQNNDIQGLFEKFVEEYDNVQETSLSKIKLNVTEILTANIPKSEKQEQLLKNYPSEKKNTLFGNLIGLALGLTPNFKTNFSLENDAKLQISSESYEEDLGNLLVLIGENFIELFSAVKNLSDGILLAGIVSDESPHAPLSTKMVIRFKEHDEDLAALKQFIRNNLPEKYVEVFSDQSKDGYAGYVDGKTTQEAFYRYIKNLLSKFEGADYFLDKIEREDFLRKQRTFDNGSIPHQIHLQEMNAILRRQGEHYPFLKENKEKIEKILTFRIPYYVGPLARGNRDFAWLTRNSDEAIRPWNFEEIVDKASSAEDFINKMTNYDLYLPEEKVLPKHSLLYETFAVYNELTKVKFIAEGLRDYQFLDSGQKKQIVNQLFKEKRKVTEKAIVHYLHTVDGYDGIELKGIEKQFNASLSTYHDLLKIIKDKAFMDDPKNEEILENIVHTLTIFEDREMIKQRLAQYDSIFDEKVIKVLTRRHYTGWGKLSAKLINGIRDKKTAKTILDYLIDDDYNNRNFMQLIKDDDLSFTEIIKKAQVVGDTENLRQVVQNLPGSPAIKKGILQSIKLVDELVKVMGHDPESIVIEMARENQTTAKGKKNSQQRYKRIEDSLKILASGLNSKILKEHPTDNNQLQNDRLFLYYLQNGKDIYTGKPLDINQLSSYDIDHIIPQAFIKDDSLDNRVLTSSKENRGKSDNVPSLEVVQKRKAFWQQLLDSKLISERKFNNLTKAERGGLDERDKVGFIKRQLVETRQITKHVAQILDARFNTEVNEKNQKIRTVKIITLKSNLVSNFRKEFRLYKVREINDYHHAHDAYLNAVVAKAILKKYPKLESEFVYGDYQKYDLKRYISRSKDPKEIEKATEKYFFYSNLLNFFKEEVHYADGTIVKRENIEYSKDTGEIAWNKEKDFATIKKVLSLPQVNIVKKTEIQTHGLDRGKPKGLFNSNPSPKPSEGSKENLVPIKQGLDPRKYGGYAGISNSYAILVKAIIEKGAKKQQKTILEFQGISILDKINFENNKENYLLEKGYIKILSTITLPKYSLFEFPDGTRRRLASILSTNNKRGEIHKGNEIVLPAYLTTLLYHAKNIHRLDEPEHLKYIQKHRNEFQDLLNLVSEFSQKYVHAEANLEKIKNLYADNEQADIEILANSFINLLTFTALGAPAAFKFFDKDVDRKRYTTVSEILNSTLIHQSITGLYETRVDLSKIGED

SEQ ID NO: 8143 - protein, 1139 aa, unidentified
  REGION 1..1139: note = Description of Unknown: Cas Enzyme sequence
MTGKQKNLGTLTFGLDIGIASVGWAVLGENRIVDLGVRCFDKAETAKEGESLNLARRMARLLRRRLRRRAWRLTKLARLLKREGLIADANLFKKQQPFAQSLWQLRVDGLDRRLNNEEWARVIYHLCKHRGFHWISRAEEKAAESDNEGGRVKKGLAGTKKLMQEKSYRSAAEMVLVEFPDAQRNKQGDYSKALPRVLLNDEFALLFKRQRELGNPHASAELETAILGNGDRKSGLFWAQKPPLSGKDLLKMLGHCTFEKSEYRAPKASFTAERHVWLTRLNNLRIVVDGTTRPLNEAERCIALPLPYQQAGDLTYKQLRNALLKAGCLPDSFRYTGLPYPSGTKTEEKTKDPEADKLIKLPAWHELRKTLKDKGLEAEWQKISTEALEGWPQLLDQIAWVLTVYKEDEEVARELGNVDLPNKEKLIDALLDIRFDKFSNLSLKALYAILPQMETGLRYDEACVKAGYHHSQLHKVGAGEHKYLPPFYSGRDKNGRLIFDEDMDIPRNPVVLRALNQARKVVNALVREYGSPHEVHIEMARDLSRPFDERREVKKAQDEYRERNDKDKAHFAQEFNIVGTPKGKDFEKYQLYREQQGKCAYSIEPIDIHRLFEAGYVEIDHALPYSRSFDDSKNNRVLVLARENRNKGNRTPYEYLDGKSNSERWRQFVGFVEGNKAYRLAKRSRLLRKEFGEKEAKEFKERNLNDTRYICRFFKNYVEQYLQLHEDSEVQRCVVVSGQLTSFLRARWGLIKVRGDSDRHHALDAAVVAACSHGMVKRLSDYSRRKELEQVREGFVDMETGEIINPATFDRLEQHFPKPWEHFRNELEARLKLDDPALLREEMARLGTYPPEALEELRPLFVSRAPQRRNSGAAHKETIYAQPESLKTQGGVTQKVSVNDLNPADVDKLIDPHRNEKLYAALRYWLSKRDEREKRAREIEKAAKADKRAQTAEEQAEIERLRALPRKPDKDGNPTGPIVRTVTMVIDKLSGIPIRGGIAKNDTMLRVDVFKSKKDNKFHLVPVYVHHRVIGLPNLAIVGGKDENEWTLIGDRHDYCFSMYPNDLVRVTLRQDARFGYYAGCDRSTAAIHLWAHDRNQNIGKDGLIRSIGVKTALNVEKFNVDVLGNIYPAPPETRRDLA

SEQ ID NO: 8144 - protein, 1227 aa, unidentified
  REGION 1..1227: note = Description of Unknown: Cas Enzyme sequence
MMAKYRLGLDVGTASVGAAAVSLDKDGQPDALIWHHVRIFNEPNEPGQGGLVSKKAGRRKARMQRRQIDRRASRLRRIANLASLLGLKREEIAPDDGSSLPGLRAQAATERVELDDLLRIFLRLSKRRGYKGEFKAKKKGEVAEGSSKLSLAMRALATERGIVLKDENDTGITLGQYLLHRMESGLPTRLKVKESSDEPKSKKGEDANTPKNLYALRKIHVEYEFNTIWDTQAKHHDILNGTHGGKPIREHFYEALFYQRPLKSVAGLVAQCGLEPTLPRAPRAQMAFQHFRIEKTLADLRWGAGKRAEPITPDQKRIIRNLLDHNDKVNFDDIYEALKNAGCAKPETKGLNLDRASREELLGNSTLAALRKLDRYSSKKHPERATNLEQAFRALDEKTQIATINFLAEIGSPEQLDDSEWHTCFVKSVKDIKVKDDKGNERWKYKNIPRIFSPELIAFVNHIKEHDNFDRLSKMDFDGGRASYSVKALSNLADWLEEPNWPGDWQDDMKRMDEEAAIRACYPKSLNREINRVDEQLPTPEPTGNAVVDGSLRQIRWTINKMIAELGTPPDEIVVEMAREMGLGISRRNERESDNSAQQRARKHAESVIRNSGGVPTPSKIRRYLLLQEQDTHCPYCENTIGLPDALSGATEYEHIIPKSLTQVGMKRSEIVLAHHACNQGKGDRTPWEAWGNSPRWTHIEKAAERFEKKKQFRKAKLLRLKDFEREVLTDESVNGFADRQFHQTSWIAKAAMQWLECLCPNKVSVSRGELTAMLRRNWKLETVIPEARIMNNLPLLDTEGKLIEQNDFDKLKKYLEGHPVRSEDRKANPGFDFNRRPDKRLDHRHHLIDAITLALTSRGLFQQMAKNYKAAAERMQPRDGETQEERERRIKAETRLRLEVPEPPLPSVRTTALDAIRACNISIKSDRYPDGALFKGTAYGVGQREDEDRLRLTLRQQVEGLGKVQGKTKLETARKAIASIISDDIRRIVGDTFEDRIANGMEAGTALTLPIRHPLYGKPIHKVRCFEGYAEETQPIGKTKLLSIATLGITNNGSNPESVRAAIASIAREDFRRIVSQAFEERIAEGLEPQNALAIPIVNPLNGKRIRRVRINCTGNWKPKYLINEGYAYLELVMNGSKEPRLVKIRDAMRDKNKHVSQGIARFYKGDTIMDSKDGKLYRVGYFKAEGNIFLIPIVDPRSFDKITEAGSGKKKVAFAQATKRFSLIG

SEQ ID NO: 8145 - protein, 1080 aa, unidentified
  REGION 1..1080: note = Description of Unknown: Cas Enzyme sequence
MRVWGFDIGTTSIGFAVVDHDPGKEIGKIERLGVRIFPEGVEPIGGGKDTAPRNRKRRQARMARRGTRRRRLRRRELSALLIEAGLLPAFASAEWKRLMDETDPYAFRERALETALAPYELGRALYHLVKRRGFKSNRIEDAEAAAESEGKPEKKKTRKSKEEKPDAADADDPERTKEAIAHLRVAMGDKTLGAHLASQEKKRDRHIGRDMVEDEFDRIWAAQTRHHPAVLTDGLREKFRAIAFRQLPVFWRLKTIGKCALEENEPLCAKGSWLGQQFVMLQTLNSLRIAGGNARELTAEERAVLLPILSRQGSMTFGGIRKALKPLWAEHGFPLDSKFNYETSESLDKIPGNVVEAKLADIFGEAWDSLPARERIRDELHRKLFDVDYRQVGNARIEIRGEDDARAARERFVAWAQAEWNIAEDAARKLAAMTLPPSWLRHSARAIHKMLPYLEKEKENSYREAMDRAYPGHMAATGEILDRLPSHPRTMPELRNPTVHRALNELRKVVNNLIDVHGKPDLIRIELARDMKLVGKRKAEVIRKTKERERERAKAEKDLNDNGIANPSRDDIEKWLLWKECDQVCPYTGKHIGFDDLFRNGLYQAEHIFPRSRSLDNTFANKTLCHADINRLKTDMTPHEFFNSTKRPDGAETWEEVKTRLDKAVRDGRFPAGKARRFTRDKFMEVDTPDFSERQLRDTAYIAKAARDFLLRLFPGASLRVGGGLLVETCNGRFVAELRRLWGLNTILGDSGEKNRADHRHHAVDAAAVALAGPAFVKRMADHYRLEQTPDAARFPKPWSAFRDDVAEAVEDIVVSHRTLRKVAGPLHMETALRDTETTTSEGRTEYRLYVKRKSLAALSAGEAEAIRDPKIRELAIARLKEHGGDAKKAFAAPLALPCRNGDTRPVRKVRIFVKQQPRLMIPLNRKNKAWAQAGENHHMAIYRFPDGKIDYDVVSRYEANSRVATKQPVVNRNPGDGRTFLFSLAAGDMLEFPNANGKPDYRVVAGVWDNGQIVTAYHTNAVGDRKEGNDERSIKSKRTKSAQDSRNTIWKPRPSSVLDLRSEERRVGKECRSRWSPYH

SEQ ID NO: 8146 - protein, 1297 aa, unidentified
  REGION 1..1297: note = Description of Unknown: Cas Enzyme sequence
SNNIERIRNNVVNRQWYEEEFDKILDVQYKFHKDFFDKVIIDDLVKAAFKDYQAILNEVRKKDGIKEQLRCLIKDKIIFYQRPWQQAKNKGQCSFEKILVKKQVVVKGTGEKKIEEVYRGRTVIPRSHPLFQEFKVWQQINNVKIFLNTPNERIDLFNCPNEFEKYTGKSIPDVKEMLHEVLQNNKTLSWRSYVRDKKDGLGLENVLDGIDDFTSKKKKSNKEINTDTTEIANTFFSVNFRKRKRDGSYEDIKLKGNNTKISIKNILKNKDDIWFRGIAKKGKDNHEEQILKEEKHTPRDYQITNLQLLWELIYDISITDSGKVASKLKEHFTDLDVKEAEALSNLQFDDTGMGNLSAKAIRQILPLMSNGENLTDKARIKINSLIKLNNSPEEKAKNKDEKLESLRDFISDKKARLKLSEFNNEKDFKYLNYWEAAAIIYGSHSTKATKTSTEIKPVPHHSLNNPIVEKIVNETISLVNEINKTYGFDEVRIELSRELKASMEERQQMWEAISNNAAKNEWAKQMLRELKSENSDLDTEPLTSSNLDKIKIIEDVVKFKNSNEYKEKFKEYKLGEPSKAEVKKYLMWLEQNFRCPYTNQPIPLTDVFSKNKTVEIEHIIPRERYYLNSYSNKVITWKEVNQLKSENGNRTAYEFIVSKRGNDKVKLSDGREITLVAAEDWEGHVKEMFPKGAKQNNLLRKEIPEDPINRTLKETQYINKKLKEKLAELVGEQKVWVTSGAVTDILRDRWHLNNIMKELLRERFEKFNPGENKEKLNLTYWTKQFNNKTRKWEDVEIFEGYSKRVDHRHHSIDAIITACTKQNHIQYINTLNAISTVDQENDESKKRKYEWLKTEVCEVNSSKKFILPWDNFVVDVKKVLSEVVVSHKNTRLLISPSKHRNSKNIQQNKIAAIRGELHKETNYAKKNYFENEKTSINKLISKILKDKKENQNQTMVHFKTFTEIIKETVLKEKYQSILIPLFEKYDSEKLNDDLCKEISKSILIEIESSNILIDSNTKEPLQWLSTYSNKDKSSRPLGLSMNLNKEKEIKDIANPRIKRITEYRLEYVNKKKDEIDKLDLDKKEKDRLKREVESLPLFSNAIYEVRLKKYGNDFEWKELKELTLEDIDKIEYAKSKTTRLIKNKINTVGLAQLKETYFENPVFISKKPIQVKKVRQKAWFRDLYEITKGRYVYSLDTFMVYFFNERNQESEVEKREIKFLKFIDAVGIIDSEKPNKIDYSKLIEREKTNDEIQNCVEYDLLFTLAKNDLVYLSNTTLTKEQINEIDWNDKKTILPFR

SEQ ID NO: 8147 - protein, 969 aa, unidentified
  REGION 1..969: note = Description of Unknown: Cas Enzyme sequence
MQKILGLDLGTNSIGWTIRNTDLDENQFDKYGVIIFRKGVGEGKTGEFSLAAERTKHRSARRLYQARKYRLWETLKVLIEHDYCPLLEEDLNQWRFYSKEKGYFRKYPIHATEFEQWIRLDFNGDNEPDYTSPYQLRKELIEKEIDLANQINRYKIGRALYHIAQRRGFKSSRKTGDKENTSVYKGSKESGAKGVNEIKELIEKKGTLGAALASLENNGERIRNRYTLRKHYVDEINMILEKQNISETTLFHSQIHKAVFYQRPLRSQKGLIGRCTLETNKARCPISHPSFEEFRAWTFLNNIKYKLNKDDEWKRLPLELKEEIYSERFFKEESYFPFSDISNFINRKGFNWILNYKDNTTVSGCPVSARLKNVFGENWKNYRKETEKIKKVKRSNDTYKEYKITYGIEDIWHILFSFEEEECVISFAKEKLELNEKQLKKFVTAWNKLQDGYSMLSLNAIKKIIPFLRKGLSYTEAVLLANMPAVLGKDDWKENADKLSNCIENLIEKNRNEKNILNIVNGLISKWYANDFKVGFKNPHYKLDDKDKQIVIETIIGAFGEKTWQKIIDKNDIIKKITFLYQSFFQNNFEWIYLKDEKYYLVKYEEETFYKNTGNGYYKIPHLLDSIKKYLKENFNTAQEKLDKLYHPSQIDIYPKVKPNGEGKILLQNPKTGSFKNPMAMRTLYELRKLINYLISIDEIDEETEIVVELSRELNDTNKRWAIETYQRRREEENQEFEKAITELLNDPQLMGKIKADPKSNEDRDKFRIWYEQIEHKRAFRHQPSKNKISEDGNEQDNHDPRKYDWNNIRNELILKAINESDMLKKYRLWKEQQCRCLYTGNTISLTDLFDENVVDFEHTIPRSISFDNSLTNLTVCFADYNRNIKKNRIPTALENYDTDCNGYTAIWPRLEVWKKRIEEIKNNIEYWKKKSKKAPDKEEKDKAIRQRHLWQFELDYWENKLERFTMTE

SEQ ID NO: 8148 - protein, 1512 aa, unidentified
  REGION 1..1512: note = Description of Unknown: Cas Enzyme sequence
MKNILGLDLGTNSIGWAVINSEEDGPIVKKRIELAGSRIIPMDAAVLGNFDSGVTKSQTAERTSFRSIRRLRERQLLRRERLHKVLQILGFLPEHYVNDIDFENHPGKIKRNTEPKLPWRKNSMGQFEFIFQDSFEAMLTDFATHQPVFVSEGKKVPYDWTLYYLRKKALTEGISKEELAWLILNFNQKRGYYQLRGEEEEEQSNKLVEFYALRVVKVEATDDKKGKDTWYNVHLENGWIYRRTSNIPLDWEGKVKEFIVTTDLNEDGTPKLDKYGEVKRSFRAPKEDDWTLIKKKTESDIANSHKTVGCYIYDALLQNPHQKIKGRLVRTVERKFYKEELRLILEKQLSFHPELQDRDLYRACIDALYVSNEAHKNNISGRDFVYLFIDDIIFYQRPLKTKKSLIDNCPYEENQYMDRETGEVKQAPIKCIAKSHPLFQEFRLWQFISNIRIYQRERVLDDGKLETDVDVTPDFLKTEDDYTTLFEWFNDRKEVDQKAFLKNPQFGLKKTFTEYRWNYVEDKSYPCNETRNAILNGLQKAGVSADFLSREVEEALWHILYSVEDKIEIESALRKFASKHDLDDRFADVFKKLPPFKKEYGAYSAKAIKKLLPLMRIGKYWELSNIDDKTKERIDKIITGEWDENIHDRVREKAIKLSDITDFKGLPLWLSCYVVYNRHSEARAIAKWESPEDIDSYLRLFRQHSLRNPIVEQVITETLRTVRDIWKRVGQIDEIHVELGREIKNPADKRAKMTAQIVENENTNLRIKALLAEFINSEYEIENVRPYSSNQQEKLKIYEDTVLNGVKEIPEDINTILKKFRESDLKKRPTKSDFLHYKLWLEQKYCSPYTGRIIPLGKLFTSAYEIEHIIPQAHYFDDSFSNKVICEAEVNGLKDKKLGYEFIKHNPGKMVEIGFGKPPVRIFSVEEYERFVKENYSGIKNKMNKLLMDDIPETFIERQLNDSRYISKVVKSLLSNIVREKDSNGEYEPEAISKNVIVCTGSVTDRLKRDWGVNDVWNSIIYPRFERLNELTGSQQFGCWENKEGKRVFQTAVPLEMQKGFSKKRIDHRHHAMDAIVIACATRNHINYLSNESASKKAKISRTDLQRLLCTKCRTDDNGNYKWIVKKPWPAFTQDIRKALENITVSFKQNLRVINKTTNYYVHFDESGKKVLEKQINGDSWAIRKPMHKDTVFGKVNLQKVKEVRLSLALDTPKMIVDKKLKEKVLQLYSYKYDKKRIDKYFKENASLWKDLNLSKVAVYYFTNDSTEPLVAVRKPLDTSFNAKKIKESVTDTGIQKILLNHLSNNQDDPNLAFSPDGIDKMNKNLTALNDGKYHQPIYKVRVCEPQGNKFSVGTSGNKTSKYVEAAKGTNLFFAVYQTEDGKRSYETIPLNVVIEREKLGWTPVPENNNNGDKLLFWLSPNDLVYVPTADELNNGMRLDNMDKGRIYKMISCSGPQCFFIPQNVSNAIIPVIELGANNKAEKSWNNEMIKVVCVPIRVDRLGCITQINNQK

SEQ ID NO: 8149 - protein, 1258 aa, unidentified
  REGION 1..1258: note = Description of Unknown: Cas Enzyme sequence
MKRILGLDLGSNSIGWGLIEQDFQQKQGKIIAAGSRIIPMDQGLLGDFEKGNSVSQTAERTFYRSTRKLRERHLLRRERLHRVLHILDFLPAHYDKEIDFSKRYGKFVSNTEPKVAYNEGKFLFMDSFQEMLADFKKHQPTLFYTKKNGEESKIPYDWTIYYLRKKALSNKISKEELAWIILNFNQKRGYYQLRGEEEVENPNKEIAYYSLIVTDVTAEAPNKKGEIWYSIQLENGWVYRRTSRIPLDDWKGKSRDFIVTTELEEDGRVKRDKDGKEKRSFRAPDENDWNLLKKKTEQDINTSRKTVGCYIYDHLLQNPNEKIKGKLVRTIERKYYKEELKAILEKQVALQPELFTDQLFADCIRELYSKNAAQQRNLAARDFVHLFVEDIIFYQRPLHSQKSTIANCSLESRSYIDKDSHTRKEAPLKVCPKSNPYYQEFRVLQWLQNLKIYEIDSDQEVTHQFIKTLEDKQQLFEFLMNQKEIDCEELLKYFLNQTYPNAKEKALKSELKKWKETYRWNYVYDMGEKSSKKYPMNETRYELRRYLEKVTNLPEHFLTKEIEYQLWHLIYSVTDKIAYEKGLKKFAQRHHLDEDSFVESFKKFKPYPSEYGSFSEKAIRKLLPLMRFGSHWNFDSIDKDTQKRIEDLITGVENDEIRTILREKAEKYQLVKETDFQGLPLWLAQYIVYNRHAEASSLEKWTSVNDLETYLNNFKQHSLRNPIVEQVVTETLRVVRDIWQQYGQGQADFFDEIHIELGRELKKTAKEREELSKQNQKNEDTNLRIKALLAELGEDSTIENVRPYSLMQQELLKLYEESVFSSSMEIEDDIEKIHKKATPSKAELQRYKLWLEQKYKSPYTGQIISLKRLFTEDYEIEHIIPQSRYYDDSLSNKVICESAVNKLKGNQLGLEFIKNHYGEKVHAAGKEVSILTEEQYKEFVRNHYANNSGKMKKLLLEDIPEKMVARQMNDTRYISKYISEILSKIVRADERDEGVNSKNVILCTGKITTALKQDWGVNDVWNDLILPRFERMNDLTQTSLFTTYNEKYQKYLPTVPMEYSNGFQKKRIDHRHHAMDAIIIACATREHINYINNQHALEKGKNKEEKQKSRIDLRTILCEKKYNDNAEENYNWVFKKPWDTFTQEVRAALEGIVISFKQNLRVINKATNYYERWVEENGKLTKKMVKQEGTNWAIRKPLHKETVSGKITLEREKVSKGKILTTTRKAIDSTFTEKVIEGMTDTGIQKYNRQNEMYIFLK

SEQ ID NO: 8150 - protein, 1483 aa, unidentified
  REGION 1..1483: note = Description of Unknown: Cas Enzyme sequence
MKTILGLDLGTNSIGWAKISIDDNGNYLRDIQMGSRIIPMSQDVLGNFDSGVTESQTAVRTGFRGLRRIRERSLLRRERLHRVLHVMGFLPPHYDSAIGWNKEEPTTYGKFLNHGEPKLAWERQGDGSMRFLFMDSFHKMMEDFAPHQPALVADGRKIPLDWTLYYLRKEALTRPIKKEELAWILLNFNQKRGYYQLRGEEEVENLTKREEYHELKVVSVEAAEEGKGGNTWYNVKLENGWIYRRSSKIPLDDWVGKTRQFIVTTEYEADGITLKKNKEGEVKRSFRAPGEDDWGLWKKRTESQLEASGKTVGAFIYDHLLAEPADKIRGNFIRTIERKYYKQELADILREQSKYHEELQSKKILADCAEELYRSNQPHRDSLLKKDMVYLLLTDLIFYQRPLKSKKSLIADCPYEYYEYVDKETGEIKRQGIKCVAKSNPYYQEFRLWQFVLNLRLYDRTEDKEVTAEYLPSKEDYARLFVYLNDRKEINQETLLKDFFKLKKVKQRNEKEFPVRWNYIEDKEKKYPCNETRHELLMALDRAGIERSWLDDTARQYRLWHLLYSIEVKDEAERALRKLKDDDEFVSAFLKVKPFKKDYGAYSEKAVKKLLAVMRMGSHWCEDDICKETKERIEHILQGDVEEKIKERMNHTAYSLGELSDFQGLPEWLACYVVYGRHSEATDIKHWKTPESLMAYINGFKQHSLRNPIVEQCILETLRTVHDIWKEAGHIDEIHVELGRSMKSTSDQRARMTENILRNENTNLRIKSLLMELKNDADIKDVRPYSPMQQEILRIYEEGALQELTKEDNDYEEIFKISKMPQPSAKELLKYKLWLEQKYRSPYTGKPISLSKLFTSAYQIEHIIPQSRYFDDSFNNKVICESEVNVLKNNMLGYEFIKNHGGEIVHCTLLGDVKVQSESEYKAFVTEHYANNKYKKEKLLMEDIPQDFLNRHLNDSRYISKVVKTLLSNIVRTEDEMEATSKFVVSCTGGITDRLKKDWGLNDVWNSIVYSRFERLNELTKSDAFGRWENKEGKRVFQTSVPLELQRGFNKKRIDHRHHAMDALVIACASRNIINYLNNESANSPKKREDLRQLLCDKNRIIRKPWESFTQDARAALEDVVVSFKNYVRVINKATNYYERYDADGKKTITKQKSREMWAVRKPMHKETVFGHVNLRRKAIVKLKDALENIPSICNKELRDYINGLVERNFNTKQLHAHFRSTDYRWNKQNVDKVEVWRFSDEKEPLVATRKPLDTSFDAKRIDTITDTGIQKILLNYLEAKGGESAIAFTPEGIAEMNQNIALYNDGKMHQPILKVRISEPKGAKYQIGQTGNKADKFVEAQKGTNLYFAIYEDEDGNRTYNTIPLNEVAERLKQGLPPVPEKNEKEVPLKFYLSPNDLVYVPTEEEILMKECRLNKNRIYKMVSSTGNQCFFILFRVAVSIVNKMEYSPLNKMEKAISSEMIKAVCWKLEVDRLGNIIRVIK

SEQ ID NO: 8151 - protein, 1268 aa, unidentified
  REGION 1..1268: note = Description of Unknown: Cas Enzyme sequence
MISRNYLLHLQHLGRDEAQKKWVSDAYYQSAVSLGIDIGLEGIGLYLRKGRDEIFAKTIDVSDVLPGANALEKRRQLRHARRNRTNKRTRLSRLDALLTAHGLPLPWNDNKTAYENSDPFKMRHRAVRPEGNGLDSKHALAIAIRSCVSLRGYDYGRFSEDGEHPWGRSSRLADALKWLTTATIDDTLAVRLQEYVQRRELAAKKRDPDAKWAEFDAEISRRLQVSNEHTLETVLKDHFKGDKHDNLRQRARGFAFPRHKVWEHLTQIVRRHSALIGDAEGFLAALGIDPDDKKLFPEVTSAAAAREKAIFWYNRKSIPEMEAHWAKKRKDCPYSIRLELGDQKTSARGHRALRMWAMLEFGMTRRVEMTYSDAEKLKALKQAGQKVNAKKCLKEFLHTLTPQAVKSLVELVAEQYGANADTVVLDKERRSESKKRARVIIEEDIEKHSGIALELNPKPAVMGKESWNESFFDQLEDIVAPNVTSGTGSLFHGTAERLFNAATHNGTDFTPVGYNARLVDLHFYDWRRESVLDWGVYPQVEFLLGRRVKHGKRKGEVSRSCQGFLRQLFDRFQVDGHPLKGMTVPDFVTVEVVGDPPRTQKQKDEILKEHKKKRDERREAFAKSGYADSGVASSRRRIALHGQQKGRCPYTGDMLPADPLDGRLEIEHIYPAELGGLSVDDNLVLTLRTTNGLKNRRTPLQWLGEERMKALTAINADMRWSARKREVFQWGTRKEDDPAGKWAKHYDDREHLLVPDFGNMTRTAQLARQLNAAVADWLGIAKQPDEMAKRIATPSGWLASQALRSWLPDYRKDRADMTHHLIDAAVLSHIPPREGMNSVHCGGVFFTERISEINQQRPGEMTDRLVTRALPGLLDATVMQKWLPGERREYSQCPVLLRKTRSKMGSLGDSTFWRQADSNKADLAQREGSPFNPADYKGDADKLLGLLRKMGINERKDKQWRARNKRKGLPPPPLKDVLPTIQDIEKYLEAATATLQSERGQTPPVLRLRDGKDGKPWTPITKVWKWNSKGSLGKGLGWSGWVNEKGTLTSLRNIDLKYDRLEVWLGYAVEVALKARKKNDPVWETAGWQYQKRLIPHATALRHLKQLGLRYDRDGRKLAPAFMQAKPDKPETHQTLRDLIEGKRLVPFSKKVGVVRRGDVFRVGYGRDGSLTHVPAEQVWSTFLKVTSTTADNDGMIEMKGLLISDKKLTPLKDCTQDVLTRKLSVSADLAALLGLPPALDHARSLIAEGRIKTPTVPDDSSPDTVGG

SEQ ID NO: 8152 - protein, 1183 aa, unidentified
  REGION 1..1183: note = Description of Unknown: Cas Enzyme sequence
MGKVLGLDLGTNSIGWALINKVENKLIDAGSRVFPEGVNREKGREVSKNEDRRLARQRRRLYFRKSLRKQKLVQVLMPLGMFPQSAHFLSDVQQLVLEEELLYFFRMNPYELRAKAAEGHKLSLLELGRIFYQFSQRRGYKENLQSPLDEKSDLNTGDVESGKIGIEETIAGIGGSTLGSYLSKLNPHIQRIRNRYTTRKMYLDEFELIWSKQASHYPNVLTGDLKTNLGDPVIGVLFFQRPLRSQAHLRGKCSLEPSKDRIADSAPIFELYRMFSFINNIKSAERDLNFDERSRIIELFISHGPPKKFDVIRKKIVKGDSNIKLNFDDDVKIPQCKTISLISDALGKIERKQIISQLSNQSVKDVFDILPRFEQIWKLKREARNPEWLQSKLYSDFGIEPEEAKKLVKSRFSNDFASLSHKAILNILPYTIQGHTLSDAVILGGVRNVFGSKWESIAPEQRTIIEDNVLSVAYTDKNELALDKVKSILSSEFKAPMNRLRKLYHASDYRQRGGIVKRQEVGAAILKIKNPIVQSVLFEVKALVEDIIKHYGEIDEIKIEMARDLKKSKKLREKEQIQIYKNERENDECRALLNENNLKPSGANLLKMKLWRECNRTCPYSGETIGLYELFETNKYQVEHIIPYSISLDDSLANKTLCKLELNQEKGNRTPFEAFGKTGQWEAMKDRAFKLMPYIKAKRFVDPTRKDLEDFIERQINDTRYISRECSQLLNAYAKTSITQGGLTAILRRSWGLNDILNPRQLLLDEYKPGRCCAAFDEKDQIIEDTLTAWVKDFKLRKKIEDDLAKKGKVAWGMVRKQFFYPEKSRLDHRHHAVDAITIAFSSTSLLQEISKLSGQGAEVADIDIELPWNSFHSDCRRMIDSILVSHKNRRRVISNWRRKLFDKTNGKLIIKNDKQWYGSGIASRDQLHKDTYYGLYTQKDGTQYLHNRVALESRKKKKLIEEVVDPGVRQAIYDRLKAIGVDTDQKDFDVPTESADNPVFFSTDADGKKVSLVFMPNKNAEPIPIKKVRIRGISKTKIQLHGINRYVEPGNNHHVLIYRDHNTNLNSSIITFWEAVERTKQKTPLFQLPADGAESIAVLMKNHLFILGYEGEIDWNDQRKLKDYLYRVQKLSDGDWNFRKHNASTLDFEVEEVRVQSLKAWNKLSAKKVILNRLGKIIQIID

SEQ ID NO: 8153 - protein, 1459 aa, unidentified
  REGION 1..1459: note = Description of Unknown: Cas Enzyme sequence
MEKSRKILGLDLGTNSIGWAIVDEVGDEFSLNDQGVRIFSEGVKYDNGKEASRASERTAYRSARKIKFRRKLRKYRTLLVLSQNDMCPLSVKELEAYKKSGFKHYPLNTEFILWLRTDDENNINPYAFRDKASREKTNRHEIGRALYHLAQRRGFLSGRLDQSDEGVLEENSPIVLSAIEDLESIQEIKETLNNYFEEKGIFDESQKTGYIKDQDEGDKVLVKLYKSLYAILSKSQEGFEKTKQDLIEKLSQKENLGKVKGGIHDLTAEMKEKGFSTLGQLFNDRYNKSKIRSSYTSREEHYLAEFEIICKVQGLGAIKDSEKLPEKRFEGLSKELYRAIFYQRPLKSQKGLIGKCSLEPTRTRCAISHPDFEEFRMWNYLNTIKMALKGEKLQFLSHEQKESLLPKFLRKKDNFSFEDLAKELLPSKSTFGFYNSSKKETFDYWFNYNSYDSVAGCPFSAALKGVFGNNWKTDVFTYDTLNAQGDTVSRTVDYHDLWHLLTSPTTKSDVYLVGFAQSKLGLDPKQAKAFSKIRFKKDFASLSLNAIRKILPYTRNGLLYSHAVFMANLEKIVDSDLWNNEESRLEIQQGIGKLIENHTLENAKLELINGKVKNLLDSGGSYSTEVEPFYMAELQDELKGLIKRFKLQNDNGELEGQLFAILKKQLKNLEFLKIKRIDDKVKEFLLGDNIDGQVFCSDVNRFSKIYHPSDIEKFKLKEVVDENKNFIRHELGSPLSTSIKNPMAMRALHQLRKVLNTLIVEKKIDRNTQLHIEMARELNDANKRKGIQDYQNEIESDRKKYIVDIKKLYLDETKKAVEPTENDILRYQLWLEQNKQEIYEPSINGGKAKSIAISQIIGSNPDYDIEHTIPRSRSQDNSQANKTLCSKHFNREIKKNSMPSELNNYELILPFVAHWKHEAESFQKEIDQLSRRIKGATTKEAKDKSIRKRHFLSFKKKYLEEKHGNFILKEPKVGFKNSQIPDTGIITKYAQAYLKSYFNRVVSVKGGMVAEFRKQWGIQKSYMDEHNQKHYEKKDRSKHTHHTIDAITIACMTKDKYDVLARAWTLEDEANKKEAKAIIEKAKPWKTFAEDLAKIEKEILVSHYTPDNLKVQSKKIMRVRGKKQFVAEMEPDASGDLKPKTDDKGKIIFKLNEKGEKIHRLHQGDTVRGSLHQDTIYGRVIDPETHEIRSVIRKSLESLKESDIEKIVDPEVREIVKKAIEDKVIVLTSSAQQVNKIDKEVGVWMNKQKGIAINKVRIYADSVKNPLEIKEHAPLSKSRHKHKQHVLGQNDENYCLAIYEGFDKKGKVERTALIVNNFTAGKYYKAGNKSKEEYPLVPSNDSNGYDLKYVLKRGMMTLMYDKSPDEIFELDSTNLLGRLYEITQFDVESSCIKLLHHTEAREKKELTAFMGLKKGMKGGKNIDNYKEFPWIKVSPNSFDCLVEDYEFKISVAGKINFLV

SEQ ID NO: 8154 - protein, 1385 aa, unidentified
  REGION 1..1385: note = Description of Unknown: Cas Enzyme sequence
MKKILGLDLGTTSIGWALVNESENENENSEIIKLGVRVNPLSTDEVTDFEKGNPLSVNADRTLKRGARRNLQRFKLRRQNLIDILLKNNLITSDSILTESGNNTSYETLRLRLKATKEKIEKEEFARVLLTINKKRGYKSSRKAKNEEEGALIDGMAVAKELYEDNLTPGGYVFQLLQIGKKYIPDFYQSDLNNEFSTIWKFQKQFYSEILTDKLSQNLEGKNKAQTWAICSNPFNLKGISQKGSATEKRLEKYNWRTQAINNKVDLEILAIVLQEINNDLNKSSGYLGAIGDRSKELYFNKITVGEYLYNQIQKNRHTSLKKQVFYRQDYLDEFEKIWETQSKFHAELTNILKEEIRDVIIFYQRKLKSQKGLISICEFENKTITVLIDGHSKKKIIGPRVVPKSSPVFQEYKIWQVLNNLSFTPKKEAINREKSKEVLSLESKQLIFEELNIRGKLKNTEVLTLLKLNFKDWKCNFETIEGNNTNQAIYNVLQQISENEGYGFEWNKKNAFKIKEELKTTLPLIGVNPSILDFDINFNDFENQLSYQFWHLLYASEDDIKVNKMDEVIYGKNAVSLKKKLHLKFGVPVKYTSLFTNISLQQDYGNLSTKAIRKIIPHLQEGHEYSEACTLAGYNHSNSITSEENLRRVLKEKLELLPKNSLRNPVVEKILNQLVNVVNQIIDTYGKPDEIRIELARELKKSAKERKEMTAGIASATRRNDEIKKILQRPPFNIKNSTKNDVTKYRLYQELEGIGFKTIYTNKYIEPNKLFSKEIDIEHIIPKAKLFDDSFSNKTLAFRDVNLTKSDMTSYDFIEKKYNADLDNYVLRVKSLYDNGKILKGKYLKLLMKESNLPDGFIERDLRNTQYIAKKAKNMLHEAIRNVYATTGSITDKLREDWDLINVMKELNLPKFRKLDLTVIEERKNGNKVEQIRDWTKRNDHRHHAMDALVVAFTTNNHIQYINNLKAKSNKSSPIYAIQQLITSKSENGKRLFTPPMFKFREEAKKHIESILISFKTKNKVVTKNINITKNKKGTLKKVQLTPRGQLHKETIYGKSQREIVKKEKISGVFTIDKINTVTQTEYRSLLTKRLLEFNNDPYKAFGGNNVLTKNPILLKNGKELPLLVTTKSYEDIFTIRKEITPELKLEKIIDLKIREILSNRIQEFNGDKKAAFSNLDANPIWLNQVKGIAIKRVTISGVTNTEALHDKKDHLGKNILDNNVITQPVDYVSTGNNHHVAIYKDDKEKLQEQVVSFFDAVTRVNQGLPVVNKNYNKDKGWGFLFTLKQNELFVFSSDDFNSAEIDLLNKQNYNMISPYLFRVQKISTKNYLFTHHLETKATSGEDLKSKKALSGITYHFIQSTEPLRNIVKVRISHLGEIVHVGEY

SEQ ID NO: 8155 - protein, 1096 aa, unidentified
  REGION 1..1096: note = Description of Unknown: Cas Enzyme sequence
MRYRIGVDVGDKSIGLAAVEYDEAGFPIRILSAVSHIHDGGMDPETAKSPLSRTATSGVARRTRRLIRNRRRRLARLDQLLMTHGYIVPEVEIGQTHDAWSARARLSKEYEPDNKTRINDLSLCIRHIARHRGWRNPWWKWSTLRDFEGPTENFVSMRESAAVRFGPELLSCDTLGQLVMQIASSGVPVRATKRATTRGVEPLMSKQIMQVDSLFELRKILAMQKVTTDTIDSICAEVFSQEAPHIPKDRIGLCALIPSEVRAPIASLEFQEYRVRAAVANLRIGRRERLRLSEQMHDTVVEFLMNWRDDDRPKWSDVSDYLSVEARDLIKPSIDEEGGTNAPHDRTRNGVEKQLKKKTPLREWWDSAVFADQAEFVDFLTDLSGQDFEPSSNVLAELISDDAHVETLEKITMAESGRAAYSRIALQKLNDVMREKHCDVHEARKIAFGVADDWQPPKPTFNDIVGHPTVDRVNVIARRFLSTAMMKWGEPEIVAIEHVRTAFMGPTGRAELLQEIGFNTRKRDKQKAELVSQGIQNASNVDVRRLECITLQNGMCLYCGTALTMTSCELDHIVPRASGGSNRRDNLVAVCVECNKEKGRDPFPVFAAQTHRNGVSVEEAKLRVRAFSKGSLTVLQLKRLQRDISKRLSLETDDEEGMDRSIESTAYAARELRKRIESLLGITGTSISDPDKARVVAYQGIVTSEARKAGEVDGILRLRSFTKKSRLDRRHHAIDAAVLTTLSIGVAKTLKDRAELASSDRFTGHDPGWKEYIGRNGQEMKQFTEWKKHIGALAKLLKGSVENDKVHVVRQLRLVPRVGAVHADTVQKLVHKNIGEEFSSVEIDRVTSYSLFDKLSLLTDDSGNLPTDPARHLALKLPADFEVDLFPSSAACLAVRGGAVEIGGSIKSARIYAWKAKSGFAFGMVRVYSAEFPKIGFLKSGIDIFTAPLPANSQAMRHANDSLRRRIESGDAKQIGWIAIDDEIEINVESFNEGEEKLPKFLQACPESRWVIKGFFDMGKISIVPSYLAAEGIDVDVPEIVQQTLREGRIPTAVNVLFSDPHTTIIRRSVLGTVRWRHDGTSSSWNPHQAAKKIFD

SEQ ID NO: 8156 - protein, 1512 aa, unidentified
  REGION 1..1512: note = Description of Unknown: Cas Enzyme sequence
MTKTILGLDLGTNSIGWALVNQEDKKILGMGSRIVPMSQDIIGEFEKGNKVSQTATRTSLRMTRRLKERHLLRRARLHRVLASLNFLPSHFIEDLDEYGNIKAEREPKLAYFKNQLGKHQFIFETAFLEMVEAFKKNGQLDAKIPHDWTIYYLRQKALTEKLTKEELAWLLLHFNQKRGYYQLRGEDDEINLNKSEDFYNLKVIKVEEADKGKKAGEIWYNVILENGWIYRRSSKISLKDWEGKNRDFIITTDLNDDGSIKTDKDGKEKRSFRAPKDDDWGLLKKKTESEIIESKKTVGQYIFDALLKNQTQKIKGKLVRTIERKFYKEEVERILETQIQFHPELQSKTNYAKAIESLYKSNEQYRNSIQSKDFKYLFVNDIIFYQRPLKSKKSLISNCSFEFYKYVDKDGVNGTKPIKCISTSHPLFQEFRLWQWIQNLRIYQLEKEVNGKLETDIEVTNEFITDINSFVVLFDFLNDRKEVDQKAVLKFFLEQKGLKGKPLLLKIEKYRWNFVADKIYPCNETRSNILKRFEKVDNTPANFLTTENEIALWHILYSVRDKIEIEKALNSFATKHNLDTTTFVDNFKKYPLIKSDYGAYSEKAIKKLLPLIRLGKYWIKENIHPQTLERIEKIINREFDEKIKNRVREKAIKLNSVEHFQGLPLWITSYVVYDRHSETSENKRWTSIQDFENYIKEFKQHSLRNPIVEQVLTETLRTVKDIWTKYGNGMDSFFEEIHIELGRDMKNNAKDRKEISERNAINEATNLRVRKLLEEFSKPEYAIDNVRPFSPSQAEILKIYEDGVLNSGIEIDEDIQKISKSPQPSSKEIMRYKLWMEQKYKSPYTGDIIPLSKLFTSVYEIEHIIPQSIYFDDSFSNKVICESEVNKLKSNQFGYEFINNHGGEIVECGYGKKVKVLKIDEYENLVKLNYAKSKGKMKKLLLEDVPEKMVERQLNDTRYISKEIKNLLSNLVRTERDDDGVTSKNILSSNGSITSILKQDWGLNDVWNSLITPRFERMNKLTDSNQFGYWDNKEGKQVFQIQMPLELQKGFNKKRIDHRHHALDALIIALANRNHVNYLNNQSALAKNKTKIDKQKDRIDLRTILCDKVITDDKGNYKWRYKKPWETITQDAKNELDKIIISFKQNLRVINKTVNYYQKFEDGKKQFVKQTKGDNWAIRKALHKDTVAGLVSLQKTKEASLSTAIDDVLNIKLKSLRKQIQKLQSEGLDKKKINQFFKDLSHIWEGKNIAKVEVFYFENEMVASRSNFDDSFNRKKIESITDTGIQNILINHLSRFDETEGKKLTEHPELAFSPEGIEDMNKNINALNNGKNHHAILKVRTYEPKGNKFIVGATGNKKDKYVEAAKGTNLYFAIYIDKEGNRSYDTIGFNIVAERLKQGLLPVPEKENCTLLFWLSPNDLVYVPNEEEKDNPNLVDCINLKKEQVERIYVVNDFSGVTCYFVPNQYSKAIAPKEIDTSFDLKTAKDSFKKSIKDKCWKLEIDRLGNIKKAIK

SEQ ID NO: 8157 - protein, 1135 aa, unidentified
  REGION 1..1135: note = Description of Unknown: Cas Enzyme sequence
MNYTLGLDMGVASLGWAVLSEDNQFIDSGVRIFPAGIDKFGTGKDTHLNQERRKARGARRRVMRKAKRKELIREILSSFAWIPTQEDELQAWKNLDVYHLRSRALHEKISLQEFARIILHLNQRRGFLSLRKFEGDAAEGEDKKKLEGMLGEMESLQDAIEAKFPTPSDRTLGNYLHSLYSSDNFQTPKGKIAKVERLRSRHIRRDMLHHEFSLIWTAQSKLHPELTDALRYGTHGPQKNPTVVVKPIPRKKDQTLLQQFGLENLTFFQRRVYWPTSSIGKCELEKDELRAPIADRRFQEFRMLSELNNLRLIDNSAEGKPIERKLSPPERKIALAYLAATQKPTLKALKGKIAKAPDSPAVSQITFNLEQDKRDNIGGLQTELKLAKAFGEKEWAKITDAQKNQIVQILTMPEPGAAKVIQRTDDETKHLLLQIPTLTKPQIENLLRVSLPTGYCNFSIKALEKLLPHIRNGFNYQGKTEKDSALHLAGYKRRDESSDRLLKKLPLLTELTNPKLDHYDPNFPHVNNPLVLRSLHELRKVVNGVVTKHGSPSRIHLEMARDLKMSAKQRDEHAKKNNEYKKSRELAATKLEENGIAATRDAILLYRLWQEQNERCIYSGKSISFTQLIGGYVDIDHIYPRRANDDSYMNKVVCFAQENRDKGDRLPSEWLGERSPKFQDLAQRVETLPYGKRTRLLSDKVPEGFAARDATDTAYMTRVARHYLTYLVEKDHHIFCTKGKHTALLRKQWGLNSLLRHDLLDLKNREDHRHHALDAIVIAACGPSLLQKITRELTFDNAWKEIVTDEGKEKKVYRLKPVANAITTPWPTFAQDTASSLNTIWVSHRPDRKVSGPLHQETNYGLTQKPGIVVRRKPISTLKDSELKKIRDPEVARAVTQYLALEKRLYRSDIGGTQFKGELDKVFSTQESLVQSDIDLIEDLKLRSTLTAKLKKKNPLQDAELGKITLPSGIPIKKARLLIANKTAIPLRKRQPKELLIPGNTHHLAIFALGNGLYHFEPITLLEATQRKRNKLPIIDKTSPEEHPEAEFVMHLCYNDSVTAIINGTLQLYVFKGVHATQLTAKFLHHLDGRKNNEKNPATGKAVSIQKTTRPNKLEQNFPGILKVEILPAGELRRC

SEQ ID NO: 8158 - protein, 1034 aa, unidentified
  REGION 1..1034: note = Description of Unknown: Cas Enzyme sequence
MLPKMRYRLALDLGSTSLGWAMIRLNANSEPCAVIKAGVRIFTNGRKPKDGSSLAVTRREARAMRRRRDRLLKRKARMMRTLIEYGFFPAEETQRKALEVLNPYVLRAEGLNRPLTPAEFARALFHINQRRGFKSNRKTDKKDNDSGALKTAINNLRETLKAENCRTVGEWLNKRDMAGQTVRARYHQDKIVKDDGKAKINKYYDLYIDRAMIEHEFDELWKKQAELNPPLFNEKARADLKDVLLHQRPLKPVKPGRCTFMPDEERAPLALPSTQRFRMYQEVNNLRILREGLKEEPLTLKQRDELIAALEANNKRTFTQIKKLLGLGGAVQFNFEDPKREELKGNKTSTILSRDDHFGSAWFEFDEVKQDAIVMQLVKEENEAKLVRWLQDETGIDEKRAETIANVGLPEGYGSLCALALARILPELRRDVMTYDKAVQAVGFAHHSKLNQNTEMPGITFKAESIDQSTGEIKPFHIFNELPYYGEYLQRHVGFGSGKPEDTAEKRYGKIANPTVHIGLNQVRLVVNALIKRYGHPSEVIVELARDLKQSQEQRKEENKRQAENQDRNKRLRTTIASVLQTSEERVRRDDIEKMILWDDLSFDPADRRCPYSGAQISTNMLLSDAVEVEHILPFSQTLDDSLNNKTVALRQANRSKGNRTPWEAQHDFAAQGWDYADILARAEHMPKGKRYRFAEDGYQRWLKDDAGFLPRALNDTRHLSKVAREYVNLICPNTRVIPGRMTAMLRGKFGLNNVLGLNGEKNRNDHRHHAVDACVIAVTDQGLLQRFARASASARERQLNRLVENMPRPWDSYREHVRRAISAIWVSHKPDHSHEGAMHNATAYGLRGEGKVSFHKMVEGKRDHIEDNLKVIEITNAKATERHGLLPSGEPRPYKGYKGDSNYCIEIVRNEKGKWEGEVISTFDAYQLVREHGDVRLRHPTLSVRGKSLVMRLISNDYVRLNHEGAVRTLRVCKMSEAGQIAFTDVTEANVDARTRAKEIAYVFKTGGSLQKSTARRISISPIGELHDPGFKE

SEQ ID NO: 8159 - protein, 1413 aa, unidentified
  REGION 1..1413: note = Description of Unknown: Cas Enzyme sequence
MEKILGLDLGTNSIGWAIRNTSIQENQIEKFGVITFQKGIGEVKGIEYSYAAERTKNRSLRRRYQAHKYKLWATLEILVANMYCPLSIDELNQWRKYEKGVGRKYPLNNTTFNNWIKLDFDGDGKPDYISPYQLRLELVTIKLDLESQVNRYKIGRALYHIAQHRGFKSSKKVQDKEENISEDDLIGAEKKRAEFIEKLMAKHEVTTAGAAFAMEEKLGIRIRKNLHQHVIRKQLQNEVKQIFDLQGISFITLFRKEISKSAIFWQRPLRSQKGSIGKCTLETNKYRCPVSHPSFEAFRAWAFLNTIEYRIKDDKESKWEKIPFALRQLLYKEKFLRVSDFDFSDLRIFIKKHNQHDNWEFNYKDKTNVSACPVSARLQDIFGNNWMEYQKLHTANEKRKMHKDFYDVEDIWHVLFSFEDEDDVSAFAIEKLELLEKAEKFVTLWYKMPVAYSMLSLKAINNILPFLKEGLIYTEAVLLAKMPDVLGTEIWQKSGSSLKENIKEVIDSNREEKKKLGIANNLIAKYKALENQYKFADRDYDYQLKSDDKEQVSIECIEVYGNRTWNEKPLNVKLETIDFITNIYQSFFNDTKREFRKLPHLLDTLKTVLADTFMLSDKKLKKLYHPSQINIYPPAKEKYYEAYKANLTLLESPKTGAFKNPMAMRTLYELRKLVNYLIATDQIDEETKIVVEVARDLNDANMRWAIETYQRNRQEQNKEFANAIIELLKQIPSSKVDPENDEDIDKFRLWFEQLNEDEVNEGKSEYSKHEWANTKSKVYKQVTAAKEMIEKYRLWKEQECQCFYTGRNIGILDLFAENNTDFEHTIPRSISFDNSLANLTVCDFVYNRTVKKNQIPTALPNYEEDAQINGNLYYAIKPRLEKWRQKVEDIKTNIEYWNKKSKQASTKDQKDKAIRQRHLWRFELDYWYNKLSRFTMTEVKSGFKNSQLTDTQIISKYAYHYLRTVFNTVRVQKGTTTAAFRKIYGVQPKDEKKDRSKHSHHAKDAAVLTLIPVDVKREEILKKSFAYYETTRNQYTTKPYSAFKNRFIEEIEEKILINNITKDQALTPGVRRVRIRGNKVLLRNKQGVILKDENGNNKEKWAKGDSIRGQLHLDTFYGKIKLVKRDENNRSIKDAEGNWEYVEKNNGFAFVVRKEITKDLKVDSIVDPHLKTIFISQMNGRNLDKTIKEDGGIWMLKKSGEKVHIMRHVRCFADDVTEPLSIKKQTNLSSKEYKNDYWAKNGENHAYALYQGIIKNKIERKFILLNLFNTSVLHQLSDSKDLVVEKELDFNKKGDKVQLYFILKAGIKVLFYKENNPDELKDLSIKDLSKRLYRIIKFEKDGRIVFGYHIDARSDNELKALEEIYGKSIYNGFSSVNYDSPWPKVKLSLGNLNFLIEGKDFTIKPDGEIIFRK

SEQ ID NO: 8160 - protein, 1551 aa, unidentified
  REGION 1..1551: note = Description of Unknown: Cas Enzyme sequence
MAKILGLDLGTNSIGWAIVDDLRNKIIDSGVRIFPEGVVAKTIGMGEKEESKNASRRNSRQQRRGFYRKRLRKIKLLRTLINLEICPLTHSELDVWSKWDKQKKKEGRMAPEIYLPENHPYCLWLKQNPYLLRDKALNEDLTLQEFGRVLYHLIQRRGFLSNRKGKDDGKIYKGKDGVKGIEDTQKELQNSTLGKYLFDILPKDGEPFKVIQDENGNELRVRSRYTLRDMYVSEFEAIWNRQATNFGLDTIEYTSEKKILLKGGLKNKRNNGKIEHLKKIKGAENVEIIELNDELSANDKQKYLLKIKTKLPLKEFLAGKIEKNEEGDLKFKSNESVLFWQRPLRSQKGLLAKCRFEPDLKDENGKFLQKGKTPCHLSHPLYEEYRALQNINNIEYGKKQRLEESQRLQVLELINSKDKKFDFIEIKKKLKLEYETFNYADDSPVIGNYTTKHLNALFPKAILDKEYIITVNEQKTIEYGYERIWHLLHYCDDNDLLFDKLHNSYELSDTEKENISKINLKEDYSSVSLKAIKNILPYLQKGLRLSDAIILAGVRNAFGKKWELYKSDHNELEKDLLKINHEKSNKEGEAIEKIKVYLIENKYGFVENDIRFKKLYHHSQEVIKVKEKDKIDKVENLRNPIVQQGVNETRRLVNELIAQQGKFDQIRVELGRDLKNSKTKREELSYKIRENDKKNEKAKELLIEFGLRRSRENIQKVLLYQEMPISICPYTNKIINISDLLGKENKFQIEHIIPKSISLDDSFANKTLCDSKFNGLKGNRTPHDFYEINKNPNLWGGAKSWEEIERRAFKVLPYPKAKRFVSKTKFETNDFIQRQLNDTRYISKKTSEILSQVCSDVRVMPGSLTAELRRLWGLNNILQPIMTVDIPNLHIVENKHIPHYVVLDNDKKPILSQRIYFDKPTTNENETLLSGSIEKGVFKSKEQYVKFQVNAPDLANGDYWAKLVLSNPKNIVQVFKEKPNTSENEIVLRGKIEKDKFKNDGLNAINVIGKENGTYWATFFIEKKEFKKLVKEEQTKKNGKQILLFGEVKNGLFSSYIYECEVEIEDGKYWLVIDVDFEKVTFERALNEKPLVKEHQILIQGTTNDENIFVSDMDNQHHFEMEEGKGKYYVLFDIVSEVTEFSPVKTIVPVLEEGQSLIEGTTWVDKYTGEIKFDPIKNREDHRHHAIDALVIALSKESFFQRLSKQNASSANKKRGGEYQKENLDFPEPWNGFHTDAKNVINSILISHKQNKNILTKITKKITKNGQTFKSVGMAVRGQLHKENLYGFRTPPSGDAGYHIRKSVESLKTDKQLEKIVDIKIKEIIIKARKAEIRLYKEVEQLSKQLKSPKNTEIEEKEIKEKIVALHIKIKSLYALPNKNGEPVPIKKVRVSEEMGNAQKIKSNVNKFVNPRNNHHIVIYKDENEELKDDITNFWKVVERVKQKDEIYKLPEIEIGKPAPKELVLFFHENDMFLLGLSNDEYNDNIKDYTFLSDYLYRVQKISDGDYSFRHHLASTVTNKKEEVRIASMKKYQEMNPIKVVISDLGKIQKV

SEQ ID NO: 8161 - protein, 1458 aa, unidentified
  REGION 1..1458: note = Description of Unknown: Cas Enzyme sequence
IKVIMSRILGLDLGTNSIGWAVVDKDGTNCSLVDKGVRIFSEGVKSEKGVESSRAAERRGFRSARKVKFRRKLRKYETLKVLANFNMCPLSVEEVIAWRKSGFIEYPTNDEFLKWLKTDDDKNINPYYFRDKASKGKANLFELGRALYHIAQRRGFLSNRLDQSAEGILEEHCPKIEDVFEEVLTVQDLKTEITNYFEGLDIFDITEKSGYKKDLDEGEKKLKSLFVALEKIIKTNESNFEKAKEEIVARLNRKEDLGAVKQNISEISQAIKNGGFTTLGQYFYSLYNREVAKENATTKEKEIFNRAKIRNQYTAREEHYLAEFEIICRAQHIEGIDENEVLPEKKYSGLVKDLYKAIFFQRPLKSQKGLIGKCSFEKNKSRCAISHPDYEEYRMWSYVNTIKIKTPEDETLRFLTEDEREKLIPKFYRKKDGFNFEDLAKELIPKGASFEFHKSFNAKSAHYLFNYKSKDSVSGCVVSTSLKNIFGEDWDTKSIIYQTKNGKDEIVNRAVDYKDLWHLLAVATSDIYLQEYAKEKLGLDEKRAKSFSKIKLKKDFASLSLNAINKIKPYLKEGLLYSHAVFMANIENIVDEKIWKDEIQRKLVQNKIAEIIEKNTFENGLLEAINSLIKDCKKEGSYYSKEAEVSFKKDLQKKLHSFFKYHKVEEGLEEILDELFPVFIEQLKEYKFIKVKRLDEKVLEFLSGENEDGEIFCSDKKQLKKLYHPSDIEVFKKKIVKDENGNEKVVLGSPLTPSIKNPMAMRALHQLRKVLNALILEGQIDSRTRIHIEMARELNDANKRKGIQDFQNENKKAREAYREEIKKLYLAETKKEIEPTEDDLLRYQLWIEQDKKEIYEDGKSIGIAQIIGSNPEFDIEHTIPRSFSQDNSLMNKALCSKRFNREVKKTKMPIELSNHEVILMRIDHWRQQAERLSWEIDQIVKSTKAITTKEAKDRKIRRRHYLTLKRNYIKGKYDRFIWEEPKIGFKNSQIPDIGIITKYSQAYLKSYFNRVESVKGGMVAEFRKIWGIQPSFQENGKKYYEAKDRSKHTHHTIDAITIACMTKDKYDALAHAWTLEDKEQIKAAREILMKSKPWETFTEDINKIEEEILVSHYTPDNVKKQSKKIVRIRGKKQYIAQIERDINGKAIPKKDSNEKIIYKIGEDGKRLPRMQQGDTIRGSLHQDSIYGAVKDPLNNEQIRYVIRKDLESIKATDIENIVDETVKEIVRDAKENKIIVFSSNAQQKNKLNGTVWMNEEKGIPINKVRIYANSVKNPLEIKDHAALSKSRHEHKQKVYAQNDENYALAIYEGLDKKGKIKRSYEAINLLIAGQYFKLSNNDFKEKYDIVTNPHDKTNLPLKYILKKGLMVLFYKESPQELKDLSIKDLNARLYKLSKFDAQGRLTFRTHFEARQASELKEIYNVDFKKPFEQIRLQVSKLDVLVQGYDFSLSTSGKIVFLI

SEQ ID NO: 8162 - protein, 1142 aa, unidentified
  REGION 1..1142: note = Description of Unknown: Cas Enzyme sequence
MTSKRKISEPFSVGLDIGIASVGWAILAEDRVIDLGVRCFNKAETAEKGESLNLARRTARLTRRRLRRRAWRLTKLARLLKREGLIPDSEFFKKQTPITPTTGKEPINLWTLRVEALDRILTDEEWARVIYHICKHRGFHWISRAEMKAADNDNEGGQVKKGLSGTKRLMVEHSYRTAAEMILKEFPEAQRNKAGEYSKALSRELISEELKQLFECQRNFNNPHASTALEETILGYGDKKSGIFWKQEPALSGASLLKMLGKCTFEKAEYRAPKASFTAERHVWLTRLNNLRVIVDGHSRPFTSQERALALLMPYEKSTLSYKQLRSALTKAGYFHDTFRFGGLSYPTLAEDGAKNPEDERLVKLDAWHTLKNTLTTAGLETEWLKISTPALEGDSSLFDNIAWVLSVYKEDAEVEKELRKLNLPSEVLVIDVLMETRFDRFSNLSLKALHGILPHMELGLRYDEACINAGYHHSQVVDWNDDKHLYLPPLYSGRDVNGSMLIRGNIDAPKNPVVLRALNQARKVINAIVSQYGSPHQVHIEMARDLSRPLEERRQIESAQEEFRERNQRDKESFAENFNVQEVKGREFEKWQLYREQQGRCVYSLNPIDINRLFEIGYVEIDHAIPYSRSYDDSKNNRVLVLTRENRNKGNLTPYEYLGGKSDSTAWREFSAFVKGNVSFRQAKRNRLLRKDFEEKNERDFIERNLNDTRYICRFFKSYLEQNLRLHDQSKSKRCVIVSGQMTSFMRLRWGLVKVREESDRHHALDAAVVAACSHSMVKRLSDYSRKKELQQVRKGFIDPSTGEVVDPVLLDKLEKHFPIPWPGFRDELLTRLFTESVQILRDGVSKLGTYSQEEIDSAMPVFVSRAPQRRNGGAVHKDTVYAKRDSLELANAVSQKKSVADLKLSDFDNLIEPHRNERLYTALREWVTHRDMRKSQAKSIEKAAKAEKRELIAKEISEIHSLLALPRKPDKNGMPTGPIVRSVTAVINNMSGIPIRCGIAKNDSMIRVDIFKGKQNNKFHIVPVYVHHRVNGLPNNAVVAYKDENEWTLMDSQYSFMFSLYPNDLVKITLKNELHVGYYAGADRATGAVNIWAHDRSVKIGKKGLIRGIGIKTALNCEKFNVDVLGRVFLAPPEVRSELA

SEQ ID NO: 8163 - protein, 1500 aa, unidentified
  REGION 1..1500: note = Description of Unknown: Cas Enzyme sequence
MKKILGLDIGTNSIGWAFIESNAYENPETLDGKIIQLGSRIIPMDADAMNKFETGVPESKATGRRQARGARRLNQRYKLRRTRLIEALKILGWIPENFPLHFKNLKKHSINEHLKFSDDLKKEAAVFFGIADKITTKGVAYEISEDWIIYFLKTKALHTQVSLPELARILYHYNQRRGFKSSRKDAKIEEEEKEIKWPIYQKWVEIVTITSIEEKGKGEGKDRDFTFYELTCKASSLEFKAVKKRKNPLDWLNKNIEVEITKKTTKDQIVTYTISEVDPKAWENRKAALEKDIAKENLYITEYYLKNIKTALQENHSYTVKQRIVDRKFYQEEFKKIWETQSAFYKKEFTDKNKVSEIADTFYTQNKEKNKELKAKDLFHIFFNDIIYYQRGLKSQKGLLANCQYETKTYKTKDKEPKTIGVKVTSRSCPCFQEFRIWQTIHNLGIIKKEETINGKLKINIDVSNEYLTPDNKEKIFELFDSSAEISHDSILRLFGFKKDVTENGEKSFNFKLNYPDDKSFKGNETKSLFRKVFKKHGFAEEGEKYISNSESLNQLWHIVYSLPEEKEIINALGNKKYFDLSDAVIQHISKLPEFASQYASLSSKAINKLLPLMRVGRYWNDGAIHITALDRINKIIDGEFDETISDKVREEILKLNLNNINQFNGLPTYIAAYIVYGRHSERANEEKYESIDQLQVKTLIPYNSLRNPVVEKIIRETLSLVKDIWANEKLGRPDYIHVELGREMKNNNDDRKKIAEANTKNRVEKERIASLLKELKYPNFNENSPSDLDKFRLWKENGGRKGEEDFDMLFKKNNAEFVKDADIEKYRHWAEQNYRSPYTGKTIKLSELFTEKYQIDHIIPRAKFYDDSFGNKVVVEAEVNALKDNRLAIQFIEDSQGKEINLTDGSKITVLSLEDYKKFADDVFTNKKKKRHLKLYEVPEGFIERQLNDTKYISRTVAQFLRPVAIGNETDEGVIYTSGSITSDLKNKWGLNKLWKEILKPRFERLEGILEEKLVLPSETKEGDYHFAKDYKRIDHRHHALDALVIACTSRSHIKYLNSLNSLSNNKKDKTYDDWAKWKYLLNKKKQLENLENGMTEFGTPWEKFYLDTKEAVESIIVSHKPTSKLISKAVNKYYKWKEDENGKWEKKIHLQEAPKDDDKYWVAVRQSLFGQPYGKIYIAEYKKGLEIKTALKAQIQFLSRENNDWNTEDWRIAKSELRKQLDQLIKQFNKDEKMILKFLSLNPFTDKEGNKIDKIDLLHFKKYASKKVSIDETFTKDKIEKMPYSNLEKNWLTNLLKQHLEAYGNEPKLAFKGEALEMLYKKAPYAINKVTRKESGEKIEKNNKLLDGDAGVNQFFIVEIKNEINKKTGEEVVVRNYSTPNFLECIERLAKGLTIHDEDPSSKYIILSPGDIVYVPEEGEKNNQINWNDKKFISKRIYIMKSSNNGQCFFIPSNISKPLVDTKELGANNKSERAWNKNMIKENFIKLKVDRLGNINPV

SEQ ID NO: 8164 - protein, 1401 aa, unidentified
  REGION 1..1401: note = Description of Unknown: Cas Enzyme sequence
MKKILGLDLGTTSIGWALVNEAQSEKEISEIIKTGVRVIPLTTDEETDFQKGKSITINADRTLKRGARRSLQRYKQRRKELIQLLKEGKLITDDSVLTEEGKDTTHSLWALRAKSPTEKIALEDFARVLLAINKKRGYKSNRKAKDEGDGQAIDGIEVAMQLYDRGETPGVYALNKLNEGKKHLPDFYRSDLYAEFDRIWKHQQPYYEELLTDKLKTELTDKHKTATWAICSKPFSIDGKIQKGTAAQKRLEVYEWRAKGLQEQLNLEQLAIVLSEINGQISGSSGYLGAISDRSKQLIIDNITVGQFLFSQLEKSPHTRLKNQVFYRQDYLDEFERIWETQAKYHSELTAELKAEIRDVVIFYQRRLKSQKGQLSICELEQYQVEVEADGKKKMKTVGPKVCPKSSPLFQEFKIWQILNNIEVRAKEGTDELFDEVADAGLTGENKRWVLDLELKQLLFANLNLQDKLTAPQVLKEIGLSGKKWELNYKEGVEGNRTNAKLYEAYSNILVEAGYEPLDLKQGSADRIYSTVKEVFSSLGINTAILDFDTTLQGTDFEKQPAYLFWHLLYSYEGDSSRSGNDALLQKLKTNFGFEEEYGTHLLSVTFQEDHGSLSTRAIRKILPGLKDGLQYDVACDEAGYNHSHSVTKEQNENRILKDALALLPKNSLRNPVVEKILNQMVNVVNRLIEVYGKPDEIRVELARELKYSAKEREEMTKNIASATKLHDTYRIELKKLYPFNSGVRITRNDIIKYKLYKELERNSYKTIYTNTYIPLEKLFSKEFDIEHIIPKARLFDDSFSNKTLSVRQINLDKSNTTAYDFLAEKYGEEGTEFKSYLARVEKLFKDGIISRSKYKKLLMKEADIPDGFIDRDLRNTQYISKKATQMLLEIARTVTPTTGMLTDRLRQDWQLVNVLQELNWDKYEKLGLTTTELTKDNNSIKKIKDWSKRNDHRHHAMDALTVAFTKPSHIQYLNYLSARKDVDHKKHKIILAIEAKETFINEKKKRLFVPPIPLDDFRKQAKAHLENTLVSFKAKNKVFTKNKNRIKKNGNTHFTKIELTPRGQLHKETVYGKKQLKAYGTEKVGPKFDEAKIAMVVKKVEREALLARLQQFDNDPKKAFGGKNALDKNPVFLDKYQSVQLSETVKLGWLEAQFTIRKPIGPDLKIEKVTDEGVKRILQQHLDKFKGDPKLAFSNLEENPVWMNEEKGIKLKRVTITGVSNAEPLHYKKDSKGELILDADGKSIPTDYVQTGNNHHVAIYSDANGKLQEKVVSFYEAVERNNQGLHVIDKTHNQDEGWEFLFTMKQNEYFVFPNAETGFNPHEVDLLDEKNYAAISPNLFRVQKIATKNYFFRHHLETTVETVPELKNIAYYPQLGLGAITGILKVRINHIGQIVHVGEY

SEQ ID NO: 8165 - protein, 1548 aa, unidentified
  REGION 1..1548: note = Description of Unknown: Cas Enzyme sequence
MAEKIILGLDLGTNSIGWALVKQNFDKKEGEIINLGSRIIPMNGYVSTTSGKPSKDPMSDFAIGSGISKAHARTKFRGARRLIQRFLLRRERLHRVLNILDFLPKHYSNAIDFEKRLGQFKPETEEKLPFYKNEIGKNQFIFMESHAEMLQEFKVNFPKIKKIPYDWTLYYLRKKALTDKISKEELAWILLNFNQKRGYYQLRGEEEETKNNKSEEFYSLVVSNVTPGDKGKNGIWYNVILENGWIYRRESKVSLNDWIGKTKDFIVTTDLNDDGTIKTDKDGKEKRSFRAPKEDDWGLVKKRTEQNIGDDQTVGCFIYEHLLKNPSVKIRGGLVQTIERKYYKEELKKILEKQIELNSDFFNEQAYQKCILELYPNNDTHRNSISKRDFLYLFMDDIILYQRPLKSKISLISNCQYEKLRFLNSDKSEVVEQPIKCISKSHPLFQEFRLWQFISNLKIYTKTSTDIIDVTNEFIKSEIEAVDLFNFLNDKEDVSQKQFLAFYKLKEDKYRWNMVEDKIYPCNETRSQFLNKIVKIDSVDKSFFNYENSFALWHILHSVSDKIEVKKAIEKFVVKHDLPEECIDAFSKIKPYKSDYGAYSAKAIKKLLPLMRLGKYWEEEAITEAVKSRIKQIKERLTSIEFDEKRIEDVIDDDITQAILKSFIKAANFESGLSTYQACYLVYGRHSESKDQDKWNSPQDIAWYLDGKNPNGFKQHSLRNPIVEQVITETLRTLKDIWQHYGNGEKDFFNEIHIELGREMKNPAEKRKRMTEQVSQNENTNMRIKALLQELKGENDEVRPYSPSQQEILKIYEEGVFGNESRKEELEVIEKIRKNNKPTKSEIQRYKLWLEQGYISPYTGQTIMLSELFTIKYQIEHIFPQSRFFDDSLTNKVICESEVNQLKDNKTAMEFITQNSGRIITLSGGRTVTLLTKDSYIRHVEIYFSKNKTKLKNLLSEEIPESFINRQLNDSRYISKVVKMYLSKIVRDDKSGAIEADATSKNVVSVTGSITSKMKQDWGLNNVWNDIITPRFERLNQMTNSLDFGQWENKSGKKVFQTTVPDSIAKGFSKKRIDHRHHALDALVIACLSRTHINYLNNLNAKDVNDKSIKHELRNKICYKTKPDENGNYKWLFFKPWETFTQNANEKLNTTVVSFKQNLRVINKTVNKYQTYKDEDGNLRLDKNGNAKKEYITQIKGESWAIRKPIHAETVSGKVFLKRIKQTPVAVASVLDQIDLIVDKEIKKQLLEKAKHYKDNLAGLKTHLKTNPLKIIDKIIDKVLIYETIEATATRKLLDISFDEKRIKKITDTGIQKILLNHLKQSIYQSVVDENGKSILPHEAAFSEHGIDTLNENIQQLNNGKNHQPIRKVRVFEESNKFQLGLTGNKKDKYVETAKGTNLFFAIYQDENKNKKFITIPLENVIECQKRGLSSVPDTYIDEKSKIISKIHLSLSINDLVYIPNADEIENPNFVNFENLTKEQATRLYNVNDFSGYTIYFTPNTFAKNISSKELDTSFDSKMSKTLEGIVIKENCWKLNVNRLGKITSSKR

SEQ ID NO: 8166 - protein, 1038 aa, unidentified
  REGION 1..1038: note = Description of Unknown: Cas Enzyme sequence
MFSQRNNPYCELLSILYCKYINFNSNKKIKMKKVLGLDLGTNSIGWALVEQNFTEKKGNIIGLGSRIIPMSQEILGKFDSGQSISQTADRTKYRGTRRLYQRDNLRRERLHRILNVLNFLPEHYANSIDFKKKFGQFKLNVEEKLNYFKNERGKNEFLFEESFNEMIKDFKKYQPDLFRIKNDDTETKIPHDWTIYYLRTKALSKKISNEELAWIILNFNQKRGYFQLRGDEIDEDKNKQFIELKVKDVVDSGEKVKGKILFDVFFENGWKYDKQITKTEDWINRTKEFIVTISKLKTGEEKLSYKAVDSEKDWAAIKAKTEKDIEQSNITVGQFIYESLLQNPKQKIRGKLVKTIERKFYKKEIVNILQKQIELQPDFFSQLALEKCIKELYPRNEAHQNKLKEQDFIYLFVEDIIFYQRPLKSQKSNISGCQYEYSVYEKVNEETGSKEKVRQAIKAISKSHPSFQEFRLWQWLHNLRIYKREDRLNDKLVLDHDITNLLIKTDEDRVEFFEFLTTKETVEQKHVIDFFIKKKLIDKKDIENYRWNYVEDKKYPCYETRATFSRRLNKVQGVDDSFEFLTEKTPVGNRFMSREEQLWHIVYSVTDLKEFESALGKFAIKHEIDKATFVGNFIKYPPFKSDYAAYSKKALDKMLPLMRISKFWNESNINPLVFDRYKAIKERIDFLNLNANLTEKELKTNLNAVSDDDIPKQVIKSFLKSNENPLSGLNTYQACYLIYNRHSETGDIQNWKKPEDIDKFLNEFKQHSLRNPIVEQVVTETLRVVSDIWKYYGGSKQNFFNEIHVELGREMKNSSDKRKKISNKNIENENTNVRIKEVLKELMNDPNISGDVRDYSPSHQEILKIYEEGIAQNPSVSYAEMKEDDVEKIRRTSQPSHNDILRYKLWLDQGYISPYTGQIIKLSQLFTPAYQIEHIIPQSRYFDNSFSNKVICESDVNEDKSNKTAAEYLKEKGGSIVNGHKLFNFEKYQQHVSIYFRKNNTKLSNLLADEIPEGFINRQMNDSRYISKLIKGLLSNIV

SEQ ID NO: 8167 - protein, 1293 aa, unidentified
  REGION 1..1293: note = Description of Unknown: Cas Enzyme sequence
MAKFILGLDIGTNSIGWILFKDNKVFDKGVIIFPIGTNVDKNGIESTKNQQRGGYRRASRTHFRYKLRRKDLRKLLTTLNLLPTFSSTFEVKEKYQASELYRLRASALDNQIPSEELGRILLLINKHRGFKSNSKTFSTESKDDEGVVKEDIRNLGDAIKSKDARTIGEYFYKMYEKSATSFAAGTWHNIDEPLDERAIDADGIFYIQNNRGIRREGRFVAREMYATEFDLIWDEQKKYYPQLSGSKKEYDEMCNLPVEEKRAKLKLFKETYYWKVKHQTIFFQRPLKSQKKFIGRCQFEKNKRTAPSSSLLFQEFRIWKQLADIRYTDKEQDIYKQPLPAGWKQKIVDYLTTNLSLNLREGRKKEDGTRKTDVLDVLGLTNKKNFEFNYDENEEDKFFHGNKTLYAIYTTCGKDRFNKLKAENKLEKLWHILYMAKDDEWLKDTLTWKWGFDETTAKRLVEMGLEEGFANYSSKVLEKILPHMKNGNDEHKALILANYIQASDEEKIVVTLSNKIKQLANNELRNPVVEKAVGETIRLVNTILKLHEIDQDDFTIRVESTREFKKPKKERENIRRKNLDTEKRRQEYANFLNIKKTNGELSFGRDIQKNDNIINKFELWLELGADKNDPEFKAFEKIVERKDREKHKLWLDCNRICPYTGKIISLTKLFSAEIEVEHIIPYSWSLDDSFTNKTLTFSHINKEKSNRSAYEYMKSKGEVEFKAFKSRVKVFNKEKENERFLNAKYEQTFTNAQGRNASYIAVYVRKKLQEVCRDVQFTNGFATGELRKNDWRLGNLLDKVRYQEETGLDIDKHARELGNYKRDFETFRKRKANSTDILRTDWRNLTPEITAEYEAETKNPLYEWWQELQKFDIFRGAKGKKDRSDHRHHLLDAIIIAMCSPSIIQRLSTLNQLREKQGASLYDEKGELTRERIDLPVPYNEIKEALESVLVYHKAEQRLITTKQNRIHKKKHALSDTSTIKQRTISPRGSLVGDNFYGKLKNPQNQGFEKENVFVKRVALTGDNFKDKKALDKVYNKQIKKILELRLDKYGDKGEKAFSEEALLTDPVFVYSIAKYPNGLPKNPLSKDGNTLPIIKKIRIANKNSRNLIQLVAKDEEKNIVNANRYSEADGNYVMALYESKETDKKGKEKIKRDFEIVSFFKAVEKRRKGEKLFPDEKEQKDGTFLPLMKTCTHLKAGDFVVIYEENEFEIDWGSKEDLKKRLYLISELNKQVNVDKTTGKENEFGVIKINKHTNQKTSKDSYITEGAFIKVLHTGFKAIKVQIDRLGNIKPI

SEQ ID NO: 8168 - protein, 1379 aa, unidentified
  REGION 1..1379: note = Description of Unknown: Cas Enzyme sequence
MSEKVLGIDLGTNSIGWAIRSINESLDNQIIDKGVLTFDKGVAEDKSGEHPMVQKRTESRGKRRNYQAEKYRKWTLLKTLIENKMCPLSMDELNEWRHYKKGVGRKYPQSEKFIEWLRFDFDGDGKPDFERFGFSKHESYYLFRSLIVDESKIDIFKAEPFIIGRVLYQIVQRRGYNDGGEIDEKEKSELSKTIMKGGGEAGAEGVDKILGYIEKHKTLGSALYHIQKEQKSRIRKRYNLRSHFEAEIKEICRVQNIEHLYKSFWSAIIWQRPLRSQKGLVGICTFENNKSRCPVSHPLYEEYKTWVFINNLKIKPITEKDEDLMDKQILLNTIVYPEFFKAASDFKLSVIKNKLKKTGYEITAKFPDDTKVNSVPFLYRMDEIFGEKWKDILDWENLLHNNPKSKKCNYNIEDLWHLHFVKTTNKDTGETSFEYITRFAVEKLKLDEKKANVFSKIRLQQGYATLSINAIKKILPYLKQGYIYSEAIYLANLPKVLGVSSLSQENILHFSQEASKIMREDKEQRKLLQIVNELISDQLNSDTRYGMDTNYKLDDVDYRDIENKIIEVFGNVSWENTIEEEKTRITDYVSQKYLAFLQKRIFAKNVYEKSERLHDKIFNWISQAYSLPVENKKHLWHPSEQETYAKAPEIDGIKYLGSPEPISKGFKNPMALKTLHKLKKLINYLLETNKIDEDTRIVIEIARELNNANERKAIEKWQRDREKQNEIYRKQIDEININSKTNFNPQDKNLIDKIRLWEEQKRLCIYTGRAISLSDLLNGAKYDYEHSIPASMSFDNELKNLTIADKTYNQQIKGKRLPSECPNYESEYTHNGITYKPILNTLQVIFGDLSKEEIKGRDGKKKIILKFKKIIDLENDLQEWYDKSSDDKEIKSNIIVGRHYRKMELNYWRYKLQTFLIKEYKAGFRNSQLRDTQTMTKYSLPYLKTIFKRVEVQKGNTTADFRKIYKIQPRLEKKDRTKHSHHAIDAAVLTLIPSAAIRDKILLKYNEANESNIGYNEEPKQWKNFTSKHILSIEDDVLINYQAQHRTLTPTVKNVRKRGVIQFVKEKLENGKWQYKLDVDGKRIPLVAKGDSIRGQLHKDSFFGAIKKDDAIILVERYPISTFTSINDCKHIVDDKVKELVHNELQKRMDRGMSFDQAKLEPIPFHKGNEVIKKVRCKVAAGRGYLGTDKAVKINEHAFKSKHEYKQSVYAQNDTNSYCLLYERVEENKIQRAFKIMGLYELSQLGLKNENDIFKEPFYNKTTIGKGKKEIELSLKHILKVGVKCVFFKENKEELTTLSLIDLLKRTYRVFKFNDIGVTKYIYLQNHLEARKNDELTNGDVNFKPENYQSRLMLNADNFTCIIEGKDFEINIDGNIVFK

SEQ ID NO: 8169 - protein, 1076 aa, unidentified
  REGION 1..1076: note = Description of Unknown: Cas Enzyme sequence
MEFEKWNYAGDLKVPGNPTIKNLKSLFKSDIFEKFKNEIWHCFHFYDDNDLLVAKLKKDFDLLENDVDKAKKIKLKEGYSNVSLKAISRISPYLERGFQMSEATLLGGVRNTFGNRWDYFTSAHQIIEKDVLEINRKPSNKEGQAIAEIKEYLANNDYGFKENDLNFHKLYHHSQEIKVKETKEKLDPIENLRNPIVQHTVNETRRLVNQLIKEYGKFDSIHVEIGREIKNGKKSRQEQSKRINENTSKNDDARKLLTEYGLRHERNNIQKVLLYKEMQERGVVTICPYTNKAINMNDVLGGENKFQIEHIIPKSVSLDDSFANKTLCDSQFNSLKGNQTPYQFYLKNSDSKLWGGVKSWEDIEQRAFKVLPYMKAKKFATKLKENGDVQDGFIERQLNDTRYIGRKTKEIMSQICSDVKVFPGGLTSELRHLWGLNNILQPTMLVDLPNYKIEEGKSIPHYVVLDESGSPVESSPIFNDKPVLGPNQTSISGKIDKAIFTAKEKYVNLKVDSEGFSNGDYWLNVNLSEPKNTVRIFRERPQSSENQIALRGKIEKEKFKNDGIGSVPAPRNDNGSYWAQFEIIAKVFEKPEKDKQPKKSNKQILLFGEVKGGAFSSFIYSCVSDQADGKYWLVLDVDFETVTYDKAINERPSLGENQIIVEGSVNDDGLFVSEMDINHTFQTTEKQGKYWVVFDLLGDLTDLVPQEIPKPILKEKQKRVEGSIWIDKHTGEIKFDPKKNREDHRHHAIDALIIAMSKQSYFQTLSKYNANRVLKRKVLSFEKEQLDFPEPWESFHKEATQMAQRILISHKQNNKVLTQIRRKIVKNGQVYTSVGDAVRGQLHLENIYGKKQAPMAVSKGCHIRKSVATLKDNQLDKIVDSEIRRIIKDARVKEVIIKKQIESLVKEKKKSKTDEEDQIIDDQIETKKNEIQQLYTLKNTKGGERVPIKKVRIREEIGNARPLKKNLHFVNPKKNHHVVILESESQELGQNIASFWDVVSRIKQGESLYQSPSENQRIKTTLQSNDMFLVGMNDEAIFDNRSNFNQLSRHLFRVQNISRGDYLFRHHLASTLDDSN

SEQ ID NO: 8170 - protein, 1049 aa, unidentified
  REGION 1..1049: note = Description of Unknown: Cas Enzyme sequence
MPYRLALDLGANSIGWCMLDLDPAGLPAGIIDMGVRVFPDGRDPKTLASLAAERRLARGTRRRRDRYLQRREALLNALARHGLMPADESERPALVALDPYALRRDALHRRLDPNEFGRAIFHLNQRRGFQSNRKADRSNEAEQGKIRTASDRLKQEIARSGQPTLGAWLAERHDNAQDVRARLIGAGAKAAYPFYPTRDLIRAEFDAIWAAQAGWNPILTPDVRDAIVAILFHQRPLKDPPIGRCWLEPTLPRAPKALPIAQAFRIAQDLSHLAIRRVGEPDTVLIDKQRAVLAATLLAGKDLSFHQVRKLLGLSHGETFNLESTTREKLKGAETAARLAGKDKPLSELWPRLGSTRQEAVVLALLNATTPEQAVASLVALGAPVDLAAQAERVTLPDGHAALSADAMRAILPHLESGMTYDKAVLAAGYRHHSDDRDGVIHDRLPYYGAVLAERIGTGTGEPEDPEEKRLGRVPNPTVHVALNQLRHVVNAVIARHGHPAQIIVEVLRELNQSAFERRRIEKEQAENAKRREAWAKELTKLGHRVNAGNLALLRLWHEQSGDPKERVCPYTGERISLARLFSGEVEADHILPFAITLDDSFANRVVVLREANRRKSRQTPHQAFGASPEWPEIVQRAAQLPGNKAWRFAPDALQKWQGEHGDFLARHLTDSAYLARLARLYLRAVCDPDPDHVYVVPGRLTSLLRHSLGLNSATLLGKGGARKERNDHRHHAIDALTIGLVDRSLLQRVATAAGRAQDRGRRLLDDLGEPWPGFTAAAADRLRAVVVSFKPDTAPSGRLHNDTAYAALPDAGPKAPNVAHRVPIQGLAGWKPEDVRDAIFNSQLADRIIAALGSAEGKPAQAAALGAIAHDAAGRAVRRVRVNERLDGTTAIVDRRSGQPYKLVKLDANHRVEFWRLPPKGGKPGKVQMVVVPMLHAAMDAEAVRLKRQPPDRRPHPAAKLLMRLHKYDVVAFGVGEARRLLRVVKFREGQVNFADVHESGNLKARDADKADPFKYVNASTSRFAVENARKVFVDPSGRVLDQGPLPW

SEQ ID NO: 8171 - protein, 1427 aa, unidentified
  REGION 1..1427: note = Description of Unknown: Cas Enzyme sequence
MSKKILGLDLGTTSIGWAYVIEGLKPELSEIIQIGTRVNPLSTDEQTNFEKGKPITINADRTLKRGARRTLDRYQMRRKNLIEVLSSYKIITKETVLAEDGKNTTFETWQLRSKAVNEKIAKGDLARVLLAINKKRGYKSSRKAKNEDEGQAIDGMAIAMRLYEDNLTPGQLVLKLLEEGKKHVPDFYRSDLQTEFDRVWNAQKQFYPDIFTDEFYKELQGKGQRATAAAFWGKYKFNTAENKTKSREDKRLQAFKWRSEALDSQLEIEEAAYVITEINNNLNNSSGYLGAISDRSKELYFNKETVGQNLYKQLLNNHHTRLKNQVFYRQDYLDEFEAIWNEQSNHHPELTSELKAEIRDIVIFYQRKLKSQKGLISFCEFENVEKTINGHNKTIGQRVAPKSSPLVQEFKIWQILNNVEVRKKGVKKNAPKNSNQISMFEVEKEIYQLSIESKQSLFDELNTKGNLSANKILEILGHKPSDWEINYTQLEGNITNKVLYNAYLDILEIEGYDVKNLLKVKLNKDEVHLDDLDVPASDIKNMVRSIFETLNISTEILEFNAELDGKSFEQQAAYRLWHLLYSYEGDNSSSGNEKLYELLSKKFGFKREHAKILANVALLDDYGSLSSKAIRKIYPFIKENNYSTACELAGYRHSASSLTKEEIANRPLKDTLDLLKKNSLRNPVVEKILNQLVNLINSLIDKYSTKDKDGNIIEYFKFDEIRVELARELKKNAKERAEMTTNINAAKIEHEKIFKILQAEFGVKNPTRNDIIRYRLYEELKNNGYKDLYTNTYIPKEILFSKQVDIEHIIPQSKMFDDSFSNKTIVYRQDNLDKGNKTAYDFIESKFGTQKLDEYSQRLEQLYKLGKIEGISKAKYQKLLKQEKEIGEGFIERDLRDSQYIAKKAKNMLFDITRSVVSTSGNITDRLREDWGLINIMQELNFEKFKTLGLIEKVEKKDGSFKERIVDWSKRNDHRHHAMDALTVAFTKHNYIQYLNYLNARKDEKHKLHHNIIGIENIETEIRINDEGQKARVFKTPIPNFRHVAKDHLESVLVSHKAKNKVVTTNKNIIKSSTGDKTKIELTPRGQLHKETVYGKYQYTVNKEEKVGTKFDLDTINKVSKPLYKNLLLERLQENDNDPKKAFAGKNSLSKNPIYLNSEKTVTLPEAVNLTWLEEDYSIRKDITPDNFKDSKTIEKILDHKIKNILIQRLESFGNDPKKAFSDLNKNPIYLNEHKGISVKRVTISGVKNAEFLHHKKDHLGNVILDKEGKPIPVDFVSTGNNHHVAIYRDEKGNLQERVVSLFDAVQLVNAGEQVVDKTYNQGIGWEFQFSMKQNEYFIFPNPKTGFDPKEIDLFDPKNKKVISPNLFRVQKFTIKDYFFRHHLETVVEDNTQTKGITWKREGLSGIKEIKKVRINHSGDIIHIGEY

SEQ ID NO: 8172 - protein, 1465 aa, unidentified
  REGION 1..1465: note = Description of Unknown: Cas Enzyme sequence
MNKNILGLDIGTTSIGFAHIIENDTDASKSEIKQIGVRIIQYDNFDKVDKTGQVSESKKPEEDFAAGRGLSPNASRTIKRGARRRLDRYQDRRSNLINALSNANIINKETKLAEIGKASTFSTIEARAKAATEKIEKDELARVLLAINKKRGYKSSRRAKSAEEGQAIDGMGIAKRLYEDNLTPGQLSLQLLNEGKKNIPDFYRSDLLGEFEKVWNTQKIFYPEIFTDEFKKEINGKGQKATSALFWNKYQFNTAENKAKTREEKKMQAYSWRSEGVNSRLTKEEAAFVITEINNNLNNSSGYLGAISDRSKELYFNKVTIGQYLYKQIKKNPHTKLKNQVFYRQDYMDEFEAIWNEQSKYYPELTEAFKIEMRDIIIFYQRKLKSQKGLISICEFESRDIEIETNGQKVKKTVGLRVAPKSSSLFQEFKIWQRLNDLEVRKKGSNKRKIKKTENQISLFEEESDVFIFTQESKEYLFEELNLKGNLPASKIKELMGLKAEDYEINFSELEGNRTNLEFYNAYLKILEFEGYDENLFKLSEKDDINVSELKTPASEIKKMVREIFESLGIDTNVLEFDAELEGKAFEQQSSYQLWHLLYSAEDDSKKYNEDDNLVYGNENIGLKKLICQKFGFKPEHAKILANITFQNDYGNLSSKALRKLYPYLRENNYSTACELAGYNHSSRSLTREELANRELKDNLELLKKNSLRNPVVEKILNQVVNVVNSLIEKNSTKDENGKTINYYRFDEIRIELARELKKNAKERAEMTDNINETKIKHEKLIKILISEFSIKNPTRNDIIRLKLYEELKNNGYKDLYTNTYIAREILFSKQIDIEHIIPQSKLFDDSFSNKTVVFRKDNLDKGNQTAIDYIERKFSDKGLLEYQKRIENLFEQGKKNKEEGINKAKYQKLLKREMEIGDGFIERDLRDSQYIAKKAKDILFSITRSVVSTTGSITNRLREDWDLINVMQELNFSKFKKLGLTEKVEKKDGTFKERIVDWSKRNDHRHHAMDALTVAFTRHNHIQYLNYLNARKNEKHKEHNNILAIEEKETYLLTDENGRRKRKFKLPIPNFRHLAKEHLEGVLVSHKAKNKVVTKNKNKITGKEKTQITLTPRGQLHKETVYGKYKYYDQSEEKINSKFDEITIAKVANPAHKKLLLQRLADNGNDPARAFSGKNAINKNPIYLNSEKTKQIPEKVKLVWLEENYSIRKDITPDNFKDEKTILKVLDKAIKDILLDRLKKHKGDHKKAFSDLDKNPIWLNEAKGIAIKRVTISGVKNAEPLHFKKNHLGQGILTEDGKPIPVDFVSTGNNHHVAIYRDEKGNLQERVVSLFEAVQLVNAGEPVIDKYYNQGLGWQFLFTMKQNEYFVFPNGKTGFNPKEIDLLNPTNKKLISPNSFRVQSLSIVKYGNNTIRDFKFRHHLETTVEDKKELIGISYQQIKSLLPLENIVKVHLNHLGEIVKVGEF

SEQ ID NO: 8173 - protein, 1522 aa, unidentified
  REGION 1..1522: note = Description of Unknown: Cas Enzyme sequence
MKKILGLDLGTNWIGWALLDQSLDEKIAKIINAGSRIIPMSQDILGKFDSGQSISQTAERTGFRGIRRIRERHLQRRDRLHRVLNILGFLPSHYAVQIDFERHFGQFLPEIEVKLPYRNTIETAKAEFIFINSFNEMLSDFAKQQRQLVEHGKKVPYDWTIYYLRKKALQYKIEKEELAWLLLNFNQKRGYYQLRGEDDEDATKTAKTRKYFVTQKIESIIDTNEVWKGLKVLIVKLEDGNAGKIFKKQIPEWIGQERNIIATVDLDKEGKDKLEENGTLSQRFSIPTEEEWDKEWKLIKIKTENEITNSHKTVGTYIYDTLLKNPKQKIKGKLVRVIERKFYKAELEAILTKQKEFHVELTDETLFKSCLEELYENNEAHRNGISQKDFIYLFLNDIIFYQRPLKSKKSLISDCKFESRTYIKAGKKETEPLKCIAKSHPSFQEFRLWQFVQNLRIYEKEKEVDGKLQPDVEVTNEFLKSKEDWINLFDWLNNRKEIDQKAFLKYPVFNLKKNSEKYRWNYVEDKIYPSNETRSLMANRLDKIENAPIDFLTKENEEALWHILYSVEDKNEIQKALKTFATKKGLDDAFVDQFKKFPPFKKEYGSYSAKAIKKLLPLMRIGKYWNEEAIDNKTKERIEKLINGEYDETIRNRVREKAIKFNNIQDFQALPQWLTSYIVYDRHSEDGDTLKWKTPNDIENYLRFTFKQHSLRNPIVEQVITETLRVVKDIWTTYGEGAEDFFTEIHIELGREMKNPSDKRKQMTEQININENTNLRIKALLMELLNSGDSENVRPYSPMQQEILKIYEQGVLSAEQNIPDDILKITKLAQPTSAELIRYKLWLQQKYRSPYTGELIPLSKLFTRAYDIEHIIPQSRYFDDSFSNKVICEAEVNKDKDNSTAYEYIKNNSGKKIELSFGKEATLFTIKEFEDFVKTSYTKSRGKMTKLLMEDIPEAFIQRQLNDSRYISKVVKNLMSNIVREKDEQEAISKNVIATNGAITAKLKQDWGLNDIWNEIITPRFERLNELTKSTKFGEWTNKEGKRVFQTQVPIELQKGFNKKRIDHRHHALDAIVIACATRSHINYLNNESALGKDKKEAKEKKRYDLKHKLCFKKYNDDTKKNYTWAFHKPWETFTKETRETLQSIIISFKQNLRVINKTTNHYQVFKKDETGKVVKESVKQTKGENWAIRKPMHKDTVSGLVQLKFKKTVSLSAALDIRETITDKELRKQINELVNQNYDKKKLIKFFKNQDYKSQERDISKVEVFYWDNNNVASRVKIDDSFTSDKIKSITDLSIQKIMFNHLAKYTKGESSKITEQPEFAFSADGIDEMNKNIKELNNGKNHQPIYKVRTYEPKGNKFTVGQTGNKKDKYVEAAKGINLFFAIYQDENGNRNYETVPFNIVVERQKQKLSPVPEKNEAGQELLFHLSPNDLVYVCNDDDKVNKNSLNFEKITIEQYKGIYKVVSFTGNRLSALPYSVAKSIVDKVEFTQLNKLEFSIEKVSIKDNCIKLKTDRLGNIKIA

SEQ ID NO: 8174 - protein, 970 aa, unidentified
  REGION 1..970: note = Description of Unknown: Cas Enzyme sequence
KFIKNGDDFIALFDWLSERKEVEQKDVLKYIGLKKDAENYRWNYVEDKKYPCNETHAQITSRLAKVKVVPENFLDKTTEEELWHILYSVTDKIQIETALKKFAKRKGLSDDFAEIFRKFPPFPSDYGSYSLKAIRKILPLMRAGKYWDERHIHPQTMDRIAKIITGEFDEKIQTRVREKAIILTESHHFQGLPEWLASYIVYNRHSEDADAKKWKTANDIETLPLHSLRNPIVEQVINETLKVVQDIWKQYGKGEENFFDEIHIELGREMKNPNDKRKAMTEKMNENENTNLRIKYLLAELANDPEFENVRPYSPPQQEILRIYEEGVLSAEQDRIPDDIAAIIKTKLPSSAELTRYKLWLQQKYRSPYTGKMIPLNKLFTRAYDIEHIIPQSRYFDDSLSNKVICEVEINSDKGNAMAYEYIQNNSGKKVELSNGKEVTLFTLEAFEDFVKTTYSSARGKMKKLLMDEIPQAFVERQLNDSRYISKVVKNLLSNIVREKDEQEAISKNVIACSGGITSILKQDWGLNDVWNDIITPRFERLNEMDALANKVPFSTKFGEWTNKDGHRVFQTQVPLLLQKGFSKKRIDHRHHALDAIIIACASRNHINYLNNENALGKGTKEEKDKKRFDLKHALCFKKYNDDSKQNYKWVFHKPWDSFTQDTRETLQQIVVSFKQNLRVINRTVNQHQAWREDETGISKKVMVKQTQGENWAVRKPMHKDTVSGSVKLQTIKTVQLSTALDDWEMIVNKDVRKQIKELVAHKYDKKLLQKFFKDKNNKWEGKDISKLEVYFWDNENVATRTKVDENFTSIWIASITDSGIRKIMLAHLEKYNEDKNGKIVEHPELAFSPDGIDEMNRNMKELNGGKHHHPIIKVRTFETKGNKFSVGQTGNKKDKYVEVAKGTNLFFAIYLNAEGKRVYETFEMNLVMERQKQGLLPVPEIDNNGDRHLMFLSPNDLVFVAGADVFLFY

SEQ ID NO: 8175 - protein, 1059 aa, unidentified
  REGION 1..1059: note = Description of Unknown: Cas Enzyme sequence
HYSFSIDFKKRLGQFLPETEPKLAYKQGIDGKHQFIFIDAFHKMVEDFKTVHPDLFYAKKDGNETKIPLDWTIYYLRKKAINEKIEKEELAWLLLHFNQKRGYYQLRGEDEEEVHNRLVDFHSLQVVEVTADEKQKGKDALWYNIILENGWIYRRESKVALYDWKGKMRDFIVTTDINDDGSIRKDRDGKEKRSFRSPKDEDWTLLKKKTEQDIDKSEKTVGTYIYDSLLQNPNQKIKGKLIRTIERKFYKSELLQILSKQKEYHPELNDNKIYEDCLIELYGNNDAHRNSIENKDFTYLFLNDIIFYQRPLKSKKSLISNCRYEAKNYKLNGELKIESNKCIAASHPLFQEIRLRQWIKNLRIIEKESENDVTTLILPSEQNWIDLFDFLNNKKEIDHKTLLKHLLKPLGLKPKQLDAEVLKYRWNYVYDTSKDESKQYPCNETRTQMLSGLAKIENVADNFLTKEREEALWHILYSVTDKQQIETALKTFARKNGLGIDFSDVFKKLKPYPNDYGSYSSKAIKKLLPLMRVGESWQEDENQKMIADNMPCYRQHINALISKIKSRDDKLINTKLLTELEKLDDVITNYQGLPIHIACYVAYGRHSEEGEITKWKTVTELEAFLQNFRQHSLRNPIVEQVITETLRVVKDIWLTYGKGRENYFDEIHIELGREMKNPADKRQQMSQQITKNENTNLRIKALLAELKNDNTIQNVIPYSPYQQEILKIFEEGLLSSYEDLPDDILKISQLSQPSYAELQKYKLWLNQGYASPYTGANIPLSKLFTPEYEIEHIIPQTRFYDDSFSNKVICESAVNKLKDNQTGMEFILNNFGTIIQGVSKPIFTKDQYESHVKRYFVKSPGKMKKLLLEDIPEKMIERQLNDTRYISKVVKNFLSNIVRNETNDDGTTSVNVLSSNGSITNTLKNDWGFNDIWNDLIADRFIRLNGMTNSNDFGDINPNTNKFLPTVPLAISKGFSKKRIDHRHHALDALVIACATRSQINLLNNQNALEKGKSKEQKQRSREDLRRLLCVKKYNKGSNINYKWVFKQPWKTIVQETKD

SEQ ID NO: 8176 - protein, 1040 aa, unidentified
  REGION 1..1040: note = Description of Unknown: Cas Enzyme sequence
YKKFKVNGEERIEFLKVIPKSNPFYQEFRLWQWIYNLNIYERSNDQNQTNDLLKSIVDVENLFDFLNDRKEIDQKALLKFFKLSEKTHRWNFVEDKKYPCNETRAQFVSRLQKVDRVPQNFLNNQKEMQLWHIIYSVTDKLEFEKALKTFAEKNNLEINSFSEAFKKFPPYKSDYGKYSEKAIKKLLPLLRIGKYWSWDNIDTNSKSRISKLLNGEWDDNIKNQVREKSIKLTDESHFQGLQLWLASYVIYDRHSEAGSLSKWNTVADLENYIQDFKQHSLRNPIVEQIVTETLRVVKDIWKELGKGEKDFFTEIHVELGREMKNTADDRKKITSQVTENENTNLRIKSLLIELKNDDINVRPYSPMQHEALKIYEEGVLNSNIEIPEDISKIVKKASPSNTELQRYKLWLEQKYRSPYTGQIIPLNKLFTTDYEIEHIIPQSRFFDDSFSNKVICETEINKLKNNQIGLQFIKNHHGQKINNKLKVFEIEDYEAFVKENYAKNRSKKNKLLMEEIPEKMVERQINDTRYISKFISLLLSSIVRSETNDDGINSKNILPGNGKITSSLKQDWGLNDIWNDLILPRFERMNQITSTKLYTTFNERYQKELPTIPIEQSIGFQKKRIDHRHHALDALIIACATRSHVNYMNNQHALDKNKTNQEKQKSREDLRVILCEKKYNDGTDKNYNWAFKKPWNNFTVDAKIALESLVVSFKQNLRVINKTSNKYEKWVEKNGVKTKELVRQIKGDSWAIRKPMHQETVSGLIKLRKTKVVTLNAALENYNDIVDKVLRKKIITLLNDGYDNKKISTYFKGIKNQKDGYDISRIEIYFWENDQAATRVSLNDSFNEKKIESITDTGIQKILMRHLDKYKGRFDEKNKEILPELIAFSPEGIEEMNKNIIELNGGKLHHPIFKFRTYEPKGNKFYVGQTGNKMKKLVIAAKGTNLFFGVYETSKQKRSYETIPFNLVIERQKLGLSAVPEIDDNGRKLLFYLSPNDLVYVPEQNEILEEIDFANLTKVQVERIYKVVSFTGNRLYTLPF

SEQ ID NO: 8177 - protein, 1615 aa, unidentified
  REGION 1..1615: note = Description of Unknown: Cas Enzyme sequence
MKRILGLDLGTNSIGWALINQDFENKQGEIVGMGSRIIPMSQDILGEFGRGNSISQTAERTRLRGVRRLKERHLLRRERLHRVLNVLNFLPNHYAEQIDFEKRLGKFVEESEPKLAFRPNWNEELNRNEYEFLFKGSFQEMLADFRQFHPKFLINKKGEPALVPYDWTIYFLRKKALTEKISKEELAWIILNFNQKRGYYQLRGEEEEEEDPSKLVEFHSLKIVNVIADEPQKGKSDIWYSLELENGWIYRRSSKTPLFDWMDKVRDFIVTTELNDDGSIKINKEGDEKRSFRAPAETDWTLVKKKTEQEIDKSQKTVGAYIYDSILLNPKQKIKGKLVRTIERKFYKDELRQIFKKQVEFHEELKSEELYNDCVRELYRNNEAHRSQLGQKDFMHLFLNDIIFYQRPLKSQKSSIGTCSLESRPTRGENKELLKDEHGKQVLKPLKAIPKSNPYYQEFRLWQWIYNLSIYRRDDDSVSVTSDFLASIEDFESLFEFLNGRREIEQKPLLKYFLERKGLKGKTLTGEIEKYRWKYVEDKTYPANETRSLIQTKLDKVEGIDNDFLTRDIEQHLWHIIYSVTDKIEYDKALKSFAKKYQLDIDSFVESFKRFKPFDSEYGAYSEKAIKKLLPLIRLGKYWSSDAIDLKSKNRIDKILTGEFDETIKDRVREKAIHLSNENHFQGLQLWLAQYIVYGRHSEAAQIGKWNSVDDLEQYLQEFRQHSLRNPIVEQVVTETLRVVKDIWSKYGNGAKDFFSEIHVELGREMKNTADDRKRITAQVTENENTNLRIKALLAEMLNDSNFDNVRPYSPMQQEILKIYEDGVLNSDIEITDDILKISKTSQPSSTDLKRYKLWLEQKYCSPYTGRPIPLSKLFTTEYEIEHVIPQSRYFDDSLSNKVICESAVNKEKSNQLGLEFIKNHHGEIVDLGMGKTAKIFEVDAYEEFVKLHYSKNRTKKNKLLLEEIPEKMIERQLNDTRYISKFISSLLSNIVRSESNDDGVNSKNLIPGNGKITNELKQDWGLNDIWNELILPRFERMNALANSSDFTAWNEKHQKFLPTVPIELSKGFSKKRIDHRHHAMDALVVACATREHVNLMNNKHANSSLRFDLNRKLRKYEKAVYLDRKSGERIEREVPKNFLKPWNTFTTDAQQALSKIVISFKQNLRVINKASNKYEKWVKKDGVTVKVQVDQTGTNWAIRKPMHKDTVSGLVRLRRVKVVSFNQALDSIQDIVDKGLRAELLRLVSIGFDKKKISKHFRELNNNFKEQDISRVKIHYWEEDNVASRVPLNDSFDEKRIESITDTGIQKILLNHLELYSGNIDEKGKAISPSLLAFSPEGIEEMNNTIQSLNGGKFHQPILKVRTYEPKGNKFTVGQTGNKGSKFVEAAKGTNLFFAIYQDENGKRNYETIPLNIVIERQKQGLTSVPERNEKGDFLLFHLSPNDLVYVSSENIGETSIVSLGDRKHFGNSTYKMVSSSGTQCFFVRNDISIPIVNKVEYSALNKMERAIEGAMIKEICIKLSVDRLGNISLVNQKKLNYDLHQNEPNQVEEPRVAYSGSKKIEISSKLDDSETSQLTYWAGLSPSQRFEDFLELMNRFYEFSTPDWKTKKISIDL

SEQ ID NO: 8178 - protein, 1010 aa, unidentified
  REGION 1..1010: note = Description of Unknown: Cas Enzyme sequence
MRILGLDGGIASIGWAVIDVDEEWSTGRILGAGAWAFEKPETDKDRIPTTAIRRQHRGQRRVVRRRRQRMAAIRALLRDAGLLEGDTRDALRGEGLDPWLLRAEGLDRLLTRREFAVALGHLARHRGFRSNSKRDKGANAAADTSAMLRAIEATRERLAGWRSVGEMFARHTDFVARKRNRLGDFSRTVLRGDLEAEARALFATQGRLGLAEATPTLAEAFAKAAFSQRELQDSEHMVAACTLIATQRRTARRARSFELFRLLARLANLRLATRDGEGVPLSPEQIGLVAADFGRQKKLSYRGVRSLLDLAAQTRFADVSPEEETRDIVARTGAAAEGTATLRKVLGDGVWQALLHRPAVLDRIAEVLTFRESEERIRAGLLEAGVEPLVADQVMHGVAEGAFAQFRGAGHISSEAARAMLPYLSRGMGYAEAAAEAGMNHAEQAPVTLDDMRNPVARRALSEMTKQVRSIVQCFGLPDRIHVELARDVGKGAEERDEITRGIEKRNRERDRTRDRFADLLGQPPPTNEELLRFELWQEQNTRCLYTDEPILLEMLRASDNRVQVDHVLPWSRFGDDSFANKTLCLAGANQRKRNRTPWEWFSAERPEAWEAFERRVELCLQMKGRKKRGFYLRRNAAEVEQTFRNRNLSDTRYATRVLLGLLTRMYPQDGQRHVLARSGTLVAKLRQGWGLDGLKRGADGKRLADDRHHALDALVIAATSEAMLQRLTRRFQEAERQGLARDFKGLDEPWPGFREEVRAAVGEVFVARSEQRRARGEAHAATIKQVKVRDGVEVVFVRKAVAALKLDDLERVKDGERQRDMIAVLRAWIEAGRPADRPPCFPKANAAAQADIDAAVAAANPADWQAAGMLVGAERREARRLLRRRFEGEHAAAWGQLVAAAAGTEAIRSVRLATKDKRAVTVRGGTADRGEMVRVDVFRGTDRRGRGQFHLVPVYPHQVADRAGWPKPPDRAVVAHKPEGEWTWMGPDFTFLFSLYPNSLVEVQRPSGE

SEQ ID NO: 8179 - protein, 1445 aa, unidentified
  REGION 1..1445: note = Description of Unknown: Cas Enzyme sequence
MINSRKILGLDLGTNSIGWAIVEQDGEDFSLNDQGARIFSEGVKSEKGIESSRAAERTGYRSARKIKFRRKLRKYETLKVLAQNDMCPLTLKEVDDYRKSGFKQYPVNPEFINWLRTNEEENKNPYAFRDKASREKTSPLEVGRALYHLAQRRGFLSNRLDQSDEGVLEENSPIVLSLIEDLENVQEIKETINNYFEDKGIFDETQTTGYIKDQDEGDKVLIKLYKTLFAILSKSQESIEITKQELIAKLSQKENLGIVKGAIHDLTAEMKDKGFATLGQLFHDRYSKSKIRNSYTSREEHYLAELEIICKMQGFGKINELEKLPEKRFDGLAKEFYKAIFYQRPLKSQKGLIGKCSFEPNRSRCAISHPDFEEFRMWNYLNTIKMAVNGERLQFLSQEQKESIIPKFFRKKDNFNFEDLAKELVPNKKTFGFYKSSKKVNFEYWFNYNSFDTVAGCPISAALKGVFGENWQSEKFNYQTLNAKGENVNRNVDYHDLWHLLATSTSDEYLIDFAASKLKLDSKQAKAFSKIRLKKDFASLSLNAIRKILPYTRNGLLYSHAVFMANLEKIVDKELWNNLESRLEVQQGIGNLIENHTFENAQLEIINGIIKNLIEDGGSFSIEAEPIFRDELKRKLEDFVKRFKIENELDKLELEMLPILLKQLKALEFVKIKRIDDKVKEFLLGENADGQVFCSDEKQFSKIYHPSDLEKFKLKEVVDENKNFIRHELGSPLSSSIKNPMAMRAIHQLRKVLNTLIADEKIDRNTHLHIEMARELNDANKRKGIQDYQNEIKKNRLSYIDEIKKLYLDETKKEVEPTEDDILRYQLWIEQNKKEIYEPSINGGKARSIGISQIIGSNPDYDIEHTIPRSRSQDNSQANKTLCGKHFNREIKKKLMPSELDNHELILPFVAHWRKEAELLQKEIDQISRRIKGATTKDAKDKSIRKRHYLNFKKKYLEEKYENFVRLEPKVGFKNSQIPDTGIITRYAQAYLKSYFKRVVSVKGGMVAEFRKQWGIQKSFIDEHGQKHYEQKDRSKHTHHTIDAITIACMTKEKYDVLAHAWTLEDEANKKEAKAIIEKAKPWKTFAEDLVKIEEEILVSHYTPDNLKVQAKKIMRIRGKKQFVAEMEKDANGKLKPKTNGNGKVIFKLDEKGEKIPRLQQGDTVRGSLHQDTIYGRVLDPETKEVRSVIRKSLESLKASDIDKIVDPEVKERVRQAIQEKVFVFSSSAQQANKIDNEIGVWMNKEKGVAIHKVRIYADSVKNPLEIKKHVEFSKSRHLHKQHVYGQNDENFAIAVYEGLDKKGNVKRVFETVNNLDAGEYYKLSNIKSNTSIVPLIDFRTNFKFSYLIKKGDMVLFYEKEGEELRDLSDEVLGNRLYKLAKFDAQGRLTFRFHKEARQASELREIYQVNFVKPFEQIRLQVSKLNILLQNKDFFFDSTGKISFR

SEQ ID NO: 8180 - protein, 1070 aa, unidentified
  REGION 1..1070: note = Description of Unknown: Cas Enzyme sequence
MTYTPYTLGLDIGTNSIGWCLRGDTGIQDIGVRIFSDGRDPKSKTSLAVDRRAARAMRRRRDRYVRRRTKLLSVLVEYGLLPIDKQERKSLEVGNPYQIRARALDEALPAFQIGRALFHLNQRRGFKSNRKTDKGDPESGKISSAVIKLDALMQEAGARTYGEYLWSRLEAGLPVRVRMRDGEGPEKRDGTAAEGYSFYPDRAALESEFEAIWAAQAQHHASLLTDARRAHLFDVIFYQRPLKQPDVGLCTLLGAETGERRLAKSDPLFQQRRLLEELNALTIERGPGTVPERLTIEQRDRLLMLLRGKKSVSFSSMRKTLKLGDAVFNKERAGRDKLIGDEVFAELANKARFGPAWGEIPLDDQRRIVAQLRDEQDGEALVLWLMAQCSLGEERARSVAGARLPEQFGRIGETATRAIIRELSAHTIASKVCVYSEAVTRAPELKHHSDFRTGEIMDALPYYGEILERHIMPGTGDPGDPTEVRLGKLTNPTVHIGLNQLRRLINQILKVHGHPRQVIVEIARDLKSSEAQKADLQKRQKHEQKEAERRGKALEELSQPNTGANRALLKLWEELNPNNPLDRRCIYTGQVISPRMLFSGAIDVDHILPWSRTLDDSSANKLVCLSDANRQKRNQTPFEAWGNTADWEGIVARASVLPVGKARRFNPDAMERFDEEGGFLARHLVDTQYLSRLAKTYLEAIAPERVYVSTGHLTAMLRRHWGLNSLLPDHNFSKTVHEKNRLDHRHHAIDAAVVGVLTLGLIQRVSKAAGERELAGVRDVVDTIAPPWETFRADLRQALEGIVVSHRPDHGTIGSARSNAFDQTAGRLHNDTAYGLTGEADERGNSLVVHRVSLGAVKPAHLEPTGARIRDEEIRLALRQHTAGLDGKAFTDAVLDFARTDLKFKGMRAVRVIEPLAVIPISDASGQAYKGYKGDANYRYDVWERPDGSWAADVISMFDAHSGAYESPIKRAFPTARKVLRLHQNDMVRFNDDKVGEGIARVVKFGKSGSIYLAMHNESGALKARDSLPQEDDPFKYFTASAKRLKNAQARQVHIDELGRIRDPGPRTRS

SEQ ID NO: 8181 - protein, 1138 aa, unidentified
  REGION 1..1138: note = Description of Unknown: Cas Enzyme sequence
KQNMTSSRKILGLDLGTNSIGWAIVDEGKEEILGMGSRIFPMGVENLGDGDGEISKNASRTGARGVRRQFFRKRLRKKVLLKALSENNMCPLTSEDFQEWKNKKVFPEEKLKMWFAMNPYELRDKALTEKLDLHEVGRVFYHLIQRRGFLSNSRKGGADDGAIFKGNPKEGKIGIDETNEKINDKTLGSYLNEIYPKDKAPFKSGLERIRNRYTTRKMYVDEFEQIWQNQEKYYQSFTKEMKQLFGGRKVEEDFSEDGILFHQRPLKSQKHLVGNCSFENNKIKCPISAIPFEEFRAWQWVNTVECNGKKITQGEKEKIVESLYSLPSSKDKVEFKAIRKVIGRIGAEYKFNYKDDDKVVGAYTISSLSNKKFFSNEWASFSEKEKEDIWHVLYFFDSKSNLKEYAIEKWGFDEVKAEAISKFNLKDGYSSISRKAINNILPFLKLGFTYDMAVVFGGVKNAFGEKWSKLTDLEMEFLMTNIPSIVRSKMKGGFIEPLKEILMNEYGLTEKELKKLYHHSESLKKEDILNKLPIGKEADKEIQDLRNPIVVTALFELRKLINELIDEHGSFYEIKVEMARDLKASKSQRNAIRSEQKRLERENDRVKGEVEKYTRVSHDNMLKFKLWEECKQTCPYTGVQIPLNKLFTGEIQIEHIHPWSRSLNDSYNNKTLCWADENRKKGDKTPYEFYSGDEANWEVIKHRALKLFSDTKEYPKAYQKFKRFVQQKFDDDFSSRQLNDTRYISKEAKDYLSKICRKVTVSPGQMTAVLRQKWGLNSLINEENIKTREDHRHHAIDALVLTCSKQSYLQELSKWNRYNRNSELNDFPIPWEMFRKQAETNVNSILVSHKRSKNVITVRSHKVEKNGETYRNLGVAARGQLHKETVFGKRKAPFAEEAFHVRKAIDSLTTEKQVLKVVDTKIRELIYKRIEQLGGFQKDKIPNNTFFIVDENGIKQPQIFLPNKNGAPVPVLKVRMKENFSGAEKLKDKINQWVNPRNNHHVLIYKDSDGNLKEDVVTFWTAVERKRNGDSVYKLPFDGAEIITSLHINDMFVLGYDNNKINLDEINSEQLKKPLFKIQTLSSGFYEFRLSTDSTQIKDTNSDVFRRIQSFGNGKTGWLTFNPIKVKISSSGKLAFAN

SEQ ID NO: 8182 - protein, 1365 aa, unidentified
  REGION 1..1365: note = Description of Unknown: Cas Enzyme sequence
MKTILGLDLGTTSIGWALVREGENADIIKAGVRVIPLSTDESKNFELGKSITTNADRTLKRAARRNLQRYKLRRENLLEVLSKANFINTESLLNENTNHSTFETFSLRSKAASEKIKLNEFARVLLMINKKRGYKSSRKAQGEDEGQAVDGMAVAMKMYEQNLTPGQFAFNLLKENKFLLPDFYRSDLNAEFDRIWKFQSSFYPEVFRTENIEKLQGKTRGQSLAIFYKEFNIESIELKGKMSEKKFQRYELRSKAISEKLSLGEVAEVLSEINGNIAQSSGYLGAISDRSKELYFNKLTVGQYLYSQVVENPHTRLKGQVFYRQDYLDEFETIWENQAKFHSNLTIELKKEIRDIIIFYQRRLKSQKGLLSTCELESVQKEILADGKLKLKWIGPKVCPKSSPLFQEFKIWAQLNNVAIVDEYGKGIRLLALEEIQILAQELNYVAKLSITDVNKLLGFKEKLKFNFETLEGNRTLSAFIDTCMKIIELSGHDGIDFKKMDGAKKIETIKSILDTIGVNISCFDFSSNIEGKELFEQPFYKLWHLLYSYEGDNSNSGIESLQKLLKDKYGFDKEYATALSNIDLQSDYGNLSTKAIQKILPFLKEGNQYDVACKLAGFNHSHSKTKEQLDAKVLKDVLEILPKNSLRNPVVEKILNQMINVVNSVIETYGKPDEIRVELARDLKKSADERSKATKSIADTTRKHEEITKILQKEFGIPNPSRNDIIRYKLYEELKGNNYKTLYSNTYITREMLFSAEIDIEHIIPQSRLFDDSFSNKTLELKSVNIKKGNATAKDFIVSEYGEKAVEQYEERIKTLFNKEGSKTKFRKLTWEVKDIPDDFINRDLADTRYISKKAKEILEDIVRSVGTTTGIITDRLRNDWGLVDTLKELNYPKYQALGLVVEKENRLGHKSQQIKDWTKRNDHRHHAMDAITVAFTKPSYIQYLNNLNAKSDKAGSIYGIEQKELYRDERGKLKFKPPMALDIFRAKAKEHLENIFVSFKAKNKVTTKNKNTTTKQAGKNTVVVETPRGQLHLETIYGSSLMYCSKLEKVNASFDAAKIETVANQKHKAGLLKRLTEFENDPKKAFTGKNSLEKNPIYLDDLHTLSIPESVKIVWQERQYTIRKPIGPDLKLEKVIDVGIRRILQERLEKFGNDSKKAFSNLEEFPIYLNEEKGIKIKHVKITGISNAIALHSKKDHFGNEIKDESGNSIPVDFVNTGNNHHVAIYRDEKGNLQEEVVSFMEAVTRKNQNEPVVKINHPLGWEFLFTMKQNEYFVFPNEKTGFNPSEIDLLNPDNCAKISPNLFRVQKITSKDYFFRHHLETNIETPNETKDIIWKRLGLQGIKKIIKVRINHIGQIVFVGEY

SEQ ID NO: 8183 - protein, 1004 aa, unidentified
  REGION 1..1004: note = Description of Unknown: Cas Enzyme sequence
MQRVLGLDLGTASVGWALLDAPETDDEAGKVVAIGSRVFPEGARTGAGVSVTPAQERRQARSMRRQVRRRAERKRHLREELAGVGLLPADPPGLDAIFAIDPAEILAKSAAGEMVEPYEVGRVIYWFASRRGFLSLRKGGAPVGGDEDDEAPVVDRRLRADQSDLLIAFWTEQAAHHPRLLTDTLLWGERGQVAYPVRPIKRSLALSTTQQFGVHGLVFFQRKVYWSEGTIGRCRLTGEPRALRADRISQRFRIWSLLSNLRFEEIPGSGLQWPTLKQKQAAFALLWSQKAVKFSRIKKVMGLPEGAVFTHEREGEDALQGNETDAALRAKSALGKGRLDALSDDACNELVNLLLGSSTDESLVEQLIGSCSLTRDEAECVSRVRFPQGRARYSRKAMRRLLPHLEEGFPLASSISEECAIGRAGFPLAGTVMPETAASIPADPSAIVAGLRPPETTNPVVRTTLRETALILGHLIREHGAIDVIRVETVRELGAGAKERQRIERDQRANQKARETARAFIEDQTGNANPARTEIRKVLLWREQGEECVYSGKAISVAQLLSDNLSEVDHILPRSRTYGDDRMVNLVLCITDENREKGNRTPYEWFGNSDPSRYEDILHRSKAMDLSWGKRQRLAKEELDADQELSYAHLVMTGHITSMVREWLHTATGAEVETTRGRQTAFLRHLWGLTKDQADHRRHALDAVCVALTSRKMIAAVGRRFAQLEKGKPRDEVQFKEPWSGFREELSSAYGQTIVSHRARRGVRGALHQETIYGKADAEGKRALRRPIEQINSPKRLKEVRDPAIREALADHLRTKGLDPEEFTSAASRPVFSSAQPPTMKSGVPIRSVRCLVSVPSAIDLGTAEAPRAVMLGNNHHAVIRCHPDGRMRIDIVSNFEVYRRRREGLALIDRMPDGDWKFAFSLQEGEAIRLNSETDPAFIGIFTVQSLDAANRRVMILPHALSASSAERVAAIRRYTQSAAALRRHQAVKVLLTPDGRVRQAAD

SEQ ID NO: 8184 - protein, 1572 aa, unidentified
  REGION 1..1572: note = Description of Unknown: Cas Enzyme sequence
MKRIVGLDVGTNSIGVAVVETPDTIEQYGEVGSIQWMGSRIVPVDTKYLNEWEAGKSTDTKAAERRVFRGSRRLKQRYKLRRNRLLTVLKALGWIDEDFPTDFKKETEAVANFKISTYLPVSNESLQEAENLLGGKFSEDWIVYYLRKKGLSEKLTFAELGRILYVLNQRRGFKSSRKDLKDESLSEIKLVKNVKIHSITPIEDKKDFFSIVPYPIDDLPDGITLRPWEEKRTKKPDWEEKEFTFLLTWTKTKLSDGSVKINQLKPQIPGENDWALSVTALDQQMGNQFPGEYFFDNLVKLKLNYKIRQYAVYRSKYKAELEAIWAKQCEINPELKALNSDTALLKKIASSLYPTQSKLTANKEKEFASKGLLYILSDDIIYYQRELKSQKSSIEECQYERNKGINGTMYGLKVTPRSNPLFQEFRIWQNIHNIKVFLKEYTEQKELKGELRTFSKFNKDVSSSYISSEVKEKLFEKFDSKREVFQKDVFDVINNCLDKNERISEDKYAINMFFTADKKLPGNETKSYFRNIFSKVDFKEEGNKLLNDPVRLQALWLISYSISLSDEEKSKKAIRKALLEKTNKRGKQKKIYFDLPESVVEAIANAPEQDANKKYASFSSKALKKILPAMRVGKFWDNSMLDKRVVENFNSIKEREKAKLSSDEKITVTDDEVSKQMLKSLKGITSPEGLATYQACYLAYGRHSEKTDFKKYENVEEFEKEILKVLPNNSLNNPIVEGIVRETLLVVRDIWKQFGPIDEIHIELARDLKQNAKEREKRTESITKNENARIKIKAMLFELLNGFEQFDENGNTVHTNFVTRPNPNNPTDIKKFSIWQSHSKISFEDLEKRAKFENIPKESEYKKFALWLSQKCRSPYTGRLIPLSKLFSAEYEVEHILPRAKIKNDSMNNLIISERDVNTAKSNELAALFISGANGYCEHNNRRIELLSYDDYVVNCKEYFRGPKLKNLLATEISDDFISRQLNDTRHITKKISQLLYPVARGRKDAQTPDEQGGIVFSGGVITTDLKRMWGLNSVWKKLLLDRFKRVEHMTGKKLVFQNQHNNNDFDISIRELLADEKDGNLKPDIEIKRIDHRHHALDALIIACTTIEHIRYLNTLSALDDEKKQEHIRISKHIMAGDKKREFRVPWPTFVHDAKKALDETMVTFKVKKDVFSKPQNKYWKYVNENGKIIKKEIDQKPSTKWFAVRTDLFNEPEGMILLKEIDEKYIKSDKDWLSMIDLQRIRIASQDTKDQKTTPYIYNQSIRASVKEIIKLFPTLENPEPKLKKEQNKKILAYLEENPILDEEGDIITMYPIATLVQKAAKRVTLNDSFDHKKINKIPYGDRKASNGKDKSLPEILHDHLDYYADDTKKAFSNEGLEALDKKTTTKIRKVTICESKTNPIIIGPKVFESKSNAYFYFYENMETRVRTGFATHSAFEVIRRKKEGIPLFDQIEGQRLHVYQAGDVVYAPNPEERQKIADGISILQAIPWDNRKHLLPRFYKVVKFSRTQIYWAPILISKGITNKEIDNTQGLMSERVIEFDSTKEDSEMIKQCAVKVEINRLGNSIKPIE

SEQ ID NO: 8185 - protein, 1084 aa, unidentified
  REGION 1..1084: note = Description of Unknown: Cas Enzyme sequence
MNYYGNPTPYILGLDLGVASIGWSRIECDSAGSFKPLKILGVGSHLFESGTEGTIADINKGKDEARNVQRRTARLMRRQTWRRARRKRVLLKTLIQLGLLPESAAIGLSSGGDLKRPLDIDAYMKIIDKKLTERWAALRAAVGAENDPHADQQRLCYIIREAAASGPVERHEFGRALYHLAQRRGFLSNRRAEAGKKDEDVGKVKQAIGELAEKIEAFGKAGGMPTLGAYLASLNPDEHRLRGRWTARSMYVTEFERMWTTQASAMGLDEKARKDVHHAIFFQRPLKDQSNLIGRCSLMPSEKRCPIAHRDYQRFRLLHAANYLTIASPAAARRGLSREEREILLYAMNTEGNLTFAKVRLLLRLKKGTTFNLERGDETKVPGNRTDAKLRAVFGDRFNEFTETEKNRMVEDLRSFRVPEALVRRATRRWGLLGDASTGFAAIGLEEGYSPLSLAALRKLLPRMEEGLPYATARKDEFPESFKSSTAAEELPPVLKAIEDLRNPAVLRSLTEARKLVNEMVRRFGKPALIRIELAREIKNPRKVRERITKNIRDREKERATIIARIQKEAGIATPKREDIERVLLADECGWVCPYTGKPIDWGSLFGQHPQFDIEHVWPRSRSLDDSFINKTLCYHEENRSRKRGHTPREAYGGNPERLDEIIGRMRLWKTNPFTKVAKIERFEAESIPEGFTNRHLSDTRYIARAAADYLGLLYGGRVEAAEGGGDGSPGTRRVDVCTGGLTAWLRSGWGIDGLLGETPDKNRADHRHHAVDAIIIALSDARAVQTLARAASEADKLGKRRAFEHIDEPWSGFRDEADKAIQDVIVSHRQSRKVTGPLHDQSIYSRPIGNPDSGEHRIRKELFKLTVSEIRDGKIVDKRALEAIRAVVKVKLGTDNPKPQNLTKLFADPANAPMVKGNEGKMVRLRKVRVKADAGRKIGTGPSERWVQPANNHHTVIVEVKDAKGLVRWEDRPVQLIDAYARQAAKHPIVNREVGEKEQFLFSLANGEHVEMNHVDDATVREIYRVTTISKGDNWFKPISDARTKADANKDHAYVRAGGDKLRKLRARKVHITYLGEVRNAGG

SEQ ID NO: 8186 - protein, 1253 aa, unidentified
  REGION 1..1253: note = Description of Unknown: Cas Enzyme sequence
MKKILGLDLGVASIGWSLIQQDGTASSIIAMGTRVVPLSTNDSKEFSTGNAITKNQDRTLRRTARKGLDRFQLRRKYLTELLTELHMIPTKELMHGAQHAVWELRSRAVTERLEKPELGRVLFHLLQKRGYRSGRTEANRDKKETEHVAGILSNAQRLRGSKHTVGQFMFEELSKDSHFMVKHTVFPRDMYTEEFDVIIHQQRKHYPDVLTADVVENLRDRILFYQRKLKSQKGLVGRCELENYTATKSVNGVERNFDSGPRVAPRSSPLAQITAIWETVNNLSLHDSTNAPYSFTAEDQQSIVDALNDGDLTEAKLLETIKLKKSDGWRGNKSIAKGIRGNDTRKQLGKIIGFSHPALRFDLRQVHLDGDANTFDHESGEILETLPRVQIDPAFETEPLYRLWHIVYSMPDDEECKNALSNFKVDGEPCPIVGDAAQKLAELDLKHPGFANKSARAMRKILPYLMQGYNYSEACELGGFNHSQWQTTHQNSERILLPKLELLRKGSLRQPVVEKILNQLINVVNEIIDPEKGWVTNEEREDGRFSIHIELARELRQSQEERNKTFTAMTKRDKENKSIVTEFTDPENDRYGIRPTRRNVLKWRMFKEISNDESKLNAQCIYCGKLFGFKAAMSGQEVDVEHIIPQSMLFDDSQGNKTLAHRTCNAAKLNRTAWDYMESLGQAKLDAYVERVNGLHKNNIISSYKRDRLLMPASKVPTDFINRQLGETRYISRKAKEILLNITRDVVTTSGTITGYLREKWGWGGVTMSLNMARYRAAGLTETRYEVYQDGSSHPHEYIEDWSKRNDHRHHAIDALVVACTTRSLINRINTLAAKETSRSLFGDSDNASERLVLLERYLVNQKPFNTRDVQEAVSKILVSFKAGKKVATKGTRRIHRDGKTVVAQQDILVPRGSLHAESVYGSITDIKQNCDVKKLFGAPERIYKQYIRELVQGRIAQFDGDSKAALQSLKKDPIFLDKEETTVLTYGTMTLHEVVIKYKIGDIKKEDVEFIVDKGVREIVRLRLNEYGNDHKKAFADLENNPVWFNKKKNIKIRSVRFYTKLTKVEPVRIGDDGTPLDFVNPGNNHHLALYRDSDRNVHIHACTFWHAVERKRRGIPVVIKDPSIVWNELLNSGKHDEAFLSKLPPDGLTLELSFQQNEMYILGMDPGARDLAIEEQRTDLLSGYLFRVQTTSGGAGVIDVRFRHHLETELSDSPASMKARSFVRVRSATALDAAHPLKVTISRTGAISAGL

SEQ ID NO: 8187 - protein, 1047 aa, unidentified
  REGION 1..1047: note = Description of Unknown: Cas Enzyme sequence
MAYRLALDIGANSIGWCLLILDAAGAPCGVHDMGVRVFPDGRDPKTLASLAADRRLARGMRRRRDRYLQRRDALLNALTRQGLMPADEIARREVANCDPYSLRRDALQRRLEPHQLGRAIFHLNQRRGFRSNRKLDRANDAEAGKISTAADRLKDELARAGSPTLGAWLADRHQGGQEVRARLRGAGAKAEYPFYPTRDMVRAEFDTIWAAQGAWNPGLTEAMRKAIAGILFHQRPLRAPPVGKCWLEPTEERAPKALPTAQAYRIAQDLAHLRIQRPGEPEAVLNAAQRDVLAARLNAGSDMSFIQIRKALSLSSGETFNLESKAREKLKGAETAARLAGKSGPLAAIWPRLTAAERDAVVTALLDQPTPEAAVKALVALGLPRQAAEAAECVTLPDGHASLSAKAIRAVLPHLATAPSYDKAVLAAGYRHHSDDRDGVIHDRLPYYGAVLAERIGTGTGEPDDPEEKRLGRVPNPTVHVALNQLRHVVNAVIARHGHPAQIIVEVLRELNQSAFERRRIEKEQSENAKRREGWAQDLSKLGQRVNGRNLAFMRLWHEQSGDPKERICPYTGERISLSRLFSAEVEEDHILPFATTLDDSFSNRVVVLREANRRKSRQTPHEAFGALSEWPEISQRAALLPANKAWRFAPDALQKWQGEHSDFLARHLTDSAYLARLARLYLRAVCDPDQVYVVPGRLTSLLRESLGLNSATLLGKGGARKERNDHRHHAIDALTIGLVDRSLLQRVATAAGRAKDRGRRLLDALGEPWPGFTAEAAARLQAVVVSFKSDTAPSGRLHNDTAYAALPDAGPKAPNVAHRVPIQGLAGWKPEEVRDAIADARLAERIVGALGSAEGKPAQAAALSAIAHDAVGRSVRRVRVRERLDGTAAIADRRTGQPYKRVKLDANHRVEFWRMPPKAGKPGKVQMVVVPMLHAAMDAEAGRLKRQPPDRRPHPAAKLLMRLHKDEVVAFGLGETRRLLRVVKFRDGQVNLAEVHESGNLKARDADKSDPFKYVNASVSRFAAEQARKVFVDPSGRVVDHGPPPW

SEQ ID NO: 8188 - protein, 1561 aa, unidentified
  REGION 1..1561: note = Description of Unknown: Cas Enzyme sequence
MEKTLALDLGSNSIGWTIRDISFPDEQFRRSGVITFNQGVGEEKNVEYSFAAQRTAKRSIRRLYQARKYKLWQTLESLMISGFCPISIEELNQWRWYKKEEGYIRKYPVNALQFNNWIKLDFNGDGKPDFESPYQLRAELVTRKLDFTLEINKLKVGRALYHIAQHRAFKSSKKVNLKEDINLDSTEVGAERAKHRELEKKLAELGLQFDDSRTVGEVFALAEKVFEEKKEGRIRNNLHTYVIRKDLQKEVEKIFQFQELSFGSIFKDKKGKELPVNRSPIFWQRPLRSQKGSIGKCTLEPSKYRCPVSHPAFEEFRAWSFLNNIQYKLKGDANGQWNQLDMELREEIYREKFIHGMKSNFDFVEIYLLLKKKNGHDNWELNYHGKTNVAASPVSARLRDIFGDDWDNLKIDHAPNERRVGNQGTKTFYSTEDIWHVPFSCDDEEFVKSFASEKIGLNEEQTQGYYKLWESLPVDYANLSLKAIKNINYFLRKGLIYTEAALLAKIPEVMGNRWPENEVDLIANVSKVIEVNRHTKKRLGIVNNLIAQFKARPPQDKSAESSFDYVIDVEDKKQIIQECLDSYGSTSWSRMPSEEQIEIVDFISEQYQNFFNDEKRMFKKMPHLLDSMKLFLIEKFGLTTEEVRKLYHPSQVEIYPPAKRKYYEEHGRELLLLGSPKTGAFKNPMAMRALYEVRKLVNYLITTDQIDEQTRIVVELARELNDANKRSAIETYQNVRAKENQEFADAIRELVKEKGSIADANSNEDIDKFRLWYDMLQGDDAKFGSEKGKVFIENSIESRTKKGRKGIEEEYEVFAENKFENINKHIYFKLEQAGADVVKKYRLWKEQECMCMYTGKMINLHKLFQQGAIDLEHTLPRSKSFDNGLENLTVCYADYNRRVKKNQIPFNLPNYDHATTDGTAIKPRLEIWEKKVKGLELHIEFWKAKSKRATMKEDKDKAIRQKHLWQFELDYWKGKLSRFKMEEIKTGFKNSQLVDTQIISKYASHYLKTVFNKVEVQKGINTAVFRKIFGVQQLDEVKDRGKHSHHAKDAIVLSVIPVAALRELILKVWYEMHERRKLLEGSGVERENIQLEINSYDFQLKELLQQCNLPRINDAINRLDNEILVNNISRDQTLAPAKRKIRSRGRVVGILDEQGKPIYEKDKEGNPKQLFQNGRSVFKRDHQGELKLDDDGQPIPVLVPKAKFAQGDIIRGQLFMDTFYGKIRPAKWDEEGKPMKDQDGNFLYNEKNEGFRFVVRKEVNKDLNIESIVDPTLKKRITEQINGRTLDKTLKDDGGIWMVDRNGKKINKIRHIRCFADDVTNPLAVKRQTYLSSKEYKNDYWAKSGENYICALFQSTKRNKKGDVVIKEGREVKERGFDIYNLAEIATKKKSGESNDANLGIFRRDNRTGMDLVKEDGTKEMPYAFLRKGTKVIFYKESIEELKELQKNSPEMLNKRLYKVKKFADDGLTLDFHLESRDDKELTKSFPVQGFFKRDEKGREVTFGQRGKNGFTENFFDCDTLNSGKPWHRLLYSKDYFDFAIEDKHFNVNPDGQIVWKVLND

SEQ ID NO: 8189 - protein, 1582 aa, unidentified
  REGION 1..1582: note = Description of Unknown: Cas Enzyme sequence
MPENQILSLDLGSNSIGASIRNISEENQFENVTVITFETGVGKDSTSGQYTISLAANRTAKRSVRRLYQSRKYKLWAVLKALIKGKSNLYCPISEENLNRWKHYDKAEVKKGNGGRQYPVSDIGFANWIKFDFNKDGTPDYFSPYQLRNELATVKLDFSIEENRFKLGRALYHIAQHRGFKSSKIVKNKDDHAKDNKSEDTVEINIGAERKKADNLYKQIEVLNINVNPERETVGMIFAKIETEGIHHPERKTEGIRIRKNLHQYVTRKMLIQEVKHIFDFQGLDFNSIFGDANSKVTVSKSVMFWQRPLRSQKGLVGYCTLESIKTFDKKKGKEIITGKKRCPVSRPEFEEFRALSLINNIEYRYKGNKDGSWQKLQQEIRNQLYQEKFFVQKDFEFFGIHKWIETKNKHKDWELNYNFKTSVPACSISVRLQNILGENWNKTISKIDKKGNTIQQPLFEDVWHVLFESDDQEFIEEYGKEKLQLNEEQIKKLVSLWFAMPVGYAQLSLKAINNILPFLREGFIYTDAVLLGKVPEILGEIIWNEHKQFITEALQKDVIEKNRNEKRILNIVNNLIAQYKAQPKDKRFAEKDFNYHVGSMDNKFPEDSIERDTNQILKACEDGYGKETWKKLNAEAKDNSVKEVIAHYQSFFFDQKRDFKPLPKLGDAMKLFIRDDFEDTFEGEDKDKFLKKLNKLYHPSMIAIYPAAREEFYKHGDIEKKAVMLGSPKTGAFKNPMAMRTLHELKKLINYYIATGQIDEETRVVVEVGRELVDTNKRWAYEKYHEIRRKENEEFANAIRELLKDPEASDSLADENNDSDIDKFRLWYEMIESAEGFEKSGKFTTSEEDKKPIERKNKKKSGKKESEDENEVFYEFSENHFDKIKKEVWVKLTKAKDNIVEKYRLWKEQQYFCIYTGKPIKITDLFQTNLIDIEHTIPRSVCFDNSLANKTVCYADFNRNIKKNQLPQSLSNSQEIEHRLEKWQQKVKDLEIRVEFWKGKSKQATTPKWKNDAIREKHLWQFELEYWRNKVDRFTMKEVKPGFKNSQLKDTQLISKYAFHYLKSYFNKVDVQKGAVTAEFRKIFDIQTTGTPKDRSKHSHHAKDAIVLSVIPVAAIRDKMLEVWFRLDELKKENGEHQEIQRLEQELQQLKYQCNLPKGLNNTIKKLDEELLINNIARNRSLIPVSKKVRIKGKDRIATGHAVQGQIHKDSFFGAIRLVKKDEDGKWLKNKENKFEFEPIKYVIREDLVYKKNSQSPGFKDLKDLEDQIVDKSLFKIISQQVTEVSEDFKEALNRGIWMLDRNGNRVNKIRRVRIALSVKEPLRIKQQSHINNTPSKILPDRNHKQFYYATNGENILCALYQKTVKDKNGKDRIDRELEIISLKDAADLLSAGEIKKIEDLEILLYRKDKKGNPILTEDGNKEKPYAILKPGMRVIFYNDNIEEIQQGGNEKKAEYKKRMSYRLYKIIEYSGRQIQFQHHLEARLDPELKKSYPDFKHDEKGNYLNVKSEIIDRKNKKERIRIYGVAGTSGFTQSVSDALKQNTYNNFEPWPKLLYSADWLNMAIEGKHFEVLPDGVIKWH

SEQ ID NO: 8190 - protein, 1425 aa, unidentified
  REGION 1..1425: note = Description of Unknown: Cas Enzyme sequence
MEKKILGLDLGTNSIGWALIEEKENQKQIVGLGSRIIPMDATMLMDFEKGKPVSKNAVRRQARSARRLLQRYKLRRSRLLSTLALLGWMPKFESINEMHLFLTSSPTNHGQSLSQFELYELREKALRELLSVEELARIFYQFNQRRGFLSNRKIKDPDEETPNGEKGPEVEAEDTGKGTVKTYEQVEVRAVEVDNSGKKVMYKITLVDKREGSAFTPIPYRSGEKIELLITEKNSKKWGKSYFFQLPKKQEWNYRKHHINRLIEESGLTVGQFYFRELKRNPHFRTKDNIILREKNIAEFDAIWTKQLELRQNLGKLHEIERDETLPLIAENLYRNNQERRNVLLKRGLKYILRDDIIYYQRPLKSQKDSISNCRYEIDKKVIPASHPLYQEFRILDTLNNIRVYNLQEDDCTSHFMNDEIKQRILDKLNSQKSVKPSVIRDFVIPKVQQNEFKLSLEDDRRELRGNDTLVEISNALKGEIEFDYLIGNSDKLERIWHIIYSLDKVSDVVHALTRTKNGFGISEDAAKRIAAITFATNYGAISARAIRRLLPLMRFGNSWSGLNIAKFPEIRQRLEAILNGESDDTISNRIREYIVSSGITSLDDFRSLPYWASAYLVYGSHSINRSSIRWNSPSEVELLPKNFLRNPIVQQVVNETLQVVKDIWIKHGKPNEIRIELARELKNSAKEREIISSNQLANKQLNEAIKRRLLELGRPQTDADKYRIWIESADMSKVGSDADFENYMKYLKPDGKWRPTLADVTKYKLWEEQMHISPYTGRPIPLSSLFGESYQIDHIIPRQRFYDDSLSNKVVVESVINADKGTPGRNLTAFEYVTQGPAKAGIVLLKEDEYVSAVNRVFKGAKRKKLLLKEIPTDFVVRQLKDTQYITMAIREELAKIIGIENVLTTTGAITDHLREQWGIAHLFKELLLPRFEALENKMQEKGGSDKLIEKVFDEKRKKFILKLNGYSKRLDHRHHAADALVIACTKPSHIKRLNDLNKSYQHLKKDSKEAIQNGINVKRKGGSWSFELPWDNFIQDSKRELESCVVSIKNRNRLYTKSVNRYIVIDPISGKKVFKSQSIGDNLNVRGALHNPQAFGEIKVEEKLGIEQVVGLYSKLFNQNDDTQLISKIFKHTWQFEIIKSLFDQNENKQKKVLDFIRKEPPQWKDKQLDEMTIVSSKYTKRVSLTQLTEEKLENVASKPLRDALKAHVSVYGQGDIKKAFTADGVMAFNLDRKIPVAGVKFIDGAGQVVGESLGKQRLVRKNSSNEKLHINTAGNHAFAIYENLEDVKNGVWPNRREFDIVSFYDAILLKQHGERIFEPKIGFRVFTLSKNDLVYFPSLEENPNTIEWNKKEMLRNRLFNVTKASNNQIYFTPNSAAETIIKNIEFGTQNCIELVQGLSIKQMCIKVKMDRLGNVTPLFDYD

SEQ ID NO: 8191 - protein, 1543 aa, unidentified
  REGION 1..1543: note = Description of Unknown: Cas Enzyme sequence
MKKILGLDLGTNSIGWALVEGNFEEKQGRILGAGTRVIPMSQDILGEFDKGNSISQTAERTKYRSVRRLRERYLLRRERLHRVLNIMGFLPKHFANHIDFEKRLGQFKDEQEPKLAYNDNGFIFQNSFNEMLEDFKTLQPELVAEGKKVPYDWTIYYLRKKALSRKIEKEELAWILLNFNQKRGYYQQRGEEEEENPNKLVEFHSLKIVDVTADEQQKSKDDIWYSLILENGWVYRRSSKTTLLDWKDKTRDFIVTTDLNDDGSIKTNKEGNEKRSFRVPSEDDWTLLKTRTEQDIEKSDKTVGAYIYATLLQNPNQKIKGKLVRTIERKFYKDELKAILSKQIPLHPELQDESLFADCVRELYRNNENQQNTLDGKSFLHLLINDIIFYQRPLRSQKSTIGSCSLEKRKYKDTNGDEQIISLNGISKSNPIYQEFRIWKWMFDLSLYQKDNDSNVTNQFLQSYEDYEKLFEELNSRKEIKQEGLVKYLVEQTGLKGKAATAEAGKYRWNFVEDKPYPLNETGSLIANRMEKVEGLAKDFLTKEREHQLWHIIHSVTDKTEYEKALKSFALKHKVDENTFVENFKKFPPFKSDYASYSEKAIKKLLPLMRLGKYWNWEAIDTSTRDRIEKIINGEYDENISDRVREKTKSLSEQHHFQALPDWLAKYVIYGRHSEASDLTKWSNADDLKGYLEEFRQHSLRNPIVEQVITETLRVVKDIWQHYGRGAKDFFDEIHIELGREMKNTAEDRARITSQVTENDNTNLRLKALLVEMMQQGDVENVRPYSPTQLEILKIYEDGVLNSNIEVPDDILKISKTAQPSRKELLKYKLWLEQRYRSPYTGEMIPLNKLFTPDYEIEHIIPQSRYFDDSFGNKVICEAVVNKLKDNQLGLEFIKKHHGEKVETGFGKTVTVFEEDGYQDFLKEHYTKSRGKKAKLLMEEVPEKMIERQLNDTRYISKFVSSVLSNIVRAEKDDDGINSKNIIPGNGKITSQLKQDWGLNDVWNNLILPRFERMNELTKSDAFTSYSKNHQRKLPTVPLEFSKGFQKKRIDHRHHALDALVIACATRDHVNLLNNQHANSDTKRYDLQRKLRKYEKVKYFNKKEGREIERDVPKDFLKPWANFTTDAKTQLEKIVISFKQNLRIINKATNKYESYKDENGTLRIGKDGKPKKDFIPQTKGDSWAIRKSMHRDTVAGLVKLQKKKEVSLNNSLDEVQNIVNKSLRKKIFNLMTEGLDKNKIIKHFKELGGQWEGQPLNKVEIYFWEIDKEGNGINTASRVKLDDTFNESKIETITDTGIQKILLNHLNKYKDHKDDNGKDITPETLAFSPEGIEDMNKNLTELNGGKNHKPILKIRTYEVKGTKFNVGGIGNKKDKFVIADKGTNLFFAVYEDEEKKKRNYETIPLNEVIEHQKWRATLSKEEQTQTPLIPVKPENGRFLFSLSPNDLVYVPDDDETTLSIDFKNLSLDQTSQIYKVEKASGTECYFVRNDIAYLIKQYDSKTKIGELESQNKLQTTMCKNRIKIVDRCFKIEVDRLGIIRKKY

SEQ ID NO: 8192 - protein, 1476 aa, unidentified
  REGION 1..1476: note = Description of Unknown: Cas Enzyme sequence
MEQKKIILGLDLGVNTIGWALVERDVEGREGRIIDMGVRVIPMDKTSRDNFSEGKGLSQAQERRMFRSARRNNQRYKMRRDKLVLVLDALGWMPDDIGYAITERKPGIPQVTIMPLKRSDDYREKEKGEAKREHTAMRVYELRAHGRKRAYDDGKELGRVLYLLNQWRGYQDIGMLNEEEKEKEKELAKAHEHPIHALKILDTRETAEVYRAKGKKSKIDRKIWEVTVEGATTRHWTVSLCKWWKDKTMDFQMIAQEDGSNELRLSGQTKWAKTMEQNEKDLGEQLIGEKLYALLLKAKDQYAPPLPEKRYTRQRYKEEFKGIWEHQAAQPGWATWMTDCPIDRLSTIAKLLYPLNADKQTELVKKGLLHVIRDEIIYYQRPLKKPQRQLSCPKEPFRILPDGSTRPNRPAPKSHPLFQEYRLWQQVQNMAVKSISQEAFNLTEEHRVALFEFLANTKKAEPKDVLKKVFGLDPERYELRIEDLDTERTLAAIRPALKEPKKRKKTEEAEADDKATIKTAADATLAAALREPYANEISRLLYTDLWHLLHTAGSSKAKQNALTGRDAHLKKPKEKKDADELLSADFIVALCKEPFEKGYAGYSQRALAKVVPLMRAGKYFREETIPAVVRERIEKVINAVDDETIGSRTREKFAALSSISDYRGLMAPDALELVYGSHAPPPREASWKKPSDVKVLQRGKLRHPVVEGVINEALLVVRDLWLAQQKENGKEWKYDEVVVEFARDLKNSNKEKEKFSEQNKTNRDTNDKAREKVRELLHREARLGEIERYKLWEEQGKKCMYSRETITCTDLFKPMYEIDHIVPRSRRFDDSYGNKVLCLALLNKDKGNSLPLVWFNRSSIYKRSTLEEFTADAEAMGKGKRTRLLALTVEDGHIERQMKETQYIVRGTVEQLGNLVGSANVRSTSGGITSYLRGEWEVDGILREANLWRYERLERILQERLGAPLQLIHEENGKKIISGWSKRIDHRNHALDALVVACTRQQHITYLNTLNRLKEDNPELHQHLRNDLIERKKEKNRMRAPWQNFRKDANDAFEGIITSIKVAADPVVKKKGKYRVAERREGRNTKSRWRSQPKHIAVLDELHLQPDGWIWRHTHKTAYDVLGGLKDLEATGMKALLTERMPVKADREALLTLLADNEWNIQEAKTKLGKPKAGKAKKVDDVVYKERWVVARAALKDLKDKHLKPGKELIVDRGLVKQINAWLAKTKLPPEEAFAVGNLEAFNGERQEYKLPPVYKVRVYESLLDGNTSRVLLDRTNSFNDRLVVTKKKSFGVLLGERNVDGKRTDRRITLFSAAASATKGAPIVPDLHTENGYFLRVKQMVAVIPKESSWDAFIREDRREQAARIYRFSNPQDQLQFQPHFFTDEMVVKSDDHKAIAKGIEDGTINVEGAPGKLREYKKQLAKLKKPGIGEFFEGKEGHTRTLDESELDITKSCVPLIINRIGRIVGPNLVNGKA

SEQ ID NO: 8193 - protein, 1365 aa, unidentified
  REGION 1..1365: note = Description of Unknown: Cas Enzyme sequence
MKFKHIIGLDVGTNSLGWCLLKEFEDGSVEIIKTGVHIFPIGTIVDDVSNKEKTKNEQRRSYRGASRMRYRFKLRRSNLKEALGDLSMLPDYAKLFKPHNKKSKKNIPSFKRAQSFELYKLRADAINPEIKIPLRDIGRIFMLLNKYRGFKSNSKKLSNTDKEIGKVKSGYESLQNLIDKSGAKTIGDYFFKMHEKAKELYDENNWHNFNEPIDERAYNDLGELVLFNSNGIRRRHGRYTLRDMYYLEFDKIWEAQKKHYPEILTGSKKEYDEILSNPYKEKIALLKGFKKTNYWHIREYCIYYQRPLKSQKKFVSNCQFERGEFIVKSHTNSENGVEKIKLKRIWKKKAKKACPKSHPYFQEFRIWQKLHQISYSSIEGDVFSDPLKKEWLPIIAGYLNTNYDIHLSKPSKKKIETTYWIGKLLQDTGHIKNSDSYNFFIDKSDADVDGDSKNANKINGNITYASLFDAMGEKKFNQLKNEIICKQEHISEKELINIEESKLLQLWNTIYEAKDGLLKEDTWLKDILIEPTKWNLTDDQAQKIIENGLQPDYGSYSTKVLKAILPHMRIGLTEHEALKAVKRNYINDDNTVGEKVQTKDKISQLAYQELRNPVVERALSKTIKLVNSILSKYEKEIDRNNFEIRIESTRQFKKPRQERENERRKNADKDKLRDQYAAYLTKNKEKLGFRKDIFKYDPIVNKYELWLQMNMNEDDDVFIAEFKDFSKITKQEDKLKHKLWLECGRRCPYTGQVINFTDCFSSEVEIEHIIPLSRSLNDSFNNKTLTYKSTNAEKGSMTPLEYLEKKGGDFLKEFKSRINSKYHDFSDAKKKLLLTEKIETSFSNDQISNTSYIASYTRGKMQEVCKNVQFTNGSATSELRSYDWGLSNLLDKVRYEEDHKINIDDYFRDFFRIKKEFTEWCKKKYNSTDFKIEWNNLHENEDLKEYIRITNNDLLYWDEGIKKFNEFRNKSGKKDRSDHRHHAIDAFVTACCSPKIIKELSSYNAIKEQQHLLNREKSEKRFSYVKLKESILNILVSHSEKQTLIKKRKNRIKTNEGVKEHSTYAPQGSLHKETFYGKLKEPKKQGYDKKDVYVSRAVLMSKNGSTETYAFDKSENLNKVFDKSQKEVLNQRFKQIEELKKEKGNQLKPFSEKAMRDYPIFSYTPNQNKEISLKGKSLPVIKSIRTKYKNEKSLISLPDNKYADKDGNHLLVLYEKVQVGKNGTQRIIRDFDLISFWDGVRSQSKKTKLFHDETENGIGLNKNCQWVQKGDLLLIIPKELNESDVDWEDNKVISQNLYKINELGADEREKRSNAVIKFEPHKIQKTSKDAYVAGTKFFKTSETVRAVKIRLNILGEIEARGEGCF

SEQ ID NO: 8194 - protein, 1441 aa, unidentified
  REGION 1..1441: note = Description of Unknown: Cas Enzyme sequence
MKKILGLDLGTASIGWALVNEAENNSEKSSINRIGVRIISYDNFVSRETGKEIKGDPADYFRAGKGVSPNAGRTQSRSMRRNLQRYKLRRENLIEILKEHKFISEETILSENGNHTTFETYHLRAKGATEKILLEQLARVLIMINKKRGYKSSRKAKGTEEGALIDGMEIAKKLYNENLTPGQFCLQLIAANIKYLPDFYRSDLHGEFDKIFDSQLTFYPDILSRELKEVLRGKKRDAVWAICAIAFKENGFDLVGTKRQGKADEQKKENYVWRVKGLTKKLDLEQLVVVLQQLNIQLNSSSGYLGAISDRSKELYFSKQTVGQYQMSVLNKNPNASLRNMVFYRQDYLDEFNTIWDQQAKHYKELTEELKKTIRDGKVYNGKIKGGIFFQRRLKSQKGLISFCEFENQQIEVEIDGKKKTKTIGSRVIPRSSPLFQEAKIWQTLNNIEVYGKGKKSRGNIKGVQLEKQIAEGERRFLLQEEKELLAKELSIKSKISKAEVLSLLFDNPKELDVNFKEIQGNLTQAKLVEAYQKIIEATGHELDFKKSAEEVSNDISTVFKTLGFSTDILSFDSNTPLDSQSIYKLWHLLYSFEGDNSKTGNENLINKLITNFNFDKNAAIIIANVTFQDDYGSLSAKAIRKILPYLKAGNQFDVACEYAGYRHSKTSLTKEEIEKKVLKDKLEILSKNSLRNPVVEKILNQMINLVNTVITTYGKPDEIHIELARELKKNAKQREELSKSIETTTKLHIDIKTRLEKEFGLPNVSRKDIIRYKLYEELKDNGYKALYSNTYIEPAKLFSKEFDIEHIIPQSRLFDDSYSNKTLEVRSINIEKGNKTAYDFVKEKYGESGHENSLDKFLLRVEDLHEKGILSRAKLNKLKLAGKDIPEGFINRDLGNTQYIAKYAKTMLSDLVKFVVNTTGSITDRLREDWQLVDVLKELNWDKYNALGLTEVLEKEDYEGNKIKIRKIKDWTKRNDHRHHAMDALTVAFTKRQHIQYLNNLNARSDKDSVIYGIEQKELYRNDKGKLLFNPPFALTEFRAEAKKQLENTLISIKAKNKVATTNINKAKNNVITKIITKEGEEKTIKGQVAKTPRGQLHLETVYGRQKQYTTKEESVNAKFDSEKLQTVANKKYREALLKRFQENGNDSKKAFTGKNALSKKPIYLNEAKTIAVPEKIKTVTFENLYTIRKEISPDLKLGKVIDIGVRRVLEKRLSEFNGDTKKAFSNLDENPIWLNKEKGISIKRVTISGISNAEALHSKKDKNGNLILDENGIEQAVDFVNTGGNHHVAVYHDAEGNLQENVVSFYEAVARRNEGLLIIDKDYNKNKDWQFLFSMKQNEYFVFPNKKTGFNPKEIDLLSPDNYSLISPNLFRVQKFSKVVYGNSAVRDYVFRHHLETIINDSKELKDVTYKSIKSLPIFNNIVKVRVNHIGQIVNVGEY

SEQ ID NO: 8195 - protein, 1227 aa, unidentified
  REGION 1..1227: note = Description of Unknown: Cas Enzyme sequence
MEKLIVGLDIGTTSIGWAVVTENEGTKTTIKGMGSRIIPLATDEKSEFEAGNAISKNQKRTLKRTQRKGYDRYQLRKESLRVKLTELGMFPANALFALSALELYGLRNKAIDEQISLQEAGRILFHLNQKRGYRSSRKDESKDKKETEYVAEVKSRYAGIKEAGLTIGQYFYHGLLSDERYRIKDKIFPREAYIAELNAICKNQSQFYPEILTDKNVSKLRDEIIYYQRPLKSQKGLVSICEFEGKWYKNKEGKEVFSGPKVTPRSSPLFQVCKLWETINNITINSKKGEQFLITMEKKNELFTYLDNHDKLTEAELFKILGIGRNDGYYGNKQLSKGLQGNLTKSAIIKILKDQSDLEKLIAFDLVQEHYEKVNSNTGEIVNQFRIKADFETLRLYKLWHILYSVPEEKDIVDKLIADFQLSEDDATKLAKLDFTKGGFSNKSAKAIRNILPYLQQGAKYSDAMTLAGYKHSDSHTVEENLTRPLKDKLKLLPKNSLRQPVVEKILNQLINLVNAIIDQYGKPDEIRIELARELKQSLDERNNAFKNNSKRESENKGIALRLATEYHVKANRRNIEKWRLYEQTDGCCLYCGNKIELADFLNGDESDVEHIIPRAKIFDDSFQNKVISHRSCNKAKDNSTAYDYMLTQSEQQLHRFEESVAQLFKNYKITKAKRDKLLMTETKIPTDFIARQLRETQYIARKSREILQEVCRNVWATSGSVTQKLRKLWGWEEALMHLQLEKYKAVGKTEWFEFESNGQLHKKERIVGWTKRDDHRHHAIDALTIACTQQGFIQRINTLNAKHTRDEMLGEVKDQVYKEKLTLLEKSLLTKRPFDTAAIENLVSQILISFKSGKKVATLGKRKVKKDGKQITKQEGIIIPRGALSEESVYGKIKRRVNETLKLSSSFTDVDLIINKTYKALVKQRLKSFDNDPKKAFIGLTKNPIWIDTAKTQALTAVEIVTDKDEYVIKYPIGSIAVKDLPSIVDAGVRKAVEKRLEAHNNNPKEAFKDLENMPVWLNEEKRIPIKTVRCFTGLDAVVTVKYNDQKDAIGFVKPGNNHHIAIYVDKEGKKQEHSVTFWDAVERKMNGLPVIIKSPKETWDTIFSNKDKYTQEFLNKLPQDGWTYLTSMQQNEMFVFNLNQEALNEAVQNKDYRLISHNLFRVQKLSSLLSGWWFRHHLETSVSDKEEGVVIKKNLGRLIVIQSLDNMKGIKVKLDALGQIVKIGE

SEQ ID NO: 8196 - protein, 982 aa, unidentified
  REGION 1..982: note = Description of Unknown: Cas Enzyme sequence
MKKILGLDIGTTSIGWAIIEASDEKKKYKDGAAPVSDINNERLGIYKDAVGVRIIPQDSDNVKSFTEGKKLNTGKTHTPTAKRRQKRGSRRLNNRYKMRRDKLIRVLSFLKMLPIGAVYKKKLENGKWQDIRSNSNLYTNAKGQRGNDNDIGRTLYELRAKAIREEISMQEWGRIMLHLNQFRGYSSDRFKKDETEKFNYFSGTVINVSNNPLLIKYKDGTDSIELIPEKAEDIIWQKYEVEIKFDEPINNEGTETILQTIKGNVYTRELKFLKGISVTFRYNDYKKETKIEYVNPDPSDWRSRYKLLNLSLEEWCKAGGTVGLYFYQKYYIEKSIERIRNNVVNRDWFEQEFDRIFDIQFEKKIKHFQEFDIKDIVVQSFKSERILNEVEKKNGLKEQFRFLIKDKIIYFQRPWQQRKNKGRCNFEKIPDAKKKGEYIGRTVIPRSHPLHQEFKIWEQINKVRIFFHPQNERQIELMNDSKFCFQHLGKYPWEIKELLYNELQSKKERSWRTFVKEVLNLDLKLNQDENKRNNYEEEYYSVNFIKRSLKGIELDNKLKGNTTLITIKEILKDKFDNKWYYSIHHNPEITNLQLLWELIYDITVNNQNSVRENIVRHFPELTEYAHELSEKTFDDNGMGNLSAKAIRNILPMMKDGIYWDKKCINEKNIKRILSLVALNNSENEIQEDEDKLTSLKEFIPDKNTRKKLSTFISIESFRGLNYWEAIAVIYGSHSTRKVALVKKLDRIKPHSMNNPLVEKIVNEALMLVNEIKEKYGFDEVRIELSRELKASREEREQMWEAIKSNTDKIERAKIMLRELKKGDTNNDLNTDTNNYSNIDKIKILEDVVAQLKGREHEQKIKEFNITEPSKAEVRKYLLYLEQNFRCPYTNQPIPLSDIFSIVKKVEIEHIFPKERYYDNSYGNKVLTWTEVNSLKKELGNRTAYEFIVSKRGNDKIKLPNGKDVELISKENWESHVKEMFPK

SEQ ID NO: 8197 - protein, 1002 aa, unidentified
  REGION 1..1002: note = Description of Unknown: Cas Enzyme sequence
MDYTLGIDLGTASLGWVVLRLDRKSKQPIGIERAGVRIFEAGVDGDIEQGKDSSRAAQRRQARQPRRQNWRTQNRKRKLFGLLQQLLLLPATSDTKSESRKHLLDQLDAGFRAKFLQSGDHTGQQKLPYLLRTAALAERLEPFELGRVLYSLAIRRGFLSNRKGVDDPDEEGKVKAGISELAGQMAGRTLAQFFVDDVDPRHENQGLQRIRQRYTDRKMYHDEFRRIQSVQAVHFPEISAELWEELFQAIFFQRPLKSQRHRIGKCEIDSKPRCPDAVDVFQQFRILQTVSNLQVVFADWTSRSLHEEEQKSLVTALQTTALLTWAKAKKLLKFPKGTSFSIEEWSPKGIVGHRTNEQMIEAFGDRWMQMTVDERDRITLEVLYYRNPSALVRRGRNAWGLDEVQADLLKNIRLEEAHARHSKSTLRKFVDGMQAGRAYSEIRKKLTGRSEGDAMDFLPPVTKSGLEITNPAVIRALTELRKVVNELLREYGKPTFIRIEMARDLKNSRDRRAKIHRDNEDNRKRRERAVAELLKARPNFRYSGPDIEKWLLADECNWQCPCTGKQISVSTLLGATPQFDIEHIYPRQYLDNSFTNKTLCDVQFNRHEKRGQTAYDACSRRSDWEVIQQRVRGFRSPFAAQKLKRFQTAEVSDDFTSRHLNDTRYNAVVAKKFMELLYGGSSDIDGNLRVTAPTGGLTATLRREWHMDSILSEDHEKNRSDHRHHAIDAIVIGLTDQSRVQTLQTAAAEAARVSNKRFYKAIQEPWADFADDARTAIDAVIVSHRVTRTLAGPLHAASIYSKPHKSEDGKPQHRIRKELHKLTVDDITKGKIVDPKIREIVRERFEALGGGKPDKVFTPVENHPTLVTKTGLRIPIHKVRINVVANPRSIGKGAAQRYVASGKDSNYAAMVYAILDGRGNEARWEHDVISRLEAHARLNSNRSAAGEKVLNLGDNETRVLKFAIRKNDCLMLDGPDGNRLFYRVQKLSVGEIQLCQLNTPGL

SEQ ID NO: 8198 - protein, 1135 aa, unidentified
  REGION 1..1135: note = Description of Unknown: Cas Enzyme sequence
MTKILGLDLGTNSIGWALIENDIILGIGSRIFPEGVVNLGEGEGRETSKNASRTGARGTRRQFFRRRLRKRYLLKELAKHSLCPISSTLIKDWNGSEIFKNEQLQEWLKLNPYELRAKSIKEEISLTELGRVFYHMIQRRGFLSNSRSAGADINEKSTIYKGDSKIGKIGISKTLESISQSKTLGSYLDSIQPKINEPYIGELERIRNRYTTRQMYIDEFELIWEFQKKFHSELTLHLKTIIGGRKKEGYKEDGVLFHQRPLRSQKHLVGYCSFEPKKPKCAISTIPFELFRMYQWLNTLSYDVNGVKQQITKEEREKIVALLLSKEKPSFKEIRKAINKLDGSYQFNYKDEDNIVGSYTISNLSNKKFFGKQWFDFSDEEQEKIWHVLSFFDDRDKLKEYAIKNWSFDKEKASKISKFNLKEGYSNLSRKAINNILPFLQKGFMYDIAVGLAGVRNVLGNDWEKQEQFVLDNVPEIVRSNLKGGYIEPSKSMMKNEFNCTDKQLEKLYHHSSAIEIEKLLDKLPVNINADREIQKIKNPVVITALFEIRKLVNEIIDTYGKPNEIKVELARDLKASKKNRLETRRQQQTLEKENDRVKDELEKLNQRINHTTILKYKLWEECNHTCPFTGQTITISQLFTGEVQIEHIFPWSRSLNDSFNNKTLCFADENRAKGNKTPYEFYSTQGDKKWEEIKLQALSCFKTKANYPNCYNKFKHFVKIKHDEDFISRQLNDTRYISKEAKNYLSKICSDVLVAPGQMTATLRHHWGLNTILNTEDDTKTRDDHRHHAVDALVMACSKRSHLQELSKRNRYHKNHELKDFPDPWLHFRQDAEKAVEQILVSHKKQKNLLTVRTHTTKKNGVIHKNVGVAARGQLHLDTVYGKRKDVFTNEQNYHVRKPITSLTAAEIPKIVDIAIKIIIYKAIEEFGLNINSKDRKPIVKTKEEKVLFDQLLNKPFFLPNKNGNPVPIKKIRIKKNFSNAEPLKENMNQWVDLGKNHHVLIYKDFDGNLKEDVVTFWTAVERKRQGQDVFQLPKDGEEIISTLQINDLFLLDLSEADINWNELDYHFLNQHLFRVQKLSSKFYVFRLVSESKIDKKVMPFYCRIQSFSEGKTGWLTFNPIKVKVNSIGKIEKI

SEQ ID NO: 8199 - protein, 1386 aa, unidentified
  REGION 1..1386: note = Description of Unknown: Cas Enzyme sequence
MTQKYSIGLDIGTNSVGWAIVTDDYKIPAKKMKILGNTNKQYIKKNLLGALLFDSGETAKATRLKRTARRRYTRRKNRLRYLQEIFIEEMNKVDENFFQRLDDSFLVTEDKRGSKYPIFGTLKEEKEYYKEFETIYHLRKRLADSTGKADLRLVYLALAHMIKFRGHFLIEGQLKAENTDVQTLFNDFVEVYDKTIEESHLAEITVDALSILTEKVSKSRRLENLVKCYPTEKKNTLFGNLIALSLGLQPNFKTNFQLSEDAKLQFSKDTYEEDLEELLGKIGDDYADLFTSAKNLYDTILLSGILAVDDNSTKALLSASMIKRYEEHQKDLKKLKDFIKVNAPAQYDDIFKDETKNGYAGYIENGVKQDEFYKYLKNTLSKIDGSDYFLDKIEREDFLRKQRTFDNGSIPHQIHLQEMHAILRRQGEHYPFLKENQDKIEKILTFRIPYYVGPLARKGSRFAWAEYKADEKITPWNFDDILDKEKSAEKFITRMTLNDLYLPEEKVLPKHSLLYETFTVYNELTKVKYVNEQGEAKFFDANMKQEIFDHVFKENRKVTKDKLLNYLNKEFEEFRIVNLTGLDKENKVFNSSLGTYHDLRKILDKSFLDNKENEQIIEDIIQTLTLFEDREMICQRLQKYSDIFTKAQLKKLERRHYTGWGRLSYKLINGIRNKENKKTILDYLIDDGYANRNFMQLINDDALSFKEEIARAQIIGDVDDIANVVHDLPGSPAIKKGILQSVKIVDELVKVMGHNPANIIIEMARENQTTDKGRRNSQQRLKLLQDSLKNLDNPVNIKNVENQQLQNDRLFLYYIQNGKDMYTGETLDINNLSQYDIDHIIPQAYIKDDSFDNRVLTSSSENRGKSDNVPSIEVVRARKADWMRLRKAGLISQRKFDNLTKAERGGLTENDKAGFIKRQLVETRQITKHVAQVLDARFNAKHDENKKVIRDVKIITLKSNLVSQFRKDFKFYKVREINDYHHAHDAYLNAVIGTALLKKYPKLASEFVYGEFKKYDVRKFIAKSDKEIGKATAKYFFYSNLMNFFKKEVKFADGTVVERPDIETSEDGEIAWNKQTDFKIVRKVLSYPQVNIVKKTEVQTHGLDRGKPRGLFNANPSPKPKPDSSENLVGVKRNLDPKKYGGYAGISNSYAVLVKAIIEKGVKKKETMVLEFQGISILDRITFEKDKRAFLLGKGYKDIKKIIELPKYSLFELKDGSRRMLASILSTNNKRGEIHKGNELFVPQKFTTLLYHAKRINNPINKDHIEYVKKHRDDFKELLNYVLEFNEKYVGATKNGERLKEAVADFDSKSNEEICTSFLGAVNSKNAGLFELTSLGSASDFEFLGVKIPRYRDYTPSSLLKDSILIHQSITGLYETRIDLSKLGED

SEQ ID NO: 8200 - protein, 1358 aa, unidentified
  REGION 1..1358: note = Description of Unknown: Cas Enzyme sequence
MIKGDYYLGLDLGTNSVGWAVTDLEYNLLRAKGKDLWGVRLFDEAETAANRRSKRIARRRIERDKARKALLKEFFADEIEKVDPAFYMKMDESFFKLKDRSVENQQPYSLFNDFDFTDKEFHDKYKTIFHLRSDLIHSDKTFDVRLVFLAIYNMFSHRGHFLNATLDAEKNDTGFKNAYVEMIEVLEEHEFGIPSNIEVDAIEEILSDNKSSRTNHFEQLLALFNVTKKDKRNCAVLRLLAGLSINLKDIYDQELDKESDKKFGFRESNYEEVIEEVYNIVDEDYKNIIEKIKMVHDAGLLSKIMIGCEYLSDARIKIYDMHQKDLKQLKALLKKYNKEAYEKLFRTIESGTYSAYVGSVNSHGKIERRQGKERGKDVLYKSIEKAIKDIPDNDKDKIEIKAKIDAEIFLEKQLTNKNGVIPNQVHSRELRAILNNAEKYLPFLSEVDNTGYSIKEKIIQLFEFQIPYYVGPLGREFNGKKGYNCWAVRKESGRVFPWNFDEKIDKNASAEEFIKRMVRKCTYFNDENTLPKNSLIYEKFMVLNEINAIRINGCRLDTETKQAIYNDLFTSGKKVNKKKIKEYLTSINKMDNESEISGIDTDWSKNLTSIAKFKGVFDGKIETNKEIIEDIIFWSTIYTGDKKLIRSKIETVYPNILNENQLKKILGFRFTGWGNLSRHFLEGIMGKDKNGTAENSIIGFLWNEQVTLQELLSQNYTFGEIIDEQFLGIEKPLSSWEIEDLDDFYLSPSVKRMTWQTMKIVEEIQRVLGKSPKRIFVEMTRSDGKKERTVSRKNKLISLYKSLGKEGKEFINEIDGKDENFFNRRKVYLYYLQMGKCMYSGEVIDLHKLLNDNLYDIDHIYPQHYIKDDSIENNLVLVKKKLNKDKDDKPLTSKIQADRYTFWCMLKDKGFISSEKFTRLTRRNDSFTEDELTGFINRQIVETSQASKAITQILQQSMGENCKIVFSKAKLVSEFRHKFDLPKSRIVNDLHHANDAYLNIVVGNAYYVKFTGNPYKFIKNAIKDKELNENKYHLSDFYNNDIYNKNEVAWTNKDNKTITTIKEILKRATPIVVKKVEQAHGKYFDETLVGHNKAKKSVYIGQKTKHSVLSNVCDYGGKTSISVQTCLLVEYKKKNEIIRRIMTLPVLAGDSRNIKKTEMLRYVEKALLEKEKNQKIDGIRVCERYIPMNSLLKINGAYYYLGGKTDNNFYIKNAMQFKLDEKWIKYISKIEKANRIKDYSEVDKFKNNIIIKEKNQKLYNLIINKLENLPYSKSKKSEIVKSLEDSFNFFCESDISLQCDMIEKILLNINKSKSLNIKITEATGIMRINSRIDNNTEFKLISQSVTGLFESETDLLKI

SEQ ID NO: 8201 - protein, 1317 aa, unidentified
  REGION 1..1317: note = Description of Unknown: Cas Enzyme sequence
MANNLKYNIGLDIGTSSVGWCVTDEENNIVKKSGKHLWGSRLFDEGKTAAETRTFRGVRRRTERRKNRIRYLQSMLLEDIEKVDENFIPRLQQSNLIKDDTNQFKFNLFEDEEFIDKEYYSEYPTIYHLRNALVTKDQKFDIRLVYLALHHIIKYRGNFLTKGDLSDETNAINSDLENIIDYLKENEIELKYPIEKIKEILVNKELTKSEKAKEILSLFDYEKEDKQIIDNLFKSVVGLKFNLNAIFDLEDERKLEFASDNDWDSIASELNENAEIFYSMKNIYSWIIVESFLVGKNYISEAFIEKYDKYHEDLVKLKNVYKKYLDIIQYDKMFRKYEADNYYSYNGKLSEIEKSKKCSNEELCKRIKKDLKGFEDESDVSEIFNDISNENYLIKLNTTDNGEIPYQLHEKELKKILENQSKYYQTIKENKDKILSLLTFRIPYYVGPLSTNSKWAWVKKNSKEAIRPWNFDEIVDKDATAEEFIRRMTNKCTYLLNEDVIPKESLLYSKFSVLNEINNIQVNDKRISKDMKMKIIELFKNKKSVGKKDIINLYKKDGINVEKIDGFTTSNGKFNSNMNAYVDFLKILENIDENEEMIEELIYWITIFEDKSILKDKIEEKYSSILTKEQINKIIKLKYIGWSRLSKKLLIGLKSTENNETIMEKLMNTNMNFMQIITSDKFGFKEQLEQALKDVIGEEKKKISYDDIAEIQTSPANKKGIWQAILVVKEITKILKAEPENIYIEFARSDETKGVITKKKLEKIEQQYKEISDFTKNNKSLLEELNKAKNQTKNINERLYLYFKQMGKCMYSGERLDIDKLSFYQIDHIIPQSYIKDNSIDNKVLVLSEENQRKKDSLLLEDTIIDKMLPTWTYLNENGLISDLKFKKLIKRRMFSNEEEEVKFISRQIVETRQITKYVREILTKLYPNTEIVGLKASVTHNFREKYEFYKIRNLNDCHHAQDAYIMCASGKAFKDSKLLKYEKIKHFLEEEKRKSVEERNKDKDEKYGIVMRIIRKRVDIEKVNKVFEYKDYLVTRKLEEQTGEFYNQNPIKKSEIKNTRISLKSEKDPLKYGGYSGENQAYYVIYEYKDKKGKSEYRMQGIPIRYSYEIKNKKITLEEYLKNKCNENQEEFIRILKSKILKNQVFLDENNELEKIISDSEYRNMKQLFLNKKEIIDLYSVLNYNILNEKKKEELDKEKIQTIAIDSYRTIINKMINEFKGIDDIEKKDIFNNGKFEALDIEEKIKTLNNLLTCISKAYVDLKNIGLGSTEGRKNMINFNKKKLNNMTFIDQSVTGFYERRYRVDELANNNSQKTM

SEQ ID NO: 8202 - protein, 1033 aa, unidentified
  REGION 1..1033: note = Description of Unknown: Cas Enzyme sequence
MSYYLGLDLGPTSVGWSAIEVDSEGNPCGFLELDNSDPRKETDERAYAIGARVFEAGVDNLSKGQQEEPKNKKRREKRSVRRRLRRARARKLKLINLLREYSFISDSDSELEELQKRDPYEIRARAVNEKISKEEFARILLHFAKRRGFKSNRRQDNKDTERGKVKQAVSRLDKELGDKTLGQFLYEKRRELPFQPIRNRMGEYKWIAQREHYIDELSRIWQKQSQYYPQLLTKEFYDKLNNILFKQIRFELSERKKKKVIGMCSLIKGQPRCPYSERIAQKFRYLQKINDLAVRFSIKEDYRPLSEEEKQKLKEKLSVTKTLKFEQIRKLLWEGSKEQADINLEYKPNDKIKGNEIDAMLTKSPFFDKKKWIQLDEQQKNNVWNILFEFLKEKLSKAQVEEKLEEKYGLGFKKDDWTEKLKEPEGYCKFSKAALKQIVPELENSKNLHEAKKQTGFKKSWSQRRFLPLPSRENGFEITNPIVQSVLFQLRKVVNLLIKEAGLPEKIVIETARDLKAGKERRAEIVKNQSQNQKERDRAADEIRKMHGWDKDVNVSGGDILKYRLWKQQNLFCPYSYRQISQQQLFSDEAQIDHILPYSMSLDNSMNNKVVCFASENQDKGQNTPVSRWKGTEKWEKIQTAIKKKKIISDERKAERFFVENEEISEKYQPERLLRDTSYISRGVREYLKLLYEHNEAEQRVRTTKGVITSQLRNVWGVNAILRDGEVGPKNRDDLRHHAVDAAIIAITSQGMIQRITKQLQRVHPRRPKYADIPEPWEGFGEELAKAVENINVSHRVRRKVKGALHKETNYWKEDSGPHKGKFITRKPLSALTAKMARQICDEKIRKLVQDRIRKFDGKIKNALKEPLHLPNKSGQPIPVKTVRVWKNSDNMLKIKDNIWVEPGSNHHVEIFKGKNKKGEEIQWGRVVSMYEAAQRLKNSKSVIQRETENGDKFINSLSRNEMYMLEFDNGEYKLHRVQKMDSKGSIILRPHTYGGLMKDTDSPPIIQRRSVNTIKGFKVTVDPLGRIRRAGD

SEQ ID NO: 8203 - protein, 957 aa, unidentified
  REGION 1..957: note = Description of Unknown: Cas Enzyme sequence
NASNYLDFLNNKDNEGYSVKEKIIAIMKFRIPYYVGPLVEKTSKNNEHQKYSWMIRKENSIGKILPLKFTNQVDLAACGNEFIKRMSRKCTYLPNENCLAKNSLLNSEYTLLNELNNLKINGQKPPITLKNDIFNLFKDYKTVTTKRIKNLLISRGFYNKKDEIIFTGIDKTFKSSLKSYIDFKEFINSKKLTKDEVETIIEWATIFSDGNNLLKEKIKETFGKKISEKDIKYILSKCKTYTGWGHLSKKFLTDIYHVYEDGECKSIISLMRETSNNLMELLSNKYTISKSIEEELSKYNENYEDWSYENLIDPLLVSPSIKRSIWQTIQIVKEIRQVAKKDPKRIFIEMARGSADNQKKQRTLSRKEKLIQQYKDLTDNTEANKILKLLEKQSDDSLRKDKLYLYFTQLGKCMYSNENIILEDLMKNNSNYDIDHIYPQKAIKDDSLNNRVLVLKNENGKKSDTYPLSPETQKKCSSNWYNLYNNKLITKEKYNRLIRKTKLDNDELQSFIARQIVETRQSTKATGKLLEKLCPNSTIIYSKANSISNFKNNYQIYKSREINDFHHAKDAYLNIVVGNAYYTKFTKDPSYILKNEIKDSYNISKLFFFDITRNNVIGWKRDINGKARRDYKNQIDGKLDYEKYPETGTIVKVRKTLSKNNILFTRQSFQRSGKLSDSLIVKKGANKDVLPIKSSDKIMQQIEKYGGYNKIAKANFFLVEFTNKNKRIKKILDVPIYKASDIENNNKSLLNYCINELKLENPTIIIPKILINTKIKYNNFTYEISGAMGNKLGLKTAIPLIISEENYKYYCRIEKYIEKMKTFLIFHKNESKDVIDVFNENLIYKNKISRVENLSLYNELKDKVNNSIYKYKIYEKNKSNINNNIDLFKNASIYDQTLFLKQFISFFDCKCGNVDFSLIKSPKNAETSNMGRTINSNIEFIYQSITGIYEKRKKVII

SEQ ID NO: 8204 - protein, 1410 aa, unidentified
  REGION 1..1410: note = Description of Unknown: Cas Enzyme sequence
MTKILGLDLGTNSIGWAVVETNDNKKFDLLHKGVHIFQEGVKKDQGKEVSKAEERTNFRSSRRLKFRRKLRKIDTLKVLRKNDYCPKLTDDEMNEWRFKKNYPKNENFRKWLLTDDSINKNPYYYRNLVVTEKLDLTKKENRYKIGRAFYHLAQRRGFLSNRLEITKESEGDIKKAISKLTEKKGNRTLGQYFYDLYTHGEKIRNHYTHREEHYLEEFNKICEFQQLDSNFTKEIQNAIFYQRPLKSQKGLIGKCPFETNKPRCASSHPLFEEYRMLCFLNNIKIKTPDDEKLRFLNEEERDKVKPLFFRKSKDYFDFEDIAKQLAKKKQYKYYKSNNKHPEDYLFNYAMKTTVKGCTLSARLESIFGKSWKELKIEYIREKDQKKSFIDINDVWHVLATFDQEDKLKEFAQKRLNLNDEQLKEFQKIKLKKEYAALSLKAIKKILPFLRDGLIYSHAVFLANMVNAIPKEVWDQEENKRIIQKEIYNIIKTQNQEKQIIEVVNGLIKTCKENNWYWSDQAENNFKEDIKKNIISVFGESKWNKFDNLMQQNIIDKAFAIFKQQLQVNRGKGEFAKIQTIDERVKQFITDHFEINNDSLERLYHPSAIEVYKPVKRGKDGKKYLGSPMVSSIKNPMAMRSLHQLRKLINELISQDIIDERTKINIEMSRDLKNANERKALKRWQNEREKLHKEYYKRILEHYRNEGIEREPTKTDILKYQLWEEQDHKCIYTGENIGISDFLGKNPSFDIEHTIPRSKSFDNSQKNKTLCQSRFNREIKRNKIPYVLSNHDEILERINKWKKKYEELNKLIQVQVRISSSAMTKDTKDNAIQKRHRIIAERDYWKGKYERFTMKDIPSGFKNSQLVDIGIITKYSRLYLKTVFFKVYTVKGNTVADFRVIWGLQNEYEKKARINHIHHCIDAITIACMTKDNYEALAKYYHELEDNFLSGNNKKPLVEKPWDTFVQDVKKVENEVFVSHYTSNNLSKQTKKKLRKRNGIIYKPIYKCDSKGNYLKDENGSKIFESWIYKKDINGNKIPVKGEKDSKNPDFRLIKFMVNDKINCLVLKPNERINSNIQNVIFDASYKFQINNKTKEVVCEREPVYSQGDTVRDSLHKQSFYGAIKRAIINNDGESEEKIYYIKRKPLEFSDDGFKSINEVEKIVDNSVKEKILEVIKEKGLKQALSEPIWMNEEKQIPIKKVRCYTPSVSNPIHLKKHRDKSKHEHKQSYHVVNDGNYLMAIYEGKDNKGKIKRDFEIVNNLQAGEYFKLSVQNELKAQDINNFEGLVPRVKTIKNIEAPLKQVIRIGNMVLLWEKSSEEVWELDIYERNKRLYKIISLSSLNIQKKYHYGTIELKFHNEAKQTSDLKVKKGVFKNGDQLYTNRMLYHSQFNALIEGIDFKINILGQIEKI

SEQ ID NO: 8205 - protein, 1228 aa, unidentified
  REGION 1..1228: note = Description of Unknown: Cas Enzyme sequence
VTSYEKISLHDHLGGKVEIKDNNIKFDSKDSVLFFQRPLRSQKSLLGKCRYEKNKTPVSISHPDYEIFRTWQYVNTIKFGNNIPLPVKQKQVIVDFLKTKKTAVKFEDIIKLLQMSHENFNYNDDDKVDGCPTIAQLSKLFNNKGWEDNYHNIWHDFYFFDDSEKLFKKFIKTKEYELKENIKLEDVKKVTIKDDKYSSLSLKAIRNILPFLQRGLLYNQAVVLGGVMNAFNYKIQNDEIPRWERFADYHDTIVKDILAIIKEKNKQGETIEKIKEYLSNPENHYGFEIGDPSFKKLYHHSQEVEEKEKSDKISEIENLRNPIVQRAVQEMRRMVNELLEKYGKFDRIAVEMGREMKLSKKGRREVSRMIRQNFEANENVREILKEYQLAPSRQNIQKVLLFNEIQAKAGKVVCPYTGKTLNISDLLGKDNKVQIEHIIPRSFSLDDSFTNKTICDAKFNQLKGNLTPYQFYQKNNDKKIWGASSWEEIEQRVYSVLPFNKAKRFTTRKTEWKTEEFISRQLNDDRYISKKTKEILSEVCNEILVMPGAVTADLRRLWGLNNILQPIISLLDEEFDIDRERNINYWAVTDEKRNIKKLYTMNNPRPDVAAEETVVTGYVTKNKFKAHRLNLEFEAPDISDGKYYVKLPVSQPLKTLRQYVDKPDYGDDEVILRGMINRNKFNHDSLKRRIEASKNLDDGSYWAKFKIMDKKFEEPEKNKRPENKNGICLFGKVKDHVFTSYIYQCETDLDDGQYWVLLDLDFDQVEFIATKNEKPEIENNQLLVLGDVNEEGTFTALHDIQLQFDWDDKPGRYWAVLNILTDNPEYTAVENKPPKVENDEKLIEGKIWVDHKTEEIRFDPKKNRDDHRHHAIDAIAIALTDYNIINQLNRYNAQKDALEKVIASEKPYFDEPWDNFFQEAKEAAGKILVSHHKDNTVTKKVSMIIEKNSKKYRSEGQAVRGQLHKETVYGKRKPPQKEKAFHVRKPLESLNDKQLDKIVDDRVRSIVKHGREREKFITEQIKALKKDRTKAGDEEEKRIDEQIKLLEEENRQLYTLPNKKGDRVPVKKVRIRENLGNTEMLKPSENTNQYVNPRNNHHVMIYKDSDGRMQESIVTLWEAAERKNQGNPVYQLPNDDAEIVSTLEVNDMFLLGLDKEQTNDISSLDKQILSKHLYRVQKLSSMYYTFRHHLASTVSNPDEEFRIVSFSAWEKENPVKVKITQLGKIKSV

SEQ ID NO: 8206 - protein, 1112 aa, unidentified
  REGION 1..1112: note = Description of Unknown: Cas Enzyme sequence
HENFNYNDDDKVEGCPTIAQLTKLFSKEGWKDNYHNIWHDFYFFDDSEKLFKKLSKTKEYELKENIKLEDVEKVSIKDDKYSSLSLKAIRNILSFLQRGLLYNQAVVLGGVMNAFNYKIQDDEIPRWERFADYHETIVKDILSILKENNKQGETIEKIKKYLSNPENHYGFENDAPAFKKLYHHSQEIEDKEKSNKISEIENLRNPIVQRAVQEMRRMVNELLEKYGKFDRIAVEMGREMKLSKKGRQDVSRMIQRNFEANEDVREILKEYQLAPSRQNIQKVLLFNEIQAKAGKVVCPYTGKTLNISDLLGKDNKVQIEHIIPRSFSLDDSFTNKTICDAKFNQLKGNLTPYQFYQKNNDKKLWGAASWEEIEQRAYSVLPFNKAKRFTTRKTEWKTEEFISRQLNDDRYISKKTKEILSEVCNEILVMPGAVTADLRRLWGLNNILQPTIGLPDGEFEIDREKDINYWAITDEKRNIKKLYPMNNPRPDVAAEETLVTGYVTKNKFKAHRLNLGFEAPDIPDGKYYVKFQVSKPLKTLRQYVDKPDYGDDEIILRGMINRNKFNHDSLKRKIDTPENIDDGSYWAKFRIMDKKFEEPEKNKRPENKNGICLFGKVKDHVFTSYIYQCETDLDDGQYWVLLDLDFENIEFIATINEKPEIENNQLLVLGDVNEEGTFTAIHDIQLQFNWDDKPGRYWAILNILSDKPEFTAVENKPPVVENDEKLIEGKIWVDHKTEEIRFDPKKNRDDHRHHAVDAIAIALTDYNIINQLNRYNAQKDALEKGIASERPSFEEPWDNFFHHAKEAAGKILVSHHKDNTVTKKVSMIIEKNGKKYRSEGQAVRGQLHKETVYGKRKPPQKEQAFHVRKPLESLKDKQLDKIVDDRVRSIVKHGREREKFIDEQIKALKKDRTKAGDEEEKRIDEQIKLLEEENRQLYTLPNKKGDRVPIKKVRVRENLGNTEMLKPSENTNQYVNPRNNHHVMIYKDSEGRLQESIVTLWEAAERKNQGNPVYQLPNDGVEIVSTLEVNDMFLLGLDKEQTNDIRNLDKQVLSKHLYRVQKLSSMYYTFRHHLASTVSNPDEEYRIVSFSAWEKVNPVKVKINQLGNITRV

SEQ ID NO: 8207 - protein, 1050 aa, unidentified
  REGION 1..1050: note = Description of Unknown: Cas Enzyme sequence
KVESYNYIDKTGVRIFPEGVEPTTIGQGDREQSKNATRRQHRQSRRHFYRKKLRKIKLLETLINLNMCPLSTEGLNQWRKWDKSKKTEGKSFPTEPKFVEWLKMNPYELRKKALEEDISLLELGRIFYHFIQRRGFLSNRIGSDDGAIFKGKENMTGINETRKQIEDKTLGKYLYEISFKEGEKYHTKKDAESQEIRVRARYTQRDMYISEFQQIWDKQAENLNLENEKIRTSKTRYLKGNINNNRNKAKISHYNKTYGKENVVIDNNRVTTFSEVPLKEFFAGEIYYKDGGLRFKSNESLLFWQRPLRSQKNLLDNCRFENELPVIMGNGKFRMKKGKVVKRNKKPCPLSHTEFELFRAHQFINNIKFGKGNRLNKEQRQIVLDLINSKDAGFKFDQIPKKLNLTYEKFNYDNDQKIVGNPTIKKLKSLFPAEIWEKHYEEIWHCFYFYDDNDLLFEKLKKDFDLKTDDVKKISNIKLQEGYSNVSLKAIRNILPFLEKGYQYDLAVILGGVKNTFGDRWDDFSEFHEQIEKDVIQILKEVNFEGEAMEKIKDYLSEPSNFYGFDKNDHHFLHLYHHSQEIEKKNKTKIVPEVENLRNPIVQQALNETRRLVNSLLALYRKTDPDFSFERIHIEMGRNLKNNKIKRQELSRRISDNEKKNETARERLAEFGLRPSRENVQRYLLFDEIQKHVSGPVQCPYTGKVINLNDLLGGENLVQIEHMIPFSVSLDDSFGNKTLCESNFNRLKGERTPYEYYEMNPDPKMWGADSWEAVSERAFKILPYYKAKRFTAKKKFEKSQFIERQLNDSRYISKKAVELLSAICDDVKMLPGQVTSELRHLWGINNILNPVYGIEDLKAEVKEEERHYYYVVTDENDKAVSIHRKENEKPETNEKQITITGDVKNGKFFSKYLSMKVETPDLKDGKYWIILNVSEPHSFQPVFVSKPETDENNIIFRGRVENQYFSNDTIGKRLKTETEDGSYWAKFSIKNKEFKRAESKGRIKATGSKVALFGSVEDGTFFSHIYQCKTNLPDGKYWSILELDFNDIEF

SEQ ID NO: 8208 - protein, 972 aa, unidentified
  REGION 1..972: note = Description of Unknown: Cas Enzyme sequence
HYLEEFNKICDFQQLDPNVIQKLQNAIFYQRSLKSQKGLIGKCPFEKNKQRCSTSHPLFEEYRMLCFVNNIKIKTPKDEKLRFLNQEERNKILPLFYRKSKEHFDFEDIAKHLAPKKQYKFYKTREKYPEDYLFNYSMKTTVYGCPVSARFESIFGENWKELNIKHKRKSDNKESYINIYDVWHVLYTFDSVEKLNEFALEKLGLKNEKLKKFNNINLKHDYASLSLKAIKKVLPFLQEGLIYSHAIFLANMGNAISHEIWSKEENRKIIQQEILEIIQNQNQEKNIVEVVNGLIKKCKENKWYWSDEASEQYKKDIEKNIKTVFGTQRWEKFDIEAQNDIVNNALIQFKEKIQKQNGKSGFLKIETIDERIKSFLEDNFDANKEDLKKLYHPSAIEVFKQPKRADDGRKYLGSPMVSSVRNPMAMRALHQLRKLINELIKQDLVDENTKVNIEMSRDLKNANERKALKRWQDDREKLHKEYFARIKEHFDENGIKREPSETDILKYQLWEEQEHKCIYTGESIGISDFLGRDPSFDIEHTIPRSLSYDNSQQNKTLCQNRFNREIKRNKIPAELSNHAEILERIEKWKEKYEELDVKIQKLRKVTTSDKSSKDRVIQKKHITTIERDYWKNKYERFTMPEVKAGFKNSQMVDIGIITKYSRLYLKTLFNKVYTVKGNTVADFRRLWGLQDEYEKKARVNHIHHCIDAITIACMTKQNYENLAKFYRDYEEMNIARKDEKPQVEKPWPTFTEDVKEIENEVLVSHYTPDNLPKQSKKKLRKRNGIIYKPIYKCDSKENFLKDGNERKIFESWIYKKDIKGNKIPVKGKKDSKNPDFRLIKFLENNNIKCLVLEPTEKINSEIQNLIFDASYKYQINYKTKEIIYEREPVYTQGDTVRDSLHKQTFYGAIKRTMINKNGETEEKINYVIRKPLEFSDDGFKSINEVEKIVDNSVREKILKVIKEKGLKQALSE

SEQ ID NO: 8209 - protein, 1386 aa, unidentified
  REGION 1..1386: note = Description of Unknown: Cas Enzyme sequence
  MOD_RES 1181..1184: note = Any amino acid
MEKQEYYLGLDMGTSSVGWAVTNTKYELLRKKGKDMWGIREFDEAKSAAERRTHRINRRRRQRQLVRLGLLKSYFCEEIAKIDPNFFIRLENSKYFLEDKDERVRTKNGVFNDDNYKDVDYYREYPTIFHLRQALLDIDNTGEKFDVRLVYLALANMFKHRGHFLLNAEGDALNTEQVDLVYQEILDRLENDYEIIIEHKPIQQVTDILGSTDIGRKKKHEELQKLFEVAKKDKGANELLKCLCGLSVNAKLIFDENAEEKVTLRINDFSYTDKISELMEQLTEEEYALIEQLKSIYDYAILAGTLKGYDYLSCVRVELYEKHKKDLKLLKVLYRKYKTEEEYNRMFRSNTDETYSAYVNSFNSTDAILNSKGVVEGSKYRRNMNKRKTENIYATIKKAFKDITEDADVSYILEQIEKEKFLPKQLTGANGVIPNQVHKKEMERILQNAESYLPFLKDKDESGLTVSERIIRLFTFQIPYYVGPLGENSKTGWIVRKEKGAVLPWNINEKVDMSATSEAFIGNLIRTCTYIQGEKVMPKASLAYERYCVLNEINNLCIDGERIDTKLKQQIYKDCFMKGKQVTKKQLCSYLAAQNAIHSEEQLTGIDKNINNSLSSYGKMYAIFGERLKEDAILETAEDIIYWGTIFGDSKKMLKQRLKKYVKEGIIDENQLKRILGYKFKDWGRFSKALLTLSGCDKSTGEIITLGQAMWEYSLNFMELINSEEFTFKEELEKHTKVAMKQLSEFTYEDLADSHFSVPVKRMIWQTLLVVREIEQVMGCAPKRIFVEMTRTEEEKGEKGRKESRGNQLLELYKSIKNTDSHNWKEEIAAADKDGKLRIIPLFLYYMQMGRDIYTGEEIDLDRLYDKNLYDKDHIYPKCYVKDDSIMNNLVLVNKRANQDIKKDLYPIPEQIKANPKVRELWDTLHKQKLITDEKYARLTSNTAFTEKQLGDFIARQLVETEQGTKGVANLLEQLFKDTVIVYARASNVSDFRRENGFLKSRLVNDFHHAQDAYLNIVVGNVYYTKFTKNPWNFIRNEYEKDKEKNHYNLTRMFKWNVVRGSETAWIAETKDEKGTIATVRKMMQKNTPLLTRMNFEKHGGIADESLYSAKVAKPENYLPLKSADERMSDVKKYGGFTAAKVAYYFIVHHKEGKKENITIEALPLHCKDKVEREENGLEKXXXXEKVEREENGLEKYCEEVLGYGEVNIIRRKLKIQSLLEFNGYKVYLSGRSEERLILRNAMSLCLPTKWVTYIKKLEKAVDIKIIEEVITPENNIKLYDILADKHVNTVYAKRLNTFGKKLLDGREKFVLLGVEEQCEILLQVLRLSRIGTTVANLKKIGASDGSGEMKTSKNLKASDRPAVINQSPCGLYEKKEWIFDKIVEK

SEQ ID NO: 8210 - protein, 1141 aa, unidentified
  REGION 1..1141: note = Description of Unknown: Cas Enzyme sequence
MCSMNDFSENVPGIRYRVGIDVGLKSIGFCAVEVDRNDQPIKLLNSMVFIHDAGVDPNENKAAKSRKLTAGVARRTRRLYHTRRQRLANLDRVISKDFGWPLPDQSTFKYPTEPWHVRSRLLEGYIADDDKRKTALSIALRHMARHRGWRNPYAKVETLLQSAEPSEFLKGLNERISTSLGRDFPADTTPGQLVDAYLAHPDYVKAPGTPKLRGPEGILEGKLHQSDNAEEIRRICDVQQIDPADRDRLIRAVFQAKSPKGSAKERGLVGHDELPGQGKHVRAEKAHPVFQKFRIVSVLANLRVREGRAERPLTPEELQGLTDFLLIAGLKQEVTWQDLADNLGIERSDLRGTAKASFDGSPVLRNPPTDVTTEKIMAGKVKWLKEWWKDADDEQRGYFVDAFSNSGGSEDTSDVNDEVAELLEQATEGDQVEFEKISLPQGRAAYSLDSLRRLTDRMLRDGVDLHTARRLEFNVGDDWKPAVEPIAAPTGNPAVDRVLKQVSRWLHTATERWGEPTVINIEHARDGLGSEKVARELMQENEKRRKANKVAVAVMAEKLKLSGKIHRSDQIRYFALQRQNCQCLYCGASISFATAEMDHIVPRADGSSTNDRSNLAAVCRTCNHKKGAIPFAAWASSDHTNGGVSLKGALDRVKMWQRDNGMSPKQFKQLQREVSARLKSRKPDEEFDGRSMESVAWMAVELRTRIEGFYRTRDEEAVPSVGVYRGQLTAEARKASGFESRVNLIGGRGKTRFDRRHHAMDALVIALMNPSVSRTLALRVNMRDAQRLAGLEETWKNFYGKPGEASQRFESWRESMLRGVELFNIALSDNAIPFNENIRLRMNSSAVHEDTLFSFSHTKPVKKGSTTMKERGVQCALGDAIPIDLIDRAETPALWTALTRCSDFDPVKGLPENLNRTIVVNGRHVGPTELLNFFGSPSACLKVRGGYVKLANSIHHARIYRIDGKKTTYAMVRVFQVDLRRMKHQDLFTTPLMQSSISMRTSETKIRKAIADGTATQIGWLVEGDELQLNPSMYGDGSIAKVFSRYPELTAWRVAGFKSASKIRIKPLLLSKEGFVDDKDAARLGIEPTPDEVRKAVDDPGWVTAINVLLQAGGVRVIRRNCLGEERWRSSASLPVSMMLE

SEQ ID NO: 8211 - protein, 1171 aa, unidentified
  REGION 1..1171: note = Description of Unknown: Cas Enzyme sequence
MTKILGLDLGTNSIGWAVVDKENDRIDDCGVRIFPEGVVNMNEGEEKEKSKNALRRENRQTRRQVARRRMRKIKLLELLVEQGMCPLTHDQLMVWKHWDKHKKSEGRHFPQTDKFIQWLKLNPYELRYKGINGDLTKMEFGRFLYHIIQRRGFLSTRKEKETGKIYAGKENMVGIDDTKEALNGNTLGEYLYTIYPDENESFKNIRNADGDDLRIRGRYTLRDMYVEEFEKIWQKQAPRLGLDKVFVTKQKVVFLNGSKNRNRNIKKIDYLKKNRNNVDVEEINVKREKADKTLTKVTSYEKISLHDHLGGKVEIKDNNIKFDSKDSVLFFQRPLRSQKSLLGKCRYEKNKTPVSISHPDYEIFRTWQYVNTIKFGNNIPLPVKQKQVIVDFLKTKKTAVKFEDIIKLLQMSHENFNYNDDDKVDGCPTIAQLSKLFNNKGWEDNYHNIWHDFYFFDDSEKLFKKLIKTKEYELKENIKLEDVKKVTIKDDKYSSLSLKAIRNILPFLQRGLLYNQAVVLGGVMNAFNYKIQNDEISRWDRFADYHDIIVKDILAIIKEKNKQGETIEKIKEYLSNPENHYGFVKNAPAFKKLYHHSQEVEEKEKSYKISEIENLRNPIVQRAVQEMRRMVNELLEKYGKFDRIAVEMGREMKLSKKGRREVSRMIRQNFEANENVREILKEYQLAPSRQNIQKVLLFNEIQAKAGKVVCPYTGKTLNISDLLGKDNKVQIEHIIPRSFSLDDSFTNKTICDAKFNQLKGNLTPYQFYQKNNDKKIWGASSWEEIEQRVYSVLPFNKAKRFTTRKTEWKTEEFISRQLNDDRYISKKTKEILSEVCNEILVMPGAVTADLRRLWGLNNILQPTIGLPDDEFTIDRDKAVNYWAVTDEKRNIKKLYPMNNPRPDVAAEETVVTGYVTKNKFKAYRLNLEFEAPDISDGKYYVKFPVSKPLKTLRQYVDKPDYGDDEVILRGMINRNKFNHDSLKRRIEAPKNLDDGSYWAKFKIMDKKFEEPEKNKRPENKNGICLFGKVKNNVFTSYIYQCETDLEDGQYWVLLDLDFDQVEFIATKNEKPEIENNQLLVLGDVNEEGTFTALHDIQLQFDWDDKPGRYWAVLNILSNNPEYTAVENKPPKVENDEKLIEGKIWVDHKTEEIRFDPKKNRDDHRHHAIDAI

SEQ ID NO: 8212 - protein, 1044 aa, unidentified
  REGION 1..1044: note = Description of Unknown: Cas Enzyme sequence
MVNRKFNNYNMIDCLQQEVERLGASYPIMNEVTLGIDVGTSSCGIALIWGDRIAFLGVRCFRSATDAYTGLAKSSIRRQKRGRRLRLKRHRQRRQQLRGLLEAAGLLPAAGKLPPLDPYQIRAEGLERRLIPFEFGVALAHMAKRRGYVPRRELKHAAEASRLAIGPIAAQAARNEMHAESYRTAGEMLARDPAFAQRKRNRAGNYRAALSRRMIENETATFFEAQRQFGNPAATEDFQQAFRDIAFQQTRAEPRARCVGPCPYLPSDQRGARHAPTIERFRFLDALTKLKIADGGTIRRLQPVEVARAAERFGRTLRITRLDLRRWLALDERIRFIDGRPEEADIVSSMGAAFGTVTLRGVLGRGWWRDLGERPGLLDRIAEQVAFQRSYPDLAAALEELGLAAPVIEAILEAFSDGEFEHFRGTGALSCEAAGRMLPFLERGKDMQEAAAKAGLDPRAPQQQILHRLQRPSVRRAVMETMKQVRAILREWQIRPGRIHVEVSRELALGPSQRSALQEYRRKRRTARAAARTALAELADGKPHGRVSNAMVERYLLWQEQSGRCIYSGEEIPVAELFDGSRVQVDHILPLSRSGDHSRTNTVICRAYANQRKGNRTPFEWLGHDQKSWHEFRRRVRWLPISPRKQKFLLARQFASREAATLNRNLHDTGQAAQCVLAALGVMYPEAERVRRVVSRPSQLTAVLRRAWGFSKDREDLRHHALDALITALASDRIFVQLTEARRNMGSAVDVAFHPPWKNFGLDVMTALSNVAVSRSEQHRGRGSAHGHTVRRQRIQPDGSRVLYERRPLARLRKTDLARIPDPNVNWRLIRALEGWFARGAPLDEPPTSPQGDPIRRVRLKLTGAAGVPRDGLPIRGGIAAYGDLVRIDLFERRGRYVMVPVYAVHVATERDPPALAVVRDKPRDAWRPIGPEDHFLFSIYRDALIRVKRRNGEVIEGFFRGADIASLRLALADPLMPRTIRRVPISLALNIEKFVVDRLGRRFPVRKEMRTWRGLNKPWPPKSMAVQIDLPAKKETSVPEVQA

SEQ ID NO: 8213 - protein, 1327 aa, unidentified
  REGION 1..1327: note = Description of Unknown: Cas Enzyme sequence
LINIIHAGEDPVHYITSIFIQIPKIKPMKRILGLDLGTNSIGWAVVDADNQKIIDTGSRIFPMGVVNINEGEDREKSKNATRREFRQARRQTARRRLRKIKLLELLIDYDMCPLTVEELNKWRKWDKQKKTDGRQFPDTPSLRQWLSMNPYELRKRGVEGELSLHELGRVLYHMIQRRGFASSRKEKDTGAIYDGKENMAGIHETQEAMDGQTLGQFLHDIVPDENTPYTRKKNEKGEDLRARGRYTLRDMYVEEFERIWQKQAPHLQLDTLTTERKKRIFLKGGKDRNRNLKKINYLRNHRDKVEVKEITLQLEDRETTYTQVDTLSRISLHDMLGGNIRREEDTLRYDNKDSVLFFQRPLRSQKGLLGKCRYETTKTLANTSHPLVEEFTAWQFVNTIQFGNKQSLSFDQKAELVDFLLSKKTAQKFEKLIKHINLLHETFNYPNDHTVPVLPTHAQLMPLFSTAGWQDQAHEIWHDFFFYDDSQRLFEKLQRTKAYGLKKDINIEKIEAVSLKDRTYASLSLKAIGNILPFLKRGMLYTHAVLLGGVKNAFNYGADNPDRWERFDGSHEQIIRDIREINKDKSNKEGDAIRKIKHYLAEPANEYGFTADDKAFRKLYHPSQEVEEKEKKERISPIENLRNPVVQRSVQEMRRLVNELMAAYGSFDRIAVEMGRDMKMGKKRRGQKQIEIRQNNKKNQEAREKLTQYGLRPSRENLHKVLMFREIEERSGTVKCPYTGKTVGIGDLLGRYNTLQVEHIIPRSVSLDDSFANKTLCDSKFNQLKGNLTPYQFYEQNSDPKLWGASSWEQVAHRAFQLLPYNKAKRFTTKNKLEQNGGFISRQLNDDRYISKKTKEILSEVCDDVLVMGGGVTAELRRLWGLNNVLQPVMGVEHYNMEADAYKDLPHWAVLDENRQVKEVLPQQNPRPKTEAPALCLTGEITNQRFFQREISVELPAPDTADGTYFAVLPKVQVKAYHQYVVEKPQSEEQQLVLRGVVKKGKFMHDSLSQRVDVDKSLTDGNYYATFTVTQKTPKYPDEQKKVRHKNGLALFGAVENEVFTSYIYQCQTNMEDGKYWMLLDLDFDSVRLVPTRNPKPSVQPDEFVLIGDVNDEGDFLPKVDAQFRLKTHQPAGRYWAVVGIGNEPPVYTPEFRSVPEVAKNEKLIEGRVWVDTETGEIVFDPKKNRDDHRHHAIDAMVIALTNQRMVQELNRYNAQRDEAYRSNAKRPTIATPWEGLRNDVQKAAENILISHHKSNPVLKKVSMQVIKNGKKLREQGMALRGQLHKETVFGKRSAPDTDEYNYHVRKPLAALKDNQLKKIVDKRIRE

SEQ ID NO: 8214 - protein, 1524 aa, unidentified
  REGION 1..1524: note = Description of Unknown: Cas Enzyme sequence
MTKILGLDLGTNSIGWAVVDKENNKIDDCGVRIFPEGVVNMNEGEEREKSKNALRRENRQTRRQVARRRMRKIKLLELLIEQGLCPLTFEQLMIWKHWDKNIKSEGRHFPQSEKFIQWLKLNPYELRYKGINGDLTKMEFGRFLYHIIQRRGFLSTRKEKETGKIYAGKENMVGIDDTKEALNGNTLGEYLYSIYPDENESFKNIRNEDGDDLRIRGRYTLRDMYVEEFKKIWQKQASKLGLDKMFVTKQKVVFLNGSKNRNRNAKKIEYLKKNRDNVDVEEIVVEREKANKTLTRVTSYEKISLHDHLGGKIEIKDNNIKFDNKDSVLFYQRPLRSQKSLLGKCRYEKNKTPVSISHPDYEIFRAWQYVNTIKFGNNVPLPIEQKRVIVDYLKNKKTTVKFADIVKLIQLSHENFNYNDDDKVEGCPTIAQLTKLFSKEGWKDNYHNIWHDFYFFDDSEKLFKKLIKTKEYGLKENIKLEDVKKVSIKDDKYSSLSLKAIRNILPFLQRGLLYNQAVVLGGIMNAFNYKIHNDEIPRWERFADYHETIVKDILSILKENNKQGETIEKIKKYFSNPENHYGFENDAPAFKKLYHHSQEIEDKEKTDKISEIENLRNPIVQRAVQEMRRMVNELLEKYGKFDRIAVEMGREMKLSKKGRREVSQMIKQNFEANENVREILKEYQLAPSRQNIQKVLLFNEIQAKAGKVVCPYTGKTLNISDLLGKENKVQIEHIIPRSFSLDDSFTNKTICDAKFNQLKGNLTPYQFYQKNNDKKLWGAASWEEIEQRAYSVLPFNKAKRFTTRKTEWKTEEFISRQLNDDRYISKKTKEILSEVCNEILVMPGAVTADLRRLWGLNNILQPTIGLPDDEFEIDRERDLNYWAVTDGKRNIKKLYPMNNPRPDVAAEETVVTGYVTKNKFKAHRLNLEFEAPDIPDGKYYVKFQVSKPLKTLRQYVDKPDCGDDEVILRGMINRNKFNHDSLKRRIESSKDIDDGSYWAKFKIIEKKFEEPEKNKRPENKNGICLFGKVKNNVFTSYIYQCETELDDGQYWVLLDLDFNQVEFIATKNEKPEIENNQLMVLGDVNEEGTFTALHDIQLQFDWDDKPGRYWAILNILSDKPEFTAVENKPPIVENDEKLIEGKIWVDHKTEEIRFDPKKNRDDHRHHAVDAIAIVLTDYNIINQLNRYNAQKDALEKGIASERPSFEEPWANFFQHAKEAAGKILVSHHKDNTVTKKVSMIIEKNGKKYRSEGQAVRGQLHKETVYGKRTPPQKEQAFHVRKPLASLKDNQLDKIVDDRVRSIVKYGREREKFINEQIKALKKDRTKAGDEEEKKIDEQIKLLEEENRQLYTLPNKKGDRVPIKKVRIRENLGNTEMLKPSENTNQYVNPRNNHHVMIYKDSEGRLQESIVTLWEAAERKNQGNPVYQLPNDGAEIITTLEVNDMFLLGLDKEQTSDLGNLDMQILSKHLYRVQKLSSMYYTFRHHLASTVSNPDEEFRIVSFSAWEKVNPVKVRINQLGKITSV

SEQ ID NO: 8215 - protein, 1294 aa, unidentified
  REGION 1..1294: note = Description of Unknown: Cas Enzyme sequence
MSKYKKIIGLDVGTNSVGWAYVSQDFEKREGEIQGLGSRIIPMPADEISNFNQGNLESATSARTAKRGMRRLRERQLKRRERLVDVLKIYGMIPKDWNPNRFSSFAYNYEDGKAEFKFKQAYEEMKAIFKSAHPNISVIPNDWTIYYLRKKALEHKISLEELAWVILQFNAKRGYYQLRGDDELNTAENKFFISDIVDEIVDLEDEVRGKKKFRIVLRDGVEGIYSDKEKPEFIGKRIEFIATEKSTKEENYIDLTKPDGEDWTLRKKRTEHKIEESGKTLGAYIFDSILEEPGIKIRGKEVHTIDRKWYRKELEAILEKQMEVHPELKDKGTYEKAIQHLYHHNESHKENLRKYGFDHLIIKDIVYYQRPLKTKKYLIRNCKYEKYFYKDKTGELQSRPVKVTARSNPYFQEFRVWSTLQNLRIFAEEQRNEKGVLIQDVDVSHKVLHVENMEKLFDLFMQEEKVGENQILKTIDLKPSDYRINFESQNSLPGNKTIHSILKQFSKEKELKKEVIQLINNRNDLHRLWHIIYSLGENKDHMQSGIKTAFRNRLSEESIKRLLDVPGFDKDYASFSEKALKKLLPIMRMGKYFDQNDIHPDTKERIEKVINAEYDETLKDEVREELDSRSEVYQFQGLPVHTASYIVYGRHSEAESTDRFENPEDVDMEKLLPQHSLRNPTAEQIIRESILLVRKLWEEYGKPDEIHVEMARELKLPNDAREAYTKRRDENYKTNQRAIAMLNELKSEQPSINPHSKGHIETFKIYEEGAHANAGAKADKAIKAIRKKGDPTPKEIERYKLWLEQKYRSPYSGQIIPLSRLFSKSYEIEHVIPKALYYDDSFNNKIICETELNQFKEDRTAYQMILESGGKEQQGIRILEKEEYEELTKKMYGQNKVKYKNLMRTEPPYGFAARQLNNTRYIARKLYELLDPFVREEGEESARSKNLVAMAGGITHELRNDWGLHKIWKRLLAPRFQRMNEITGTEDYYQKNGQRIDLSGYENELKRLDHRHHAIDALTVACTTRQHIQYINSLRAENTRYNLRKVLFEQDKQGRSQGYRLPWKGFPEEAELQLKQVVISFKNRIRVINKTINYYQKYVKQGDGSYQKKFVQQESSGATWAVRQPLSKETYYGKVTLREYRPKSMNSALNEPHLIADPKIRKHIVNLFKKFDGKKSKVRKYLKEKPLQRGGKEITRLNMIEYNTYATSTMDLDEKTKDTHLDKIVDQDLQQELKMHLEKYDGKSELAFSTNGLLELNANRKLPIQNVRVKEKFGLKYPVGQTGNKQDKFVESAK

SEQ ID NO: 8216 - protein, 1078 aa, unidentified
  REGION 1..1078: note = Description of Unknown: Cas Enzyme sequence
MKKRILGLDTGTNSLGWAVVDSDEYGNCNLVKYGDLIFQEGVKIEKGIESSKASERTGHRALRRQYFRRRLRKIEVLKVLIKHGLCPFLGDELLHDWHVHKIYPKTDDFMLWQRTSDNENKNPYYYRHLSLHRRFNLDRQDERYMLGRAFYHLAQRRGFLSNRLDSTPEQETGKVKTGITDLTHEMEAAGCEYLGDYFYQIYSDPDNHSRIRTRYTDREQHYEREFHAICKMQQLPPEMVEELEKALYFQRPLKSQRKGVGKCTFEPKCPRCADSHPDFEEFRMLCLLNNVKIQTPYDLELRYLNQEEKEKIVPLFYRTSKSNFDFEDIAKALAGKGKYKYYKDEGDKPYKFNYRMTQGVAACATTGKLRKIFGENWKEAIAETYRLNNTRKGQKTVAQMVDDVWNVLSTFESEDKLKHWAQLNLQLDEDQSKRFAAINLSHGFASLSLKAIHKILPFLRLGYIYSHAVVLANIPAIVGEEVWQDADKQRFIMKNVLDTLQCQDQATKDFCIKDFLLNNFNLKPGEADRLYHPSMIETYRDAGQKDGIYQLGSPQTSAIRNPMAMRSLHEMRKVINQLLKEKIIDTNTEVHVEYARGLNDANMRKAIADYQRSQDKKHQKYAASMKELYLHETGKSIDPTETDIRKYELWEEQSHKCLYTGAEIGIADFLGDNPKYDIEHTIPRSVGGDSTMENLTLCDSRFNRDVKKARMPSQLANHEEILTRIEGWKKRYEELTRQIDKCRTFAGMAKDMKDAVIQKRHRLKIERNYWKGKYERFTMTEVPEGFSRRQGAGIGLVSKYAGLYLKSLFHDPQNRSKSRVFTVKGTTTAEFRRMWGLQSEYEKKSRDNHCHHCIDAITIACIGKKQYDEMALFYHDEELYDDGRGKKPQFRKPWPTFTEDVLNLEKSLIVVHETPDNMPRKARKYVRTTRGKFLAKGDCARGSLHNDTYYGAIERDGKIKYVVRKALASFEKESDLDNIVDDTVKEIVREAVRGKNFKEAIAQPIYMNKEKGILIKKVRCYARRMTSPLNIRQHRDMSSKDYKQTFHVANDTNYCMAIYEGMVKGKVKRDFEELAYYL

SEQ ID NO: 8217 - protein, 1379 aa, unidentified
  REGION 1..1379: note = Description of Unknown: Cas Enzyme sequence
MREYNLGLDIGTNSVGWAVVDENNQIVKKGGKALWGVRMFDEAQSAMDTRIYRNSRRRINRRNQRLVLLQNEFYDEIIKVDLTFFQRLKDSFFKKEDKLNKNSYTFFDDNITDKEYFKKFPTIYHLRKHLLHNDEKIDIRMLYLALHHIIKYRGHFLHSGNVDLNSFQKIKDTLESFNSKMDEMSLEFEDNEDYFAHIEFDEYLEMNLKNIMLSQTSKKEKKKKLVELFKVGQKSLTNELLIELLVNKKVKLDKLSITKDKKYESCEINFEKEELFEDIEKARTITELFYILDEIINIKGIVDYYYLLKIIGSNEYLSDSMVKIYDKHCEDLHELKNFIKEYCPDKYDECFRKTSDSKLCNYPKYVGMNSVNQKMERFSHCKKEDFYKYLKNLFNTIENEKAKPKIEKFKQAIENDDFLNRQNSSHNSSIPMQLNLKELKVILNKQSKYYPFLKDKNSDGYSVLDRIIAIFEYKIPYYVGPLNKNSKYSWLIKRSDEKITPWNYEKIIDLDASAKEFIQRMQNKCTYLKGENDYCLPKKSILFSEYNCLQYLNRLIINGALIKDELKKEIYENIFLCYKKPTKKNIIEYLKTNHNYDETTLKSNISEVNCDMSSYIQFKEIYGEDFEQNFNIIEEIIKDITIFEDKKILEKRLKEIYHLSDDKVQKIKSLNYKGYATLSKHFLNDFYSVNKQTNERYGPIIQIMRDTNYNLQQVIYDDRYNFIKAIDDYNKENLNIAKKLNVSDFIDEYIYVSPIMKRSLIQSYNIIQELEKILGQPISKYYIECSRVNSGSSKITASRYNQLKELYKNCQSQVNDLSKNYININKLSKQLEECKDKLRADKLYFYFTQFGKCMYTLEDIDLDDVFSGKYDIDHIYPQSLIKDDSLSNRVLTNKEKNGKKDNKFIFDIPGFLSKEAEAFYKKLLECKLITKEKYRRLTMKQIDDNELSVFVNRQLVATNQSIKGLVEVLKIYKGVKPTNIVYSKATNINDFRNNYDLYKSRTANNYHHAHDAYLNVVIGKTLDDYYRYNYLQKSKDILDLKNKKITINPEKILSKNRYIYKNGEKKVIWDLEKNLKMIKTNLYYRFDINETIMTRTSNKMFKKTGISPSGKSENLIPIKTSDSRCDVLKYGGIKSNSYSFYCIVELSDKKEKKSYILEAIPKTHSDKLEEYIEQSIDKKKVSDFKIINRNIKSNIIIEYEKLRYVITGKSGERYLIKNFKDRNFSYNAIKTIKHIEKYNYQKKFEIPVEETKEKIILAPKNKDTKEISLTLNECQALLDEIISLFKKDIYAYDIINKIASNLEENKQNLTLINLIKVLTEVLVLLKTNERGTADLTLINMNKDTGTLRINKTLKPGMKFISESPTGYYRKVIFEVPNGI

SEQ ID NO: 8218 - protein, 1118 aa, unidentified
  REGION 1..1118: note = Description of Unknown: Cas Enzyme sequence
MTEKSSYSPKKYSLGLDIGTSSIGWAVLDLDKERIHDLGVRIFERPEVPKTGKSLAEPRRTARSTRHRLRRRRQRLNYLKQFFIDNNLITENRIGDILSPTRPKKWRTIYDPYTLRIKGLNEKLSPEELFVALYHIAKRRGYKSNRVSVEKQDTEGSQVLSAISENKLLLKKYNTKSVAKVLTLDEKFKNNKRNKASKYENSFVRKNFEDEVILLLESQKNFGLELPYEKIQTLLYGDIKNGNYNGIFSQRPFVTKELIERMRGYCEFEPEKPRAPKASYSFELFRLAQNLSHLRIVIDKETRQLSENEIAKIIEKAKNVKELKYEHIRDILGYKGDQSFSFAQGMIRGKIKNDDKKNGEGNKFDSMIFYYTVKKTLEQYPKDWNILTANNFELLDTTGLILTVNKDDSSLRTELSKLNISTDAIEALLPINVSGFVHLSFNSLHKITPWLLRGLNYSEAVEKAGYSFSQGISGDKKKLPPLSKKQANQITNPVVKRAVSQTIKVVNAVIRKYGLPYSVKVEAASELAKNAQERNKIKKIQDENAEYNEKIKQKLINEFNIPTPTGLQITKFKLREQQNGVSLYSGKEIKLENLFTNEHYGEIDHIIPFSRCGNDGLNNKVLVFADENQEKGNLTPYEAWGGDNQKWAQFEAQVRATAGLSAAKRDRLLSKSKPVEDWNVRALNDTRYISRFLRQYIRDNLDFPKIEGKTDTQRVFSPSGPITSYLRRVWRVGNKNRDDNNLHHAADACIIAATSPSIIQKISSLNKYYELFKYTDKNEIVDKLTGEVLDRNQFEQHIADLEPWDDFGKEVRKRSKLYSTPSELHNELTGLKNYDEEFRLSTLPIFVSRMPERSGKGSTNSETFRSPKIVKGYLDEKGKPAIARKQRVPLHSVDLKKLYDSPIRETDPKLYNILEQRLKDSNNDPAKAFTENVYKPTKDSKRGNIVRSIKIYNTRDSRSGFLVNEQRAFVNNGKTVRLDVYKRKNYKDIYEYYFAPVYTHLINAQKIEVLPTPTGRSKNEKADFDTIRTEDDKIYATPENGFIKQFSIYPNDYVRIYFDNEIVEGYYVKYNTNNGSLKLIKHSDTSKNDNDLISKAAKTATLIERYDISVLGDNYRWL

SEQ ID NO: 8219 - protein, 1194 aa, unidentified
  REGION 1..1194: note = Description of Unknown: Cas Enzyme sequence
MARKVLGLDLGVGSIGWCLITLDEDEKPQSILGMGSRIVPLSTDDATEFTQGKAITKNKMRTVARTIRKGMDRYQLRREALKKVLREHGMLPDESLIKLPLLELWELRARAATPGGQLSLTELGRVLLHINQKRGYKHAKADEAAEAEAEGKSKKEKEGYVAQVKGRYQALREKGQTIGQHFAEELRANKQTASRGVYYTYRIKEQVYPREAYIEEYDRIMAVQRVFYPKVLTDELIQRIRDRIIFYQRPLKSCKQLVSTCEFEKKERVVQVKRINKDGVEELVERTITIGPKVAPKSSPIFQVCKVWESIQNIRLYYPDGTERKLEQEEKQKLFDYLQKNDKLSLTALRKVLKIKPKEKLWCDKLLDKGIAGNTTTAILRKALKGYEQYEGLLRFDLTIRDGHKADEDGVILPIIDESYQNEPLYKLWHILYSIEDRADMYRALVGQLGIKEEDLDDGLMDSLYKIDFVKQGYGNKSAKFICKLLPHLQEGKMYSEAAEAAGVRHSDSMTAQERDERSLLETIPLLEKNALRQPVVEKILNQMINLVNALKREYGEIDEVRVELARELKMSREERVETTKSNNAREKENEAIAKRIAEYGLTPTKSRIQKYRLWQESDECCIYCGKHVDVVQFLRGEEIEVEHIIPRSILFDDSMSNKVCACRSCNQEKGNRFAMEYIQSKGWEQSYIERVNSLFHDKKISYSKRQRLLMLPKDLPEDFIERHLRLSQYISREAQGILRKGIRLVSASEGSVTAKLRQLWGYDNILRDLNLERYRSMGETEVVTVEHRDGARTDERIKDWSKRKDHRHHAIDALVVACTRQSYIQRLNRVNAGADREEMDTFIKEQQQEHKLSKKEKLSLLEHWLIRQPHFTTGEVTKHVEGILVSLRPGKRTISRGRNIYKRSGKTEVQRGVLIPRGALSEETIYGVIQLHRKDKSGTGLERSYVKRIPLSKVNPSNVKKIVDSRIRDVVQAALLSLSGRKGVFPTELYLDDSRKRVVRSVRCLVRSSTLIPIRFNSDGEAIGFTKPGVNHHVALYRDGAGNIRESVVPFFRAVERARYGIPMIISDPSKAREQARANPNLPESILLSLPEEDWQLEEILQGDEMFLLGMTDEAIDRAMETKDYTTLGRHLYRVQNLAAGDYMFRYHLETTLDGKDNVGDIPSSYRIASQKRYKELNPRKVKIDLLGRISLA

SEQ ID NO: 8220 - protein, 1187 aa, unidentified
  REGION 1..1187: note = Description of Unknown: Cas Enzyme sequence
MENKQYYIGLDVGTNSVGWAVTDTSYNLLRAKGKDMWGARLFDEAKTAVERRTKRTSRRRSEREKARKAMLKEFFADEINKVDPNFFIRLEESKFFLDDRSESNRQRYSLFNDATFTDKDYYEKYKTIFHLRKALINSDEEFDVRLVFLAILNLFSHRGHFLNASLKGDGDIQGMDVFYNDLYESCLEFEIDLPQISNTDNFEKILSQKGKSRTKILEELAEEMSIGKKDKIKYAILKLICGMKIKVADIYTDEDIQEEDKKKDFGFRESNYEERALEVKEIIGDEYFDLVERVKAVHDMGLLSNIIGKSKYLCEARVEAYENHHKDLQKIKELLKKYDKKVYTDMFRKMTDKNYSAYVGSVNSNIAKERRSVDNRKVEDLYEYIKKIALKNIPDDNEDKIEILKKIETGEFLKKQLTASNGVIPNQLQSRELRAILKKAENYLPFLKEKGEKNLTVSEMIIQLFEFQIPYYVGPLDKNPKKDKNANSWAVIPSGGKILPWNFEDKVDVKASAEEFIKKMLRKCTYLSEEHSLPKQSLLYEKFMVLNEINNIKIDGEKISVEAKQKIYNDLFMKGKKVSQKDIKKELISLNIMDKDSVLSGTDTVCNAYLSSIAKFRGVFDEDVNNQSIIDMVEDIIFWGTIYSDEKKFVKEKIEEKYGDKIDKDKIKRILGFKFSNWGNLSKSFLELEGADVGTGEVRSIIQSFWETNFNLMELLSSRFTYMDELEKRVKKLEKALNQWTIEDLDDMYLSSPVKRMIWQSMKIVDEIQTVIGYAPKRIFVEMTRSEGEKVRTKSRKDRLKELYKGIKEDSKQWVKELDSKDESYFRSKKMYLYYLQKGRCMYSGEVIELDKLMDDNLYDIDHIYPRSFVKDDSLDNLVLVKKEINNRKQNDPITPQIQASCQGFWKILHEQGFISNEKYSRLTRKTQEFSDEEKLSFINRQIVETGQATKCMAQILQKSMGEDVDVVFSKARLVSEFRHKFDLFKSRLINDFHHANDAYLNIVVGNSYFVKFTRNPANFIKDARKNPDNPAYKYHMDRFFERDVKSKSEVAWIGQSEGNAGTIAIVKKTMAKNSPLITKKVEEGHGSITNETIVGVKKIKFGRSKGEKTDKIPKKINVKAYQPIKTNDERLCNILRYGGRTSISTSGYCLVEYVKKKKTVRSLEAIPVYLGRKDSLTEEKILNYFN

SEQ ID NO: 8221 - protein, 1139 aa, unidentified
  REGION 1..1139: note = Description of Unknown: Cas Enzyme sequence
LKLIVGNQADFKKHFDLEEKAPLQFSRDTYDEDLENLLGQIGDDFADLFLVAKKLYDAILLSGILTVTDPSTKAPLSASMIERYENHQKDLASLKQFIKNNLPEKYDEVFYDDSKNGYARYVGVDLKVRKRNGKLATEEEFYKYLKSILNNVKGADYFLDKIEREDFLRKQRTFDNGSIPHQIHLQEMNAILRRQGEHYPFLKENKEKIEKILTFRIPYYVGPLARGNRDFAWLTRNSDQAIRPWNFEEIVDKASSAEDFINKMTNYDLYLPEEKVLPKHSLLYERFAVYNELTKVKFIAEGLRDYQFLDSGQKKQIVTQLFKEKRKVTEKDIIHYLHTVDGYDGIELKGIEKQFNASLSTYHDLLKIIKDKAFMDDAKNEAILENIVHTLIIFEDREMIKQRLAQYDSLFDEKVIKALTRRHYTGWGKLSAKLINGIRDKQTGKTILDYLIDDGYSNRNFMQLINDDGLSFKEIIQKAQVVGKTDNVNQVVQELPGSPAIKKGILQSIKIVEELVKVIGHEPESIVIEMARENQTTTRGKKNSQQRYKRIENSLKILASGLNSKILKEHPTDNIQLQNDRLFLYYLQNGRDMYTGKPLDINQLSSYDIDHIVPQAFIKDDSLDNRVLTSSKDNRGKSDNVPSLEVVQKRKAFWQQLLDSKLVSERKFNNLTKAERGGLDERDKVGFIKRQLVETRQITKHVAQILDARFNKEVTEKDKKNRTVKIITLKSNLVSNFRKEFGLYKVREINDYHHAHDAYLNAVVAKAILKKYPKLEPEFVYGDYQKYDLKRYISRSKDPKGIEKATEKYFFYSNLLNFFKEEVHYADGTIVKRENIEYSKDTGEIAWNKEKDFATIKKVLSLPQVNIVKKREVQTGGFSKESILPKGNSDKLIPRKTKDILWETTKYGGFDSPVIAYSILLIADIEKGKAKKLKTVKTLVGITIMEKDAFEKNPIAFLENKGYHNVCKENILCLPKYSLFELENGRRRLLASAKELQKGNEIVLPVYLTTLLYHSKNVHKLDEPGHLEYIQKHRNEFKDLLNLVSEFSQKYVLADANLEKIKNLYADNEQADIEILANSFINLLTFTALGAPAAFKFFGKDVDRKRYTTVSEILNATLIHQSITGLYETRIDLSKLGED

SEQ ID NO: 8222 - protein, 1148 aa, unidentified
  REGION 1..1148: note = Description of Unknown: Cas Enzyme sequence
MTVTLPKDDVRYKVGIDVGLNSIGFCAVEVDDDDYPIRLLNSLVFRHDAGIDPASRKAALTRKNVSGVARRNRRAKRETKKRLVALDRLLSEEFGWPLPNLEDYPDPYEPWHVRARLLDGYIADDAKRKEMLSIAMRHIARHRGWRNPYMKPASLASLPYPSEFLTNLNQDVSRVIGRKFAAEATQAQLVDAFILGSLSLATTPELQVLEESEKDNSKNKPRDIVLGRVRGDKGVIEGKLHQSDNAEEIRRICATQEVPQDQVERLIEAVFKAKNPREVGAAYKLVGHDELPGQKKYIRAERAHPAFQKFNIVATLTNLRINEAGSKRALSSEELQILTNYLSNVGPKDEVTWFDVAEKLEIDRSDLQGTARASYDGQAALKYPPKDVTSASIKQSKVKALKDWWKQASEDQRGQLIDYLSNSGGSDTPKTDDELDDLTKLTQSFSEKDLEELEKISLPAGRAAYSLNSLTKLTQLMLEEGIDLHEARKRLFNVDDDWKPTPEPINSPVGNPAVDRVLKQVARWINAATERWGIPASVNVEHVREGLVSEKVVRELIRDNEARHKKNMEVAEEIAKRLGLSGRALRSHTIKYFALRRQNCQCLYCGTKISFGTAEMDHIVPRTNGGSNNKRSNLAAVCRTCNASKSNIPFAVWVSSGKAGPGVSLDGAKERVNSLLLEKADLQKEDDSLVEIYSKKEGEKFKKEIIARLESKKPEEEFDGRSLESVAWMAVELHERILGYYESLLKDSGQKVPRVGVYRGAITAEARKASGFENRVELLGGKGKTRLDRRHHAMDALVIALMNQSVSKLLSWRMQLRDSQRISGMPETWKEFHGFNRDEYRRWNAWANAMRIAVELFNDALEKDEVHFSENKRLGISLAKAHDDTIKSLCSYALGGDFSVELIDRAETPALWTALTKQPDFDVKNGLPEDPTRCITVNGKQFGPTDEVDFFTTGAPAIKVRGGFAGIGDTIHHARIYRIDGKKTTYAMVRVFQTDLRRMKHKDLFTEPLKPSTISMRTASKTIRKALAAGTATQIGWLVEGDEIRVETDRYPSGQIGGLLKEYPEASSWRVCGFPDDARVRLRPNLISEEGFGADTSEDIAKIVSGIGWWVSLNVLLGNGPVTVIRCNALGEERWVSRAHLPVSVDLS

SEQ ID NO: 8223 - protein, 1096 aa, unidentified
  REGION 1..1096: note = Description of Unknown: Cas Enzyme sequence
EEIDTLLLNRIKEISYSEISKENKEDEINKLLGKYKNVYNVKQLKKVFKLIFGRTLSLSDLFDDERYKDVDKDVKKISFKEKNYDELRYMYEEVLKEGRDMKVLDLAKKCYSCITLDKIIQGGKTLSESKVELFEKHKTDLMKLKSLIKNDAKLSEEKRDEIYRVILKVDKEKGTNYVNYVKTTKKGTCCTYEEFKIFLKKELAKLQDCEEKNIIIKELDLETFLPLQRTKDNSVVPYQIHREELIKILDNAEKYHSFLKEKDESGYTVKEKIIQLLEFRIPYYVGPLNSHKKANEGGYAWSVRKKGEENTPVTPWNYSKVIDESASAEKFITNLTNKCTYLKGEEVLPKYSLLYSEFALLNELNALRYDGNRISVEARNTIIEKLFKEQGKKVRKKTIKELLKIEGYIDGNGEISGIDKTVKNDLESYRDFKKILGDKFNTEHVENIILWLTIFDKGEGKKLVKEKIKKEYRNIYTEGEISEILKLNYSGWGKFSRNLLTEITSKKLVNESTGEGLNIINAMRYNNILFMELLADRFDYMEQIEDFNKALQKEVTEITPDILEDLYVSPAVKRSIWQTIRIVEELKKIIGCEPAKIFIETTRKNKTKKIATNSRKEMLKKVYESIINNEDIMNLEKELDYTFNIQNKNKMLSDEDDLSLKRKKLFLYYLQLGRCVYSGESIKLDKLFNDNYYNIDHIYPRSKVKDDSIYDNLVLVTREKNEKKEDKSIFEVGFQTSNNKRFWKFLKEKKLITEEKYYRLTRTSEFTDYELTGFIARQLVETSQSVKEVASILRTLNPNSTVCYSKAENIIDFRKNFGKIKDGNRQSKNTEQLIKVREINDYHHAKDAYLNIVVGNVYDTKFTRNPYNYISNSKNGRNYSLNNMFYTDVRNSNTIAWEMNKTVKQIEKVMDNNNILVTRRVSEKKGALYDATIYKANQINEKNEERYQSVKKSNDILSNITKYGGFGNIKIAYYTIVSYEILKKKHIRILPIPIYILNNRLSEVEFSQHIYNLIQNKKNDKIVNFRIIYNKLLVGHKIKLNDYLYYVGGKNGDSFDYDNAIQILLDKDSESYIKIISKYYNDKNLQVCDCEKITKE

SEQ ID NO: 8224 - protein, 1345 aa, unidentified
  REGION 1..1345: note = Description of Unknown: Cas Enzyme sequence
MNNNQNYYLGLDMGTNSLGWTVTDENYNVLKNKGKAMWGIRLFEEASTAAERRIFRSSRRRLQRRKNRTNLLQEIFKEEIDKIDPNFFQRLKDSKYYFDDKDEFQINALFNDEDYIDKNYHEEFRTIYHLRKALIEDKKEFDIRLVYLAIHHILKKRGHFLFQDQNMNNVTVFSNVYNDLSLYLYDELNIDINVNNTNEIENILKDNSTPISKKERALIEVLGVDKSDKQIKAILGLMVGATKKLSDLYDDPELTSIEKPKVKFTDSSFDENRDELESTLHERIYLLDKLKAIYDWSILSEILKGKEYLSYAKVEVYDKHKRDLIRLKEITKKYYPEKYNEIFKHNDKNLDNYSAYAGITTKSNKKIKSESSCTQEELCKYLQNIFKNIEVNEETAYVMNEIEDCTLLPKQVNKDNGVIPYQVHEEELKIILENTSKYLTFLNESVEGESSNKEKILKLFKFRIPYYVGPLNDAHKDKGGNCWIVKKNNRTIYPWNFEEIVDLEASAEAFIYRMTNNCTYLFKETVLPKNSLIYSEYMVLNELNNLRVNHEKIDNLLKIRIFNDLFLNYKRVTQKRLLDYLKSEGMNVEKEDISGIDGDFKSSLTSYVDFKNILGDRINKYENQKIIENIIEWIVLYGEDKNILKRKIQKEYFDLLNSDDISKIVKLKYTGWGNFSRKFLTQINGVDKETGETGNIIEMLRNTNNNLMMLLSKQFTYLDEIEAFNNKFEKPKDITYELVEDLYVSPAVKHMLWQTMKVVKEVVKMQGKQPEKIFLEMARAEDKEKKRTQSRKNKLLELYKSCKEEQRNWSGEIESRTENDFRRDRLYLYYTQKGRCMYTGEEIDLDYLFDKNRYDIDHIHPQSKVKDDSLSNRVLVNRESNAEKGDRYPIPRKFQEKQSRFWYMLYNENLIDKNKYERLVRKTEFTDMELANFISRQIVETRQSSKAAADLFKRVYENTEIVYVKANLVSDFRKKYSLLKCREVNDYHHAKDAYLNVVVGNAYNARFTSNPYAFIKNLENKKYTLNHLFDYDIKRNGKIFWEAGNNGTIGIVKKYMNKNNILFTKATYEGKGGFFNQTIYDKKTCKIGTGYIPLKLGDEKLKDTTRYGGHGYITGAYFFVVEHTEKKKRVRTIETVWKYRASEIDSVDKLVEYSRKELGLVDPVIIYKKIKIQSLAKIDGYFYNITGRTGNQLLVSNAVELCLPQKMNDYIRDISKYINKNTEAKKVLKITDYDNLSRRDNEELYYELLKKHRESIFSKRKNSIGELLLNGEEKFEQLSIENQVIVLREILLLSKSNNLTADLRLIGGSKKTGVMRVSKNLNNKEFTIINQSPTGMFTNEVDLLK

SEQ ID NO: 8225 - protein, 1453 aa, unidentified
  REGION 1..1453: note = Description of Unknown: Cas Enzyme sequence
MSKLKKIIGLDVGTNSIGWAYVTRNFDDGKGEIINLGSRIIPMPADEISNFNQGNLESSTSARTAKRGMRRLRERQLKRRERLVGVFKIYGMIPAEWNPNRFSSFAYNFDDGKAEFKFQQSYEEMKAVFKSAHPDISVVPNDWTIYYLRKKALEYKISLEELAWVILQFNAKRGYYQLRGDDELDTADNKIFISDIVDEIIDLKDEVRGKKKFQVKLREGLEGIFTDKEKPEFIGKRIEFIATEKTTKDDKYFLLTKPDGEDWTLRKKRTEQKIEESGKTLGAYIFDRILEEPSVKIRGKEVHTIDRKWYRKELEAILAKQIEFHPELKDEDTYEKAIEHLYNHNESHKENLRKYGFDHLIASDIVYYQRPLKTKKYLIRNCKYEKYFFKDKQGNLQERPVKVTARSNPYFQEFRVWSTLQNLRIIAEEKRDDEGKLAQDVDVSAEVLTPENIEKLFSLFMHRKEVSESQILKMLNLKSNDYRINFESQKKLPGNNTIYSILKPFSKSKAQKEEMLQLISNRADLKHLWHIIYSLGENAEHMKSAIENAFGDKLSPESVKGLLEVPGFDKNYAAFSEKALKKILPLMRMGSHFSSGDIDPETKGRIEKVINAEFDPDINKDVRAELNELQDIAEFQGLPLHIVSYLVYGRHSESETNACFQSPEEVRVDELLPQHSLRNPTAEQIIRETLLLVKKLWEEYGKPDEIHVEMARELKLPNDKRKAYTDRRDENYNTNQRAIAMLNELKNEHPSINPHSKGHIETFKIYEEGAHAQAGKVDKDIKVIRSKGDPTPKEILRYKLWLEQKYKSPYSGQVIPLSQLFTSSYEIEHVIPKTLFYDDSFNNKIICETELNRFKDNKTAYQLILDSGGTEHNGIRILDKEEYEQLTKNMYGQNKIKYKNLMRTEPPYDFAQRQLNNTRYIARKLYELLDPFVREKEEVAARSKNLVPMAGGITHELRNDWGLHKIWKKLLSPRFQRMNELTGTDDYYQKNGQRIDLSGYENELKRLDHRHHAIDALTVACTTRQHIQYINSLRAENTRYQLRKVLFDQDEKGNYQGYRLPWKGFPEEAEKNLNEVVISFKNRVRVINKTINFHQKYVQQDDGTYKKKFVRQESNGANWAVRQPLSKETYYGKVTLREYKAKALGSALKEPHLIADPKIRKHIVNLFYKFEGIKSKVSKYLKEKPLQREGKAITRLKMIEYNTYATSTMDLDEKTKLSHLDKIVDNDLQDELKKHLEKYDGKSDMAFSTNGLIELNKGRKLPIQTVRVKEKFGLKYPVGQTGNKQDKYVESAKGTNLFFNVYWNEKKKQRVFETVSLQDVVLHQMSVAHLPKKNRLPVPINSEMGEFLFFLSPNDLVYVPTLDQNETLSVLDIKYGNIYKAVSFTGGKALFVPQYVSTIIKDGLEFQKLNKMQVDINEKMVKKVCWKLEIDKLGQIKNIIKAPAELSEYSNEK

SEQ ID NO: 8226 - protein, 1089 aa, unidentified
  REGION 1..1089: note = Description of Unknown: Cas Enzyme sequence
MNGLVLGLDIGIASVGVGILEKNSGKIIHANSRLFPAATADNNVERRKNRQVRRLHRRKKHRGVRLKDLFEDYGFLTDFSKVSINLNPYRLRVDGLNQQLTNEELFIALKNIVKRRGISYLDDASEDGGTVSSDYGKAVEENRKLLAEQTPSQIQLERFEKYGQVRGDFTVVENGQKCRLINVFSTSAYRKEAERILRKQQEFNSKITDEFIEDCLKILTGKRKYYHGPGNEKSRTDYGRFRTDGTTLDNIFGILIGKCTFYPDEYRASKASYTAQEFNLLNDLNNLTVPTETKKLSEEQKKTIIEYAKLAKTLGASTLLKYIAKMIDASVDQIRGYRVDVNNKPEMHTFEVYRKMQSLETISVGELSRNVLDELAHILTLNTEREGIEEAINTKLKDSFSQDQVLELVQFRKNNSSLFSKGWHNFSLKLMMELIPELYETSEEQMTILTRLGKQKSKETSKRTKYIDEKELAEEIYNPVVAKSVRQAIKIINEATKKHGIFDNIVIEMARENNEEDAKKDYIKRQKANQDEKNAAMEKAAFQYNGKKELPDSIFHGHKELATKIRLWHQQGEKCLYTGKNIPISDLIHNQYKYEIDHILPLSLSFDDSLSNKVLVLATANQEKGQRTPFQALDSMDDGWSYREFKSYVKESKLLGNKKKEYLLTEEDISKIEVKQKFIERNLVDTRYSSRVVLNALQDFYKAHKFDTTISVVRGQFTSQLRRKWGLEKSRETYHHHAVDALIIAASSQLRLWKKQNNPLISYKEGQFVDSETGEIISLTDDEYKELVFKAPYDHFVDTLRSKTFEDSILFSYQVDSKFNRKISDATIYATRKAKLDKEKSEETYVLGKIKDIYSQAGYDAFIKIYNKDKSKFLMYHKDPQTFEKVIEEILRTYPSKELNDKNKEIPCNPFEKYRQENGPIRKYSKKGNGPEIKCLKYYDNKLGNYIDITPDGSDNQVVLQSIAPWRTDVYYNHKTGKYEFLGLKYSDLYFEKGTGKYKISKEKGQEQLFRFLSRNNKGKHQVQLKPMNKSDFEKGEKLIDIFGTVPNSTTQCVKGLNKSNISIFKVKTDVLGKKHIIKKEGDEPKLKF

SEQ ID NO: 8227 - protein, 1386 aa, unidentified
  REGION 1..1386: note = Description of Unknown: Cas Enzyme sequence
VANEKIYLGLNIEPENISWAVANNDYQLCKYDKRIMWGVYNFDEAQLSEKRRTARSSRRRYKRQAGRVSLCQELFAKALYKKDKNFLLRISEGALTAEDAKHRKHYVLFEDANYTDKDYYTQYPTVHHLICELIKNKAPHDVRLVYLACSYLLAYRGHFFYSISEDNVGGITDFSPLYNNFYSSLTNLCGDVPFEKNKSEFEKIIRSKNSLTLKKKAFNELMFAGKAKNYDNDIISYSILNNFISGGKIKISKLFANEDYEDLETNEISTSVPDLSEMLEGKIDELQLAVINSVKAIYDWAMLIDILNGCSLISEAMVNKYNEHCNDLKKLKHIFIKYLPHEDYRTVFAEIGEKSNYESYVYNAPKDEERPKNYKKCTQEEFCKFTAKYLNQIKKVDEADQAILDELITKCAGSKLCPKLNTADNRVVPYQLYYHELKLILENAKNYLAFLNEKDEYGTVADKILAIMKFKIPYFVGPLVPSEKSPNAWLERKAEGNIRPWNFKDLVDEDACEEKFIERMTGQCKYVAGQKVLAKHSILNCKYSVLNELNHIVLSNCKLSVEAKQAIYTELCLTSRNRVTKKKILSFLIKNGYAKLGTDIAGIDDIMRSSMQSYLDFEKNHYISDGVLSIEQADKIISRITISTDIRRLRKWISTEYPHLSAADVKYLSGLKYQDYGDVSKSFLEDIYPVNTEAGEIESDKNIITMLWETNETIERLLGTKYRYTESIEYANKELYGLSNGQATLQKSLADAYVPVAMQKATSKAIDIVKDLKRLQGKAPDKIFIRTAKDFADKPKGKNRKSKKEQILAAWGSLKDRDIEALDPGEMASLKKQLNDIDEGKLNLDKYYLYFMQLGRCMYSGAHIPFDELENSFTWNIDHIWPQAKVKDNSLDNKVLVDLTINTDKGKTYPIAKDIREAMADFWGQLYHEGLISDKKYQRLIRQSGFSKEELADFILAQITETRQSTKAIVNLFREYFPDSTVIYLKNDFATDFRREMELPKHEIINNFDLAKDAYLNLVLGNVYTTRFTSNPLNFVENNRNYSLKMYQRRSDGSEVGMMMGKISEGNSVVWDPETSFDVVKRNYAINSVKCVRDAFRRKSGNNGGLFDNNPLRKGNGQTPKRKDLPVSKYGGYNCATISFYSLAVVKDVGPALFAVELLFAKEFLKSVDFAKKYAAKKISAQIKSKIGADDVRFPFGQTPNIIKANALLELDGYRITLGGKTLDNIIVYSAESLFVASEALSYADKIGKVVNRRRFNKGYKISENIGLSAGGNSELYDYMAQKCTSKPFSVLYNKAGHFFEKSKEIFEQLSIEEQVTVLAEMIKLLTYGRKGTIDLKLLGGSANACIKSIPMNLYKMKGYSSLRLINQSPTGLIEYRSCNLLKLTY

SEQ ID NO: 8228 - protein, 1457 aa, unidentified
  REGION 1..1457: note = Description of Unknown: Cas Enzyme sequence
MTSSRKILGLDLGTNSIGWAIVEQDGEDFSLNDQGARIFSEGVKSEKGIESSRAAERTGYRSARKIKFRRKLRKYETLKVLAKNDMCPLTLKEVEDYRKSGFKHYPVNPEFINWLRTNEEENKNPYAFRDKASREKTNQLEVGRALYHLAQRRGFLSNRLDQSDEGVLEENSPIVLSLIEDLENVQEIKETINNYFEDKGIFDETQTTGYIKDQDEGDKVLIKLYKTLFAILSKSQESIEITKQELIAKLSQKENLGIVKGAIHDLTAEMKDKGFATLGQLFHDRYSKSKIRNSYTSREEHYLAELEIICKMQGFGKINELEKLPEKRFDGLAKEFYKAIFYQRPLKSQKGLIGKCSFEPNRSRCAISHPDFEEFRMWNYLNTIKMAVNGERLQFLSQEQKESIIPKFFRKKDNFNFEDLAKELVPNKKTFGFYKSSKKVNFEYWFNYNSFDTVAGCPISAALKGVFGENWQSDKFNYQTLNAKGENVNRNVDYHDLWHLLATSTSDEYLIDFAASKLKLDSKQAKAFSKIRLKKDFASLSLNAIRKILPYTRNGLLYSHAVFMANLEKIVDKELWNNLESRLEVQQGIGNLIENHTFENAQLEIINGIIKNLIEDGGSFSIEAEPIFRDELKRKLEDFVKRFKIENELDKLELEMLPILLKQLKALEFVKIKRIDDKVKEFLLGENADGQVFCSDEKQFSKIYHPSDLEKFKLKEVVDENKNFIRHELGSPLSSSIKNPMAMRAIHQLRKVLNTLIADEKIDRNTHLHIEMARELNDANKRKGIQDYQNEIKKNRLSYIDEIKKLYLDETKKEVEPTEDDILRYQLWIEQNKKEIYEPSINGGKARSIGISQIIGSNPDYDIEHTIPRSRSQDNSQANKTLCGKHFNREIKKKLMPSELDNHELILPFVAHWRKEAELLQKEIDQISRRIKGATTKDAKDKSIRKRHYLNFKKKYLEEKYENFVRLEPKVGFKNSQIPDTGIITRYAQAYLKSYFKRVVSVKGGMVAEFRKQWGIQKSFIDEHGQKHYEQKDRSKHTHHTIDAITIACMTKEKYDVLAHAWTLEDEANKKEAKAIIEKAKPWKTFAEDLVKIEEEILVSHYTPDNLKVQAKKIMRIRGKKQFVAEMEKDANGKLKPKTNGNGKVIFKLDEKGEKIPRLQQGDTVRGSLHQDTIYGRVLDPETKEVRSVIRKSLESLKASDIDKIVDPEVKERVRQAIQEKVFVFSSSAQQANKIDNEIGVWMNKEKGVAIHKVRIYADSVKNPLEIKKHVEFSKSRHLHKQHVYGQNDGNYCMAIYEGRDKKGKIYRTAELVNNISAGDYFKPSDKNENNLPIVPETDSDGNLIKYLLTKGKMILMYNNNPEELSSMDVPMLNSRLYAITQLDVEDSCIKLLHHTEAREKKEITAFMGLKTGMKGGKNLDDYKSFPWIKISPNSFDCLVEGYDFTISTTGIINFLI

SEQ ID NO: 8229 - protein, 1379 aa, unidentified
  REGION 1..1379: note = Description of Unknown: Cas Enzyme sequence
MRKILGLDLGTTSIGWALVQEAETENERSSIIKAGVRVNPLSVDEQRNFEQGKSITTNAARTLKRAMRRNLQRYKLRRDNLLEIFKENGLITERTILAETGKNTTLQLWELRAKAAFEKIDLESFARVLLTINKKRGYKSSRKVKNEEEGTAFDGMGIAKALYDQNLTPGQYTLKFLKAGGKASPEFYASDLRDEFNSIWKCQKAFYTELTTELYDKLRGQNMGKTAGILKGDGWPMYEPKTKVRAEKVVEFLELRVKGVDQKLGLDELSEVFKELNSGINKTSGYLGAISDRSKKLYFNKQTVGQYLWQGLQSNRHYPTRGQIFYRQDYLDEFETIWEMQARFHQQLTPALKAEVRDVTIFYQRRLKSQKGLISFCEFEGKFIEVKTPKGTKKVTAGPRVMPRSAPLFQEFKILQQINGIRVKPKGEKIEFSLNEEDRMMLFEELNWCDKMTPEVVLKKLGYKKEEAMLNFKGIDGNRTNAALLAAYEKILELTGHDIELAKLSIKEKLKAIAEVFDSLGISADILKHDALLDPRSYDQQASAQLWHLLYSFEGDDSKTGNEKLIDKLHEKFGFPAEVTATIANVSFLDDYSSLSAKAIRKLMPHLIAGLLYNEACDKAGYNHSHSETAEARDNRPLKDKVELLRKNSLRNPVVEKILNQMIHVVNAVIETYGKPDEVRIEMARELKNNAEQRQNMFEGMNKAQKEHEQITQILQKEFGLQYVSRNDIIRYKLYQELRHRGHKTLYSNQPIPAEKLFTKEIDIEHIIPQSRQFDDSFANKTLEYRSVNEKKGNRTAYDYIAEEKGEQGLKLYEAEVHELFKAQGINYSKMNKLLRQGNDLKEGFLNRELGDTRYISRKAREILHEAIRLTNTTSGSVTSRLRKDWQIERVMQELNWDKYEKLGLTYYEENKEGKRLPRIRDWSKRNDHRHHAMDAITVAFTKPSHVQYLNNLNARHGGHKETNSILGIERKELDRLNDGKLKFKPPMPADEFRREVKEVLASILISHKAKNKVVTRNINKIRTASGIQQQLALTPRGQLHNETIYGSAKQYVTKVVKVAGNLDETTIFQVAKKQHREALLARLKAFENDPKKAFTGKNSLDKNPIWLNESHTEEVPDRVKLVSLETIYTTRKLVAPDLNVDKVIDVQAKRVLEKRLADFGGDPKKAFSNLDENPIYLDEKRTTPLKAVKITGIANANALRPSHDHLGNVVTNQNGQALQSNFINTGNNHHIAIYEDEAGNWQEAVVSHFEAVTRVNQGLPIIKTEHEQGWKFVFTLKQNEMFLFSEASMELNFQNFSEFGHVEFAELSKRLFRVQSISAKDYMFNHHLQTLAVDGDMLKNQKSLDGITYKRIRSTNQLKGFVKVRIGHMGEIVQIAIS

SEQ ID NO: 8230 - protein, 1016 aa, unidentified
  REGION 1..1016: note = Description of Unknown: Cas Enzyme sequence
MAGMRYRLALDLGSTSLGWAMVRLGADNAPCAVIKAGARIFSDGRNPKDGSSLAVTRRDARAMRRRRDRLLKRKARMMRTLIAHGFFPKEADERKALETLDPYELRSRGLQSVLTGPEFARALFQINQRRGFKSNRKTDKKDNDSGALKTAINTLRAALKSDNCATVGQWLYQRHLAGHTVRARFRQNKVIKDDGKTRIDKSYDLYIDRAMIENEFDALWAKQTELNSTLFTDTARAELKDCLLHQRPLKPVKPGRCTLLPDEERAPLALPSTQRFRIYQEVNNLRILREGLKEEILTLAQRNELVQALEENSKRSFTQIKRLLGLSGSVQFNFEDPKRQELKGNTTSAILDGKANFGSAWFGFTEARQDAIVLQLVREENEAKLIAWLQTETGVDERRAEDIANQGLPEGYGSLSAMALSRILPELRRDVVTYDKAVLATGFDHHSNISPAATGEILPELPYYGEPLQRHVGFGTGNPADTPEKRFGKIANPTVHIGLNQVRLVVNALIKRYGHPSEVIVEVARDLKQSQEQRKEENERQAKNQRRNERIRADVAGVLQISIERVKATDIQKVILWEELSFDPAFRRCPYSGVQISEAMLLSDQVEIEHILPFSETLDDSLNNKTVALRTANRVKGNRTPWQAFGAQSNAGFNYAEILQRAEQMPMQKRYRFAEDGYQRWLRDDKGFLARALNDTRYLSRVAREYVSLICPQNTRVIPGRMTAMLRAKFGLNDVLGTNGIKNRNDHRHHAVDACVIAVTDQGLLQRFAKASASAREQHLNRLVETMPDPWPTYRQHVQRAVNNIWVSHKPDHSHEGAMHNDTAYALLGNGRVSVHKIVDGVRTRVEDNLKVIEFSNAKMPERHGLLPNGEPRPYKGYKGDSNYCIEIIRNDKGKWDWEVVSTFDAYQLVRTEGFHRLRQSSISTSGKPLVMRLIIGDYLRATFKDEIRILTVKKIKSNGGIFVAQHNEANVRQREDEKDKSLIYGSFAASTLQKASGRYVTISPIGELNDPGFKE

SEQ ID NO: 8231 - protein, 1019 aa, unidentified
  REGION 1..1019: note = Description of Unknown: Cas Enzyme sequence
MRLGLDIGTNSIGWWLYSLKAGEITDVVDGGVRIFSDGRDPKSKASLAVDRRAARAQRRRRDRYLRRKAALMKRMAQAGLMPADPGEAKTLELLDPYQLRAEGLDRELQLAHFGRALFHLNQRRGFKSNRKTDRGDNESGKIKDATARLDQEMMRKNARTYGEFLHMRRASATDPKRVPTVRTRLSVAARNDGEKEEAGYDFYPDRRHLSEEFEKLWAAQAAFHPDILADELRDEIALIIFHQRPLKAPEVGLCLFTDEKRIPSAHPLNQRRILVETVNALRIAARGEPARPLTIEERDQILHAVDNKKHTKTLSGMSLKLKALGKVIRLRPEQHFTLETANRDAIACDPVRASLSDPRRFGPGWSALGVDAQWQVIERVRAVQSEAEHDALVAWLQNAHGFDREQAEGVAYAPLPEGYGRLGLTATSRILAALETDVIPYSEAVARCGWHHSDERTGEVLTELPYYGAVLDRHVIPGTYDAQDDEITRYGRITNPTVHIGLNQLRRLVNRIITVYGKPDEIVVELARDLKLSEDQKSDVQRKIKKNTEAAIRRGKKLEELGVPNTGANRMVLRLWEDLGEDVMTRNCPYSGQRISAAMLFDGSCDVDHILPYSRTLDDGFANRTLCLKEFNRQKTNKTPWEAWGDTDQWEAIAANLKYLPKNKAWRFAPDAMERFEGENDFSARALKDTQYLSRISRAYLNALYDGGDRKSHVWVVPGRLTEMLRRHWGLNSFLPDKEGAVKAKNRTDHRHHAIDAAVVAATDRSLIKQISDMAKRDEITGAEDVARSVAPPWDDFRDDIAQQVQQIIVSHRADHGRIDPAARKAGRDSTTGQLHNDTAYGLADGDTVVSRKPLLSLKPNDIAISKRGANIRDADLQRHLSRVTRGLEGKAFEQALSEFANTPKLPDQSDNPYFGLRRVRLEETLQESARVSVADRDGTLFKAYKGDSNHCYEIWRMPDGKLKPQVITTFEAHQSGPARRPHPAAKRLLRVFKRDMVAVERDGRTIIGYVQSLHVANG

SEQ ID NO: 8232 - protein, 1362 aa, unidentified
  REGION 1..1362: note = Description of Unknown: Cas Enzyme sequence
MSKVIDFDKANNKSKSRYIRKNTEYFIGLDIGTSSVGWAVTNTKYEVIKFNGKKMWGSRLFAEASTAEDRRVHRTNRRRLQRRVDRINLLEEIFSEEISKVDPEFFIRLKESKFHLEDKVIDEKNIIFKEKEYGDKKFYEKYPTIYHLRHALIEGCDDIDIRELYMAVHHIIKYRGHFLFKGDISDSGSSINDKIVEIIDLMSSVAGMKRLEYNDKLINEIRNIVSNRDKTINDKKKDINKVFGGNDYKAYKSIFSLAVGASVKPYDIFLEEEYKDLDDVKSMSFKNTEYEEVRDTYEQAFEDRIILIDAAKSLYDMIVLLSIKPEGKGLSENKVDIYNKHHEDLEILKEVLRKDKDLYNRVLRDDKKDGTNYVNYIKKSKYGKGCSREDFYKLVKKALGELESNEKIEYILSEIELERFLSLQRLKENSVIPYQIHRDELKKILANASSKFEFLNKESEGYSNIEKIIKLMEFRIPYYVGPLNNHHSVDNKEKQGFSWVVRKGPGRVKPWNFDQLVDKEASAEKFIKNLTNKCTYLIGEDVLPKESLLYSEYCLLNELNNIMYDGKKLSLEVKNDLIEKVYKKEKKKLTKKGIKDFLKHNNYADGKGEVTGIDIDIKSDLKSYRDMVKIFGAGFNHKMAEDIIRWVTLFGESKELLLSKVKNSYGNMVDAKQLKMITKLRYKDWGKFSGEFLTEIRSDILIDQSTGQGQSIIEAMRTRDHVLMELLRNEYDFSKKVEDINREKQKNISEISHDLLDDLYCSPAVKRSLWQTICIVEEIKKIMGHEPKKIFVEVTRTNKAEKKRTDSRKKRLLELYKNIQDDARSWIDEIEKTEDSKFNSKKLYLYYTQMGKCMYTGNSIDIESLFTDMYDIDHIFPRSKTKDNSFENLVLVTRKANEDKGDIYPVDSSIQNGRISLWRSLHEKKLIGDKRFERLTRNYGFTDEELSRFIARQLVETSQASKAAAEMLNMINEGSEIVYVKAENVSEFRHDNEFIKVREVNDHHHAKDAYLNIVVGNVYNEKFTKNPYNFIKDGGRKYSLNKVFDFAFSKGGRTIWDPAVSMDTVNRMMRSNDVRVTKKVIEQKGALYDATIYKASIAKEESYFPLKLGDERLRNVTKYGGYTSIKIAYYTIVSYDEIGGKKRESFVRIVPIPIYVSESAHKFDEIENYAYNYVINKSKKSIENFKLIYKRLYLNSVIELNGFKYYVGGKTNEKIYIDSAIDLILDKDNTKCLTKIVKFYKSDFKKMDEEYVNFDNNMKLFDYLVSKKSTLYYINKKSNKLDEFRKENTLNKFRELLLEDQCIVLLEILNTLTDKKTTYDLKKIDISVSRSTVGMKLNENMRLKVINQSITGLFENVIDILG

SEQ ID NO: 8233 - protein, 1101 aa, unidentified
  REGION 1..1101: note = Description of Unknown: Cas Enzyme sequence
LGCPPARSLIKLPLLELWELRARAATPSEQLSLAELGRVLLHINQKRGYKHAKADEAAEAEAESKSKKEKEGYVAQVKGRYQALKEKGQTIGQHFAGELRANQQTAPKGVYYTYRIKEQVYPREAYIEEYNQIMKVQRTFYPELLTDALTDRIRDRIIFYQRPLKSCKQLVSTCEFEKKERVVQVKRINKEGVEELVERTITIGPKVAPKSSPIFQVCKVWESIQNIRLYYPDGTERKLEQEEKQKLFDYLQKNDKLSLTALRKVLKIKPKEKLWCDKLLEKGIAGNTTTAILRKALKGYEQYEGLLRFDLTIRDGHKADEDGVIRPIVDESYQNEPLYKLWHILYSIEEREDMCRALVGQLGIKREDLDDGLMDALYKIDFVKQGYGNKSAKFICKLLPHLQEGKMYSEAAEAAGVRHSDSMTAKERDERSLLEEIPLLQKNALRQPVVEKILNQMINLVNALKREHGEIDEVRVELARELKMSREEREETTKSNNAREKENKTKAEDIKEKHGLTPTKSRIQKYRLWEESGGCCIYCGKHFGVVQFLRGEEIEVEHIIPRSILLDDSMSNKVCACRSCNQEKGNRFAMEYIQSKGWEQDYIKRVDSLFEGKKISYSKRQRLLMLPKDLPEDFIERHLRLSQYISREAQGILRKGIRLVSASEGSVTAKLRQLWGYDNILRDLNLERYRSMGETEVVTVEHRDGERTDERIKDWSKRKDHRHHAIDALVVACTRQSYIQRLNRVNAEADREEMDAFIKEQQQKPTHSKGEKLSLLENWLIRQPHFSTGEVMKQAEGILVSLRPGKRTISRGRNIYKRSGKTDVQRGVLIPRGALSEETIYGVIRVNGEDKVVCKYPLQSLKPKDVEFIVDKALRDKVRKRIDQRGEKEAFAEPLYLDEAQTQEVRSVRCFTGKDQAKLIPLRYNDESEAVGFVAPGSNHHLALYRDVDGRLVESVVTFWQAISRIRYGLPAIVTHPREVIEQALSIPELPEEVLGALPKSRWRLMEVLRINDMFLLGMTDGAIDRAIEGEDYPTLSRHLYRVQKLTTHDYVFRYHLETTLDGKDNVGDIPSSYRITSQKRYVKLNPRKVKIDLLGRISLA

SEQ ID NO: 8234 - protein, 981 aa, unidentified
  REGION 1..981: note = Description of Unknown: Cas Enzyme sequence
MLTIVLGLDLGITSIGWALVNVDDKNIENNKIIDSGVRIFTIAEHPKDGKSLALPRREARSARRTTKRKAQKLRAIKRLLLRNKILTQNDLDTLFIANKGQKDVWDLRREALYSELDNKELSRVMIHLAKHRGYYSNRKSDEVTDNEGKAVLSAIGHNKTILESSKFLTAGEYISTKKKKRNGKDSEGKLNYENSVARSMLVDEIEIIFGKQKEFGNSFVSDELLETYKELAFEQRPLKSVAHMVANCPFEVDEKHASKSSYSFEYFRALQKLKNLRVIDETGYEMPLVFEQIAQVIHKAKTTTKFTYKSFKKLFPQYKEMKVKGLTYHDHKTGEIKDPEGVKFLDFSAFQKIQKAIQNADNLYWNTIENDYEVLDAIAKVLTTEKDDNESLKQLKEIVESQKVCEALLGLSFSGFGHLSNKALRNIIPFLEEGEDYDKACKKASYDFKAIFEGEKTLLLPPLSKQENIEMTNPVVKRAVAQMRLVYNAIARKYGAIDTIHVEFTRDIKKSYKDRNDINKAQGEFRDKKEEARVHATEILGHEPSAKELLKFRLWKEQNGECIYSGKEISPDILNDPYATEVDHILPYSRSLDDSLNNKVLCFTKENQEKGSQTPYEYMSQEKFNEFEQRVKGYKNIRQAKQGRLLKTNFDESSELAFKDRNKNDTSYISKFIKNYMEAHIAFKDSKGKHHIFTMNGMLTSQLHYKWGVGDKNRENHLHHAEDAIILAFSTQSMVQKLSSVSAKREGYIYESREQKSKALRFVTPLEDFGVRVKESLSDIFVSHMPRRKVGGAAHKETIYSDKTLSMKKENGKVEVLKGGSVINNVRLKHGIALNNGMPRVDLFQNKKTNKYYLVPIYVSDFVKDKLPNKAIVAHNKPWIEMDDEYEFKFSFYKRDLIEVKSKKTATKESVQLLGYYDSTHSGTAKIMFKEHDGSKEYGFGAQSLVFIKKYQVDPLGNYVEVKSEKRQGSIKEGRQRKNKS

SEQ ID NO: 8235 - protein, 1288 aa, unidentified
  REGION 1..1288: note = Description of Unknown: Cas Enzyme sequence
PKKDKEGNIRRNFRAVDSENDWIAIKKKTEQDIQYTEKTVGQYIYDSFLKNPSQKIRGKLVRTIERKFYKEELKEILSTQAKFHSEFKNRDLYEACIEELYPNNESHKENIKDKDLVYLFLEDIIFYQRPLKSKKSSIANCQYETRTFKRFTTKTENGQAIGREEIITEPLKGVPKSNPLFQEFRLWQFLRNLRIYQRVAEVDGKTEIDINVTHIFLPDDESWVELFDFLNSLKQVDQNQLLDYFVKRKLLTKKDKSNYRWNYVEDKKYPCNDTKAQLISHLGRVEEIDAEEFLTKEKEHHLWHIIYSIRDKKEFEKALKTFAKKYAIDVDSFFEQFKSFPPFKNEYAAYSSKAIKKLLPLMRQGKYWDEDNIPNEIFGRGSAIIERLQSVDFNPGKIDETIADDDIPKPVLKSFAKVGINNFYRGLNTYQACYLVYNRHSEISDLMQWTKPEDISNYLAEFKQHSLRNPIVEKIVTETLRVVKDIWEHYGNSSEKFFDEIHVELGRDLKNPASKRSEISSKIAENENTNSRIREILEELKTDSDIQGDVRPYSPSHQEILKIYEEGVYQNPKANYQSLSLDDVEKIRKNSSPSKSEITKYKLWLEQGYVSPYTGKTIPLSRLFTTDYEIEHIIPQSRYFDDSLSNKIICESEINALKDRRTAYEFLKDENGRIVELAGGKSVKLFSIKDYELHCNDYFQKNRTKLKKLLSEDIPESFIERQLNDSRYISKLIKGLLSNLLREYNEHEATTKNLVPVSGAITSMLKNDWGLNDKWNDIVASRFQRMNELTQSSDYGNWDENIKAFRTTVPLSIAKGFSKKRIDHRHHALDALVIACTTKDHVNYITSLNTQRNNYSLVNKLRHVEKRQYQDRKTGELKTRPVPGNYLLPWNSFPADAHAWLAKTVISFKQNLRIINKTNNKTWQWVRQNGRLKKELVPQNKGDNWAIRKPMHKDTVSGNVNVRIKKEVSFLNGIKNWESLVDKDLKKIIRKFKLEGKSDKAISQHFRDNPYLYDNKPVSKVEVYSFTQNATATRVTLSDKFTVKQLENVTDSGIRTILKKHAESFVDEKGKEHFELAFNPEGLEELNSNLTRLNNGNEHKPIYKVRIYEEGNKFQVGETGNKKKKFVEAAKGTNLFFAIYWNEEKQKREYETVPLISVIVHQRWRASLPKEEQKITPVIPLNHEKGKFLFSLSPNDLVYVPTEEEQINPGMVSLENLTAEQNNRIYKMMSCSTIQCFFVPNHVANPIHNKVEFSSLNKMERTTDGIMIKECCWKLKVDCLGNIIKVYK

SEQ ID NO: 8236 - protein, 1516 aa, unidentified
  REGION 1..1516: note = Description of Unknown: Cas Enzyme sequence
LKTKLKQDKMKTILGLDLGPNSIGWAKVEVDDEGNYLRNIKLGSRIIPMTQDMLGDFDKGVKVSQTATRTDFRGNRRLIERHLLRRERLHRVLHALKFLPKHYEDAIGWDRNEPATYGKFVNNSEPKLAWERQEDGSMRFLFMESFNEMVADFAQNQPSLVSDGKKIPLDWTIYYLRKKALTQPIKKEELAWILLNFNQKRGYYQLRGEEEEDNLTKRKEYYKLKVVGVEADGAPKGGKTWYNIHLENGWTARCQSKIPLDDWVGKVKEYIVTTEYEDDGKTPKCDKEGKVKRSFKSPEKDDWQLIKTRTEKFIDDSNKTVGAFIYDHLLEKPFDKIRGKYIRTIERKYYKNELREILREQAKYHEGLDSLEALKICAEELYKNNQQHREYLLKKDMIFLLLNDLIFYQRPLKSKKSLIADCPYEVYKYDDKLTGKKGQKKIKCIAKSNPYYQEFRLWQFIANLRLFSVTDGKEVTAEYLKTEEDYVRLFSFLNDRKDIKQETFLRSFLKLKKVPIGSEKIYPIRWNYIEDANKSYPCNATRHELLLAFDRADIPRKLLDVEGREYRLWHLLYSIEAKEETESALRKLKANKAFGDLNIDDDFVNSFLKIKPFEKEYGAYSEKAIKKLLAVMRRGSLWKEADICEATKQNIVKILQNDIDEKLKKKIEAAVSSFNKLSDFQGLPTWLACYVVYGRHSEAAQIQCWQSPEDLKTYINKFKQHSLRNPIVEQCLLETLRTVYDIWKDAGQIDEIHIELGRNMKSTAEQRARRTKDILRNENTNLRIKNLLVELKNDDKIENVRPYSPSQQEILRIYEEGALQELSKEDEMFEDISKISKMAQPSPTELSRYKLWLEQKYRSPYTGRVIPLSKLFTTAYQIEHIIPQSRYFDDSFNNKVICESEVNSLKDNMLGYEFIKECGGKKVYCTLLNKSVEIFTEEEYKTFVTKHYVGNPRKQDNLLLEDIPQEFSARQLNDSRYISKMVQTVLSNIVRSENEQEATSKFVVSCNGAITNRLKKDWGLNDVWSSIVCPRFKRLNEITKTNAFGHWEDKAGKHVFQTTVPLELQRGFSKKRIDHRHHAMDALVIACASRNIVNYLNNESANSPEKREDLRKKLCDEKRKIRKPWKTFTQDAREALSDVVVSFKNYVRVINKATNYYEYYSSSGNKVMISQKGNDMWAIRKPLHKESVFGRVNLRRKVIVSLKKALENIPTICDKTLRDYINALVEKHFNTRQLLAHFKSINYRLNRQCVDKVEVWQFSDEKIEMVARRKSLDTSFDDKQISSITDIGIQKILLNYLQTKDGNAEIAFTPEGIEEMNKNISLYNDGKAHQPILKVRVATPKGMKYPVGQTGNKATKFVVAEKGTNLYFAIYENELGVRSYDTIPLNIVVERLKEGLSPVPQANEADIPLKFYLSPNDLVYVPTKENEDELCRDRIYKFVDSSGTTANFVPHTSANTIYNVDKEYAEKCCNGAVILNEYGLGSSQSKNQKALDGEMIKEICWKLKVDRLGNIIKVIK

SEQ ID NO: 8237 - protein, 1448 aa, unidentified
  REGION 1..1448: note = Description of Unknown: Cas Enzyme sequence
RIKNLKKYKNMRHILGLDLGITSTGFCHIIEDENKKNSTIEEIGVRIIQLDNFVSTKTGEDSKDPSKDFSAGKGISSNAGRTRKRRARINLDRYQLRRRYLIELSLQAGLINSSTILAEDGKNTTHSTWQLRAKAAVERIEKDELARVFLAINKKRGYKSSRKVKNKEDGQIIDGMDIAKRLYDEDLTPGQLALQLFKEGKKQLPDFYHSDLQKEFERIWNFQKEFFPDILTEDLYKALQGKNKKDSSSIFYNYYHFNTAENRGTKEKTRLQAYRWRADALSKKLSKEEVAYVLAEINNNLNNANNYLGNISDRSKELYFNKQTIGQFLYAKLKENKHYSLKNQVFYRQDYLDEFERIWETQARFHKELTEDLKKQIRDTIIFYQRRLKSQKGLISLCEFENKEITIEKEGKTVTKQIGVRVIPKSSPLFQEFKIWQILNNVVCKKKGTRKKKAVTPAPLLFELFGTPSETFFSLDMECKQLLFEELNLKGNLKADKVIRLLGYIPQEWEINYNQLEGNRTQKSLYEAYLKIIEIEGYDIKTFLRIKSDKEDWYLEESPLSAKEIRENIQHIFETLGISTAILYFDATLPIKDFEKQASYQLWHLLYSYESDNSPSGNETLYKLLQDKFGFKREHAVFLSNISFQDDYGSLSAKAIRKIYPYIKENQYSTACELAGYRHSKLSLTKEELNNRPLKDLISPLKKNSLRNPVVEKGLNQMINVVNALIEKNSEKDAEGNIIKYFHFDEIRIELARELKKNAQERAEMTLNIKNATIEQEKVKSILISDFGIKNPTKNDITRYRLYQELAHNGYKDLYTNTYIPKELLFSKNIDIEHIIPKARVFDDSFSNKTLAYRDFNLKKGENTAFDFIDSSLGEEELNQYIARVENAFKTKNISATKYRNLLKKATEINDGFINRDLRETQYIAKKAKELLFQITRSVVSTSGSITDRLREDWGLIDIMKELNMPKYRDLGLTEIIERRDGRKVEVIKEWTKRNDHRHHAMDALTVAFTKPSYIQYLNHLNARKDENNKLYADILGIERKETTKIHDENGNEKRVFIEPIPGFRQIAKKHLEEILISHKTKNKVVTKSINKIVGTNKKQETLTPRGQLHKETIYGKYHYYSNKEEKIGSKFDKETISKVSNPIYRYALQKRLEANENNPKKAFTGKNALSKNPIYLDDAKTKILPEKVNLTYLEEDYSIRKNISPDNFKDLISIEKIVDEGIKRILKERLKTYNNDPKKAFADLDKNPIWLNKEKGISIKRVTISGVKNAQALHSKKDHLGKPILDKEGQEIPVDFVSTGNNHHVAIYRDQKGNLQEQIVSFFEAVVRAQQGLPIIDKTYKQEEGWQFLFTMKQNEMFVFPNEITGFNPSEIDLLDPKNKKLISPNLFRVQKISIKDYFFRHHLETNVETNNILKDITWKRGGLSLLKGIIKVRINHLGNIVSIGEY

SEQ ID NO: 8238 - protein, 1120 aa, unidentified
  REGION 1..1120: note = Description of Unknown: Cas Enzyme sequence
MNAMKHYHVGIDVGTNSVGLAAIEVNSKGLPLNILNNMVVLHDSGVDPGKARYETRLASSGSARRVRRMIARRRKRLQKLDRYIETQGWPLIDLSSLPDPYTPWKIRARLTQDRLEGEEQGRALSIALRHMARHRGWRNPYEEVESLHLPKEASKQFNDLKERVTKVSGVIFDEGATPAEVVCNVGLSPNQRLRSAPSTQYKDGAILAGEPVGGKPKEGLLGGKIMQSDYANELRKIGVVQGLSNEKVNELIDQVFASESPKGQAGKLAKRDELPGQEQYIRAPRAHPAFQYFRIVATVANLRIQEEANSKHKRLLSRGEKTKAIEFLMSADGSDGVTWSDVAKELGIERECLSITAKQGADGERLSSFPPLNSTKINILQSKVKPLIKWWKKASDNEQAALITALSYADKLADNQPGAETVRQFLSSLDEQLQEKIDKIPLPKGRAAYSVNSLQRLTRRMLEDSVDLFDARKREFDVENDWTPTPDPIGEPVGNPAVDRVLKIVNRWLLATTRKWGPPKVVNIEHIRAGFTSEFQARKYEKANKENRDRNLAILEELRDKYGTSGKIRREDIIRFAALRRQNCQCAYCGEAITFFDCEMDHIVPRKGQGSTNTRNNLVATCERCNKSKSNIPFSLWAENCSIPGVSVESVIDRVRTWIKDPELSPKQYNNFKRDVIERLRKTVDDDAIDNRSIESVAWMATELADRISSHFRGAGTDTQVKVYRGWLTSEARKASGFEGKVNLIGGRGKTRLDRRHHAMDAATIALMHQSVAQTLVERASIRESERLRRVVSSSWKDYRGAGRDKQFSYGSWLNSMNALAELFNRAISADKIPVTQNLRLRLGNGEAHDATIRSLELKRVGASWTMEEIDRASTPQLWLALTRQADFDKKDGLPKNPLREIRVKDQWFNAKENVALFPTKSAAVAIRGGYAEIGNTIHHARLYKLPGKKPTYGMIRVFAIDLLRAQHSDLFSSPLLPASISLRTAETKVRRAVEDGTAMYIGWLVDGDEIVLDPETKTFNSNKIGEYLSEFPGTKRWRVDGFPDKEKLRLRPLQLAGEGLPEDVSAGTEEILSPKGNGWRVAINALFKSSQLIVVRRTALGTVRKLSRRHLPLTTRLRG

SEQ ID NO: 8239 - protein, 1096 aa, unidentified
  REGION 1..1096: note = Description of Unknown: Cas Enzyme sequence
MMEVFMGRLVLGLDIGITSVGFGIIDLDESEIVDYGVRLFKEGTAAENETRRTKRGGRRLKRRRVTRREDMLHLLKQAGIISTSFHPLNNPYDVRVKGLNERLNGEELATALLHLCKHRGSSVETIEDDEAKAKEAGETKKVLSMNDQLLKSGKYVCEIQKERLRTNGHIRGHENNFKTRAYVDEAFQILSHQDLSNELKSAIITIISRKRMYYDGPGGPLSPTPYGRYTYFGQKEPIDLIEKMRGKCSLFPNEPRAPKLAYSAELFNLLNDLNNLSIEGEKLTSEQKAMILKIVHEKGKITPKQLAKEVGVSLEQIRGFRIDTKGSPLLSELTGYKMIREVLEKSNDEHLEDHVFYDEIAEILTKTKDIEGRKKQISELSSGLNEESVHQLAGLTKFTAYHSLSFKALRLINEEMLKTELNQMQIITLFGLKQNNELSVKGMKNIQADDTAILSPVAKRAQRETFKVVNRLREIYGEFDSIVVEMAREKNSEEQRKAIRERQKFFEMRNKQVADIIGDDRKINAKLREKLVLYQEQDGKTAYSLEPIDLKLLIDDPNAYEVDHIIPISISLDDSITNKVLVTHRENQEKGNLTPISAFVKGRFTKGSLAQYKAYCLKLKEKNIKTNKGYRKKVEQYLLNENDIYKYDIQKEFINRNLVDTSYASRVVLNTLTTYFKQNEIPTKVFTVKGSLTNAFRRKINLKKDRDEDYGHHAIDALIIASMPKMRLLSTIFSRYKIEDIYDESTGEVFSSGDDSMYYDDRYFAFIASLKAIKVRKFSHKIDTKPNRSVADETIYSTRVIDSKEKVVKKYKDIYDPKFTALAEDILNNAYQEKYLMALHDPQTFDQIVKVVNYYFEEMSKSEKYFTKDKKGRIKISGTNPLSLYRDEHGMLKKYSKKGDGPAITQMKYFDGVLGNHIDISAHYQVRDKKVVLQQISPYRTDFYYSKENGYKFVTIRYKDVRWSEKKKKYVIDQQDYAMKKAEKKIDDTYEFQFSMHRDELIGITKAEGESLIYPDEAWHNFNFFIHDGETPEILKFTATNSDKSNIVEVKPLHCYCKTRLKPIIGKKIVRIDKYATDVVGNLYKVKKNTLKFEFD

SEQ ID NO: 8240 - protein, 969 aa, unidentified
  REGION 1..969: note = Description of Unknown: Cas Enzyme sequence
VQKPNVALDPYILGLDIGVASVGWSRIACDPADAFKPASLLGAGAHLFEPGTEGSVADIDKGKDSPRNLQRRTARLMRRQIWRRARRKRVLLQTLIRIGLLPKPETLGLDAATDLRRPLDIDAYMKHVDAQLVERWMAVRKALGAGGHADQQRLCYLLREAAASRKVEKIELGRALYHLAQRRGFLSNRRADAGRKDDDTGKVKSAISELAQKMEAFAASGGVPTLGAYLASLDPDQQRLRGRWTARTMYLEEFELIWKTQTTAHGLTEPDKRDVHRAIFYQRPLKSQAGMIGHCTLIPSLKRCPLAHRINQRFRLLQAVNHLQIAPSSQPPRILTLKERETLLAALEREGDLTFARVRTLLSLKRGTEFNLERGDEKRIIGNRSDAKLRAIFGDRFDSFGDGDRDRMVEDLRSFREAEALKRRGQRRWGLTPEQAAAFAALDLEDGYASLSLAAIRRLLPGMERGLPYAVARREEFPESFRSVEPKDSLPPAIAALADLRNPAVARALTEVRKLINEATRRFGKPALIRVELAREIKNPRGVREKLTRQMRDREKQRASFAAAIEKEVGITNPSRDDITKWLLAEECGWTCPYTGKKISPTTLLGRHPQFDIEHIWPKSRSLDDSLANKTLCYHEENRARKRGMTPFEAYSADPARWEEIIARVRAFKGDLFTRAKKLAKFQEPSPDFEGFTNRHLSDTRFIARAAADYLGLLYGGRIEHGSDPTAPGIQRVQVTSGGLTAWLRSGWGIASLLGDTGEKNRADHRHHAIDAIVVALSDSRAVQTLARAATEADRLGKRRAFEHIEEPWPGFRDTVAQAIERIVVSHRQSRKVSGPLHDQSIYSKPFAAKNAKGQATQVHRIRKELHKLTPAEIRDDKIIDPRARAAIRAKLQALGKPSPSPQDIAKLFGDPANAPTLPGHAGSTLRLRKVRVLADAGRSIGSADHGTKRWISPSSNHHSVIVEVRDAK

SEQ ID NO: 8241 - protein, 1780 aa, unidentified
  REGION 1..1780: note = Description of Unknown: Cas Enzyme sequence
MKKILGLDIGTTSIGWAIVEAIDEKNINDLTGKIVETDINNERIGIHKDAVGVRIISQDTDNILSFNKGEKLIQGSTLTPTASRRVKRGGRRLKSRYKLRRGKLENILIFLGIIKDERYYTNERINDENGKRIKRGDGNDIGKAIYELRDKAIRHKISMPELGRILLHLNQWRGYSSDRFAKEEKQKFDYYTGKVVGISEQPFKIDYDKADKTKVNWFHYLITIELEEPIIIDSEKSITQFKDARLFVKEIEKFTIKKGEIITFKFIERDTKEKGKIIDSYYQIQPTIPDPTDWNYKYQMLQKTLNEWCSNGGNVGAYFYHNFYETQTIQRIRNHVVNRSWYEDELNKIWDVQFEFNKSFFEHLNIEEIVKVAFKDYQPILNDILKKDGIKEQLKCLIRDKIIFFQRPWQQAKKKGQCLFEKIKVKKERAIKGTGKKEIVEEYVGRTVIPRSHPLFQEFKIWQQINNVRLFYNGENGKIDLFESNETFKSNTGMDIKETKQKLFNSLQESKTISWRSFVKEELGIEPFEDLEDKSKRKTSKKGVNVETGEIDYTYYSVNFRKRKKDGTYEDIKLKGNTTKVSIKNILYDKSDNWFNQIHSEKQNISNIQLLWEIIYDITNSDAKKVALILKSHFDFDDVICSQLANLKLDDVGMASLSAKAIRQILPLISDGKDMTEKTLAKVNSLIALNNNEQEKSKDEKLESLKDFIPDKKARIRLSNFNTIEDFTYLNYWEASAVRYGSHSTKKSEANGRIKPVENHSMNNPVVEKIVNETIRIVNEINDTYGFDEVRIELSRELKASMDERQQIWESMDNNAKKNEWAKQMLRELKQALVENDRAADNIDSDTANKSNIDKIKIVEDVVKFKNANEYKLKEKEYRLSEPTKAEVKKYLMWLEQNFKCPYTNQPIPFTDVFARGKVVEIEHIIPRERYYLNSYINKVITWREVNQAKADYGNRTAYEFIVSKRKEEIIKLSNGKDVSLVLKESWESHVKSMFPKGGKQANLLRKEIPEDPINRTLNETQYINKKLKEKLGELVGEQKVWVTSGAVTDILRDRWHLNSIMKELMRYRFENFEIPTGKKIFKLKSLVEQQAMFDKIKTVIESPEDFEVYKIPSGKKFIEIKDIEELKKIQGELELLINENSIDPVKKIKPFDYATSDDAFETKNLTHYIKQFNNKSGNYEDKEVFEGYTKRLDHRHHALDAIIIACTKQNHIQYINTLNAINSADQESDESKKAKYQFLKEDICIGNSSKRFKTPWIENKFLPEMKKAMSEIAISHKNTRLLISPSKHRVNKDIKPNKIASIRGELHKETNYGHKNYFIEGGKTFINKLIPQILKDKVDNQLQTRVHFKTFEEIIKETVLKEKYQQILISLFQPYENETLNDKNCKEYSKAILKEILTKKLLINSQTNDSLLWLSTYSDKDKSARPMGLSMDLNKGDIIEKIADPRIKRLATYRFKYVNKQKAAIDKLDLETQEKNKCKREVETLKLYSNAIYEVRIKYDDADERLKRNEKPYQWIELKDYQEEDFNKIWYAKDKTTEIIKTKLKERNLEKLKQTYFSYPLFISAIPIEIKKTSLLFASKVYEITKGRYVDAVNVFMTYFFKEKGENRRDAERSIEFLKLLDAVRIVSFEKPDKLDYSTLISKPTCDLIFTLAKNDLVYLPNTRLTDEQLDDIDWNNKESLMPYLYIVKDMNPSRNEIKFQQFYKADSIKISEADSKSLFNNPELKEQIEGIKYGDTNMWKRCIKVFTDKLGKKIVPYWDFPNGCWDSVTAKKLGLVKN

SEQ ID NO: 8242 - protein, 1473 aa, unidentified
  REGION 1..1473: note = Description of Unknown: Cas Enzyme sequence
MERIIGIDLGTNSIGWAIREVDNELENQIVDKGVLTFDKGVAMKEGREFPLVQKRTESRGKRRNYQAEKYRKWELLECLIDNQMCPLTKEQLNEWRHYKKGIGRKYPQRKEFIDWLRFDFDGDGKPDFEQYGLSKHDNCYAFRWLAVSDNDEHQRYFKENKQLLGRIFYQLVQRRGFFNNGDAEETKMIEEGRPKKDSTGKVVKGEIEVVGIKVIDQLIKEHYKTLGAALYWGQKNNELEAINHNRIRNRFTYRHYFENEINVIFKNLSFDIESDFCQTIRKAITWQRPLRSQKGLVGYCTLDRPLKSKSGVYYKSGKKRIPLSHPLYEEFRTWVDINNLKIEPPIGVDKLTFLETVVFPMFNRATDLTYKGKEDKKTGKQTEKGIKDRIIDVGGTILSKFDMELDEENEGKKYKANVLLNKIEKIFGDNWKTLLRWDETLAGLDAQKKSGNYLRAEDIWHLIFDTTITKQQTIDLGGKLIPVLKKHFPEIDFDAKDFDSIKLNNGYASLSSATIKTILPYLKKGMLYSHAVFVANLENVFGNKLDDITIENIRNEYEDVLAKHKADKEIYSIVNGLISDRMNERDRMNMGGNYDLDDLDLKDIDDKIKDNLKTKIWNKKTTDQKQQFINDVSFLYQNYLRQPMGLDKGKQFLKLYRIEEKIIDLLKTKYNISGERINKYLWHPSEQEVYSPANIKADKDGVVYTDERGNEILFLGDPNPISRGFKNPMAMKTLQYLKKLLNYLLQENKINDQTKIVVEIARELNDTNTRKAIKRYQSDRATLRDGYKKLVTEYFNQAGDTNKNISPEMIDRYELWEEQNKRCMYCTHPIESTDVMNGTAQIEHTIPEGQSQCSELFNLTIAHQSCNATKAKRFPTQWKDNYELILHNIKFMYAKYMGFKDKHEATYAGAKKAATKESKDKQVQDRHYYKMYLTYWKKKYETFTIEEVTNQFRRQQLTDTQIITKYALPYLKTVFKKVEPQKGLITADFRKIYKIQERFEGKERTKHSHHAIDAAVLTLIPPASIRDFIRKEYYTAKEKNLPYHNKPKNWDNFHQQYIISIENEVLNNYQAQHRTLTSTVKYQRAKGTKIPLVVNKKTIYKTDKECNILYKKDEKGQLIFKRNHLGELLKDGQENNIPIALKEFKKAQGDTIRGQLHADSFYAAIKQPKYEFKNDKFIPLNDGNGNFIFQQNEKRGDDIFISKKISITDLNTYEDLAIIIDPNLRHYLQKMLASKDFAKEILQPIWAFGKKEDRNGNPINPLRHIRCKVKGGGGGFVTNPAIIRLRKEFLSHKPYKNQYYAQNGETVVCALYQALIEDKIFREMKTYSILDISSNQGIKNINEAVPVNFEKTIKKVAHLIPLLAALQSGQKVFFYQNEMEELKTINEMDLGKRLYLIVKFEDGKISFKHHINSMKEDDITKEMKRLNLPVTGASGIDFNSPIPKLRLSQGSLNIAIEHKHFDIKPDGQIIWKF

SEQ ID NO: 8243 - protein, 1177 aa, unidentified
  REGION 1..1177: note = Description of Unknown: Cas Enzyme sequence
MKKILGLDLGVASIGWAFIEEGPTTSLIKGMGVRVIPLSSDERDEFSSGSKISKNAKRRIKRGMRRNIYRRTLRKDLLKEFLKLNAMFPSEHMFDSVQRDALWSLRARAAVEKIELEELGRVLFHLNQKRGFKSNRKVDADESDEAKETEYKAEIRKNAEALKESGFTLGQWVNHNLQENSHFKLKGNIFPREVYIGELNAIWNTQTNHHPSLSPTLLSEVRDKIIFHQRPLKSQKALVSRCEFVKRTALVNGKRMDVAPRVAPRTAPLTQLCKIWESVNNLQFEDNYGKPVIPTLPARQKLVAELRHSAKVTSKQLLKILSLPSDLNISKLGEKGIQGDITFASISTVLARHESGKNLLQSIQLFNPQVVEVEMVDQDTGEMQTIREVSSEHENSDYFKIWHLLYSVEDENALSRKLKATYDLSDECIKELSKLDFAKPGFSNKSNKAVRMILPHLLDGHKYSTAMEYAGFRHSDFLDKAENEARTLLETIPNLPKNSLRQPVVERVLNQLINVVNEIIKDPKFGRPDEIRVELARQLQQSREERSRETTRISKLEKINSEIENRLREEYGMKRVTRSLISKYKMWDEMNGISIYTGKPITLSDFLNGRGVEVEHIIPRSKLFDDSQSNKTMAESWVNKAKGNMTAHDFMENAPVPGLLAFEEYIIRVNRLASLKDGARISRTKYKRLLTSESEIPADFISRQLRETQYITKKAMQILRLACREVHATSGGVTDFLRDKWGWNDVLKKINWDIYEAAGQTRVETAKDGKQIYIIDNWSKRDDHRHHAIDALVVACTKQSYIQTLNNLRKSFDRSESGQDLKTLDNPKLKEIAQLAPFSTDDVVKHTRPIIVSFKPGKRIAVRSTNKSTGHRQLIPRGALSEETVYGKIKIQKQREVPLNKSFDPNWLIVDKAIRKLVQHRLSEHGNDPSKAFKTPLCYDSSEKTPIKKVSIHFWEDEYVVKYPITTLKRKDLEYVVDPVVKEKLEEFFERFETEKEAIKNIGTSTIWFNEEKKIPIRTVRLRTGLGNLSANKSVHPSEVKGYVKPGNNHHLAIYEREDGTLFDKMVTFQEAFTRKTLGQPVYETHCEDGVLKWKFEQNNLFEILNKEGESKIYRVQNISKKSDGAITVFFRLNTETSLKDAEIYKSIGLYHSARNLSNLLTLKPFPISINVLGFEK

SEQ ID NO: 8244 - protein, 1540 aa, unidentified
  REGION 1..1540: note = Description of Unknown: Cas Enzyme sequence
MKVLGLDLGVTSVGGGLLTLPDKFEDWGKEGRIEWVGSRIIPVDGDYLKKFETGSEVETKAAFRTKGRGSRKLKQRYVLRRTRLLKVFKILGWVNKEFPENFKEKIRKEDGFKFNISDYLPFEQASIDEATKLLGAKNKEGKLACSEDWVIYYLRKKALTEKISLNELSRIIYMFNQRRGFKSGRKDLKDVTEDTGEKKRVEILAIKRVFQISEEKEKNGKFKFQIVPDNSNAKIPVEPWEELRFKKPEWEGKTFTLLVTEKNGKQNKPQTPKEDDYDLLLTALDNLIENSGKQVGEYFFDELVNDKNYKIRQQTVKRKRYQDEFKAIWEKQSQDDCHPELKDKSKLFEISQALYPTQTKAGSSKSKEILSNDLYRVIANDIIYYQRELKSQKSLISGCQYEKLDIERNGEKIKIGVKVAPRTSPEFQEFRIWQTLHNIKIYEREQSVDGHLRIDVDVTGLYVNNDPKGFEVKEKLFELFDSNGEVDEKKVFKSINETHSAKLTKETHRINLFYKKDITIKGNETKKLFRRYFDKANATAEGELVLNDPEKFNRLWHIFYSISSSDSNRSQKGIETALKNPKIKFGFTDETINALSTIPEVTKQYASLSTKAIKKLLPLMRCGKYWKWENIITKDQLKIQKIIKDGWDKINKETGEVVNERPFSSIEQVQGLATWMAAYVIYDRHSESVNTEKYTSYDQIDVMKLVPNNSLRNPLVEQIVRETLFLVKDLWKQHGQPDEIHIELGRDLKKNTLERAKISEANTNNQQEREKIKRLLKELLNDSFEEYLDENTTVSSRFETRPNPESPMDIEKFKIWKSLAGALPEDIATYFKEKDKKEKLPTNTDIKRYALWLTQNCKSPYTGNAIPLSRLFTTAYEVEHIIPRSKMKYDANENLVICESAINPEPYKGDRLARNFIHQFSGQTIKINNSIIKIFSEHDYENHSKATFRGKKLKNLLATEVPNDFISRQINDTRHITRKIAELLQPVVKNEHGLVFTIGSITSDLKREWGLTKVWKDLMRPRFERLEIILDKPGTLIKRDEKHPNEYHFHVPEELDFDLKRIDHRHHAMDALIIAATTREHIRYLNSLNAVDTSEDLKKVKKYLVKSKVRQFTKPWQSFTEDAKDSLAAIITSIKANNKVVSKPKNKYQKWEEKEGKWAKVLAKQEKPKDPSKKWLAVRKSMFKEPQGIIYIKEVYEEKNIINAIEIQMSRMKVQNTPAKDVASYIYDQEAREIVKNLILELDNIEAIKKHLKKNPLKNNDKKVYSFIKVAEFVPYASKRMSLNKKEYVEGLTEEKIRKDFPYPEKSRIAQLFINHVREFKNNPKEAFSREGLEQLNKKAISDPHIGKSIKKITRKESKSDDDKFGNRYVEIDKGANAFFIMYENLLTRERKEMHSLATHKAIERLVQGLPIADAKEGFKTIILSPNQLVYVPTPEEILNPESLDLETKDKKRRKEIFSKVYKMVSCSDRECHFIPHFVSTSIIATTELGSNEKAEKAWDGKIEYLPNSKGKLSRRNSGTIIKDVCIKLKVDRIGNISRA

SEQ ID NO: 8245 - protein, 1474 aa, unidentified
  REGION 1..1474: note = Description of Unknown: Cas Enzyme sequence
MEQKKIILGLDLGVNTIGWALVERDVEGREGRIIDMGVRVIPMDKTSRDNFSEGKGLSQAQERRMFRSARRNNQRYKMRRDKLVLVLDALGWMPDDIGYAITERKPGIPQVTIMPLKRSDDYREKEKGEAKREHTAMRVYELRAHGRKRAYDDGKELGRVLYLLNQWRGYQDIGMLNEEEKEKEKELAKAHEHPIHALKILDTRETAEVYRAKGKKSKIDRKIWEVTVEGATTRHWTVSLCKWWKDKTMDFQMIAQEDGSNELRLSGQTKWAKTMEQNEKDLGEQLIGEKLYALLLKAKDQYAPPLPEKRYTRQRYKEEFKGIWEHQAAQPGWATWMTDCPIDRLSTIAKLLYPLNADKQTELVKKGLLHVIRDEIIYYQRPLKKPQRQLSCPKEPFRILPDGSTRPNRPAPKSHPLFQEYRLWQQVQNMAVKSISQEAFNLTEEHRVALFEFLANTKKAEPKDVLKKVFGLDPERYELRIEDLDTERTLAAIRPALKEPKKRKKTEEAEADDKATIKTAADATLAAALREPYANETSRLLYTDLWHLLHTAGSSKAKQNALTGRDAHLKKPKEKKDADELLSADFIVALCKEPFEKGYAGYSQRALAKVVPLMRAGKYFREETIPAVVRERIEKVINAVDDETIGSRTREKFAALSSISDYRGLMAPDALELVYGSHAPPPREASWKKPSDVKLLQRGKLRHPVVEGVINEALLVVRDLWLAQQKENGKEWKYDEVVVEFARDLKNSNKEKEKFSEQNKTNRDTNDKAREKVRELLHREARLGEIERYKLWEEQGKKCMYSRETITCTDLFKPMYEIDHIVPRSRRFDDSYGNKVLCLALLNKDKGNSLPLVWFNRSSIYKRSTLEEFTADAEAMGKGKRTRLLALTVEDGHIERQMKETQYIVRGTVEQLGNLVGSANVRSTSGGITSYLRGEWEVDGILREANLWRYERLERILQERLGAPLQLIHEENGKKIISGWSKRIDHRNHALDALVVACTRQQHITYLNTLNRLKEDNPELHQHLRNDLIERKKEKNRMRAPWQNFRKDANDAFEGIITSIKVAADPVVKKKGKYRVAERREGRNTKSRWRSQPKHIAVLDELHLQPDGWIWRHTHKTAYDVLGGLKDLEATGMKALLTERMPVKADREALLTLLADNEWNIQEAKTKLGKPKAGKAKKVDDVVYKERWVVARKALMKLSNTDIRNNMIVDGAIRKQVHAWLERKNVPPEEAFADDNIKEFNYERAERKLAPVNKVRVYDSLLDGNTSRALLDRTNSYNDRLVVTKQKNFGVVLSDDRANGQRSDERINLFNAAKAVTQGKPPFNIQDGQVGYFTRVKQPVAVLPKDMDWTAFMQQDRKHRAARIYSFSNPQAQLRFRPHFFTDEIIVSSDEHKAAVRGIEEGKVEVFGDDKQKKEFKKQLGKLKKPGIGEFLEGTYGTARTLDDDQLDITKHCIPVTIDRIGRIVGPSLVRDRA

SEQ ID NO: 8246 - protein, 1408 aa, unidentified
  REGION 1..1408: note = Description of Unknown: Cas Enzyme sequence
LDLGTTSIGWAVINEAENEAERAEIIRTGVRVVPLSTDEQTDFEKGNPLTTNADRTQKRGMRRNLDRYQDRRDHLLDLLKTHGLISESTSLAETGKGSTHTLWQLRADAANKMIGLEQFARVLLTINKKRGYKSNRKAKDEDDGQAVDGMTIAKELYDNDHTCGQYGLQRLQAGKRHIPDFYRSDLKAELDRIWAKQREFHGELLNHELKDKIAGKAQKATWAILKEPWGLVGEKRTTKGFEKKVEDYQWRVDALTRELTLEQLAVVVQQVNGGISSSSGLLGAISDRSKQLLIQDLTVGQFLYAQIQQDPHSRVKGQAFYRQDYLDEFERIWEMQKDFYPQLTPELKHNVRDTVIFYQRRLKSQKGLLAVCEFEGTKQPVVDENGQPALTKDGKPKMRSVGPRVCPKSSPLFQEFRIWQVLNNVELTYEGSEGTGDERSENGIQRKGKAWCLGPAYKAQLFAELSWTKELSATDVLKTLKLKPKEWKMNFKIIEGNRTNQKYMDAYGAMLEASGHDDVDLEKLSAEERLKIVEEVLNALGVNTDLLHFDATLAGKEFEQQPAYALWHLLYSYESDNKSRTGNERLIKQLIAKYGFNRECAEILVKVHFEEDHGSLSSKAIKKILPHLKEGHIYDVACDLAGFNHSHSVTAEENETRVLISALEILPKNSLRNPVVEKILNQMVHVVNKVIEVYGRPDEIRVELARELKKSAKERAEMTSSISTANSAHDVIRKEIAKLHPFNTGVRITRNDIIKYKLYEELKENGYKTFYTGVFIPRDMLFSKDFDVEHIIPKTRLFDDSFSNKTLCEAAINRDKSSATAMDFMHTKYGADSDAVAQYTERVERFFKKTNPAKYKKLMMKEADIPDGFIERDLRNTQYIARMSMGLLRQVARTVTATTGSVTDRLRQDWQLINVLQELNWEKYEKAGLTYTETNKDGAAIGKIKDWTKRNDHRHHAMDAIAVAFTRPSHIQYLNYLNARRDEDHKKHKVIHAIEQKETDIDSKKKRYFKPPMEINLLRDQVKCHLEATLISFKAKNKVTTWNVNKSKTEKGYHRKKEQTPRGQLHKETVYGKQQVYVTKLAKVGPGFDQDTIAQVAKKSHRQALLLRLHASGGDPSKAFGGKNALSKNPIWLDEHHKEQVPEKVKLVAVETQYTIRKLITPDLKLDKVIDGRAKRLLQERLNKYAGDAQKAFSNLGQDPIWVNGKNGAQLKSVTITGVSNAEALHIKRDLHGKPLLDVAGKETPTSYVQTGSNHHVAIYRDSEGNLQETVVSFYEAVARRLQDEHVVDRTYNEVLGWVFLYTMKQNEMFVIPNKIAAFDPTMIDLMEPKNAARIAPHLFRVQSLSRSEYGNNVIRDYQFRHHLESQLLNAKELQNTTYYKIKSLKDLEGLQKVRIDHLGRIVHVGEY

SEQ ID NO: 8247 - protein, 1130 aa, unidentified
  REGION 1..1130: note = Description of Unknown: Cas Enzyme sequence
MKRTLGLDLGTNSIGWAIIEQEDGVKKLAAAGSVIFPEGVARVKGNETPAAAERTQSRSTRRLYFRRRMRKQRLLHTLITNGMCPLSAEGLKNWKAKDRYPMEDGFIAWFKMNPYELRAKGLQEKLAPMELGRVLYHLTQRRGFQSNRKGGDQGDQESFNDGLEDKGIAGYNDTKELIAKYGTLGNAGAVLGKDHIAIRKRYFKRGDLITEFTLLWDAQKVFHPALTDKLKAEIGDGKSGDIFFQRPLKGKKGDVGRCTLEPGKQRAPISSIQAELFGVLQTINNIKVDGKNLDEKGRNALLPVFFRRSESTFPIGDIRGPLKKAGFTGTLNYEKWEIRAKKEEKEVKLTGGKTIAHLAFLWKADVLSIVEAFGAMTEAGQAERKKWEDRWSVIYNAVDWADISERKAKGEYVKREGSVRDQRDLKEYATTVWGFDEEQLKTLDKFDPKQGYHSLSTRALGRILPYLYQGIPYHYAVLYANLPTVFKVVHKSADGKTVTSIDDRWGKMTEAEREAVRAGVREQVHGHRQYNVEMLLQNGLIRHYRDMYGDEGNRKNFWNAEWEAHLEHSIAETLTLDQKRSMGEGAVSAMRASTKEKFLHHIENHAKVQFEELMRMEGRIQFWLLDNYPDMDLGKTVDKHGRVRRVDQLYHHSAIDIYPERNDKLGDPKTPGLKNPMVYRALHTLRMVVNKMIDAKLIDRKTHVNIEMARQLNSANHRRAWERYQAVMRKKNEDAEKAVREHFATMGRHSNPTDEDIERMWLLTEALEVFGKLTCVYTGETFGVPDIFNGEMEIEHTWPRSKTVDNSMANKMLCRARYNREIKKERMPALLPNYAKDAMVLGKMLPAITLTAEPILKLYEKYDRIVEACKMRSKGAATKEQKDKAIQERWFNQFFRDYWRTKYEHLSAEEIKPGFKNRQLVATGQISKLARAYMNSYFNRVNCLKPEALSAFRKEWMGESFVQAKDRSMHTHHAVDAAVCAAVDREAFDALAHHYEEHDEKDVTASFDHPWDSFGTDMRSLRESALVYHVRKPSIGRTSVYQKKVKLKDGSVVNALAQGDTVRGSLHKDTYYGKIKLKKPGTEEYEEHVVLRKPIVGMSKADMGKVVDPKLREALLEADPAVIENKRGLP

SEQ ID NO: 8248 - protein, 1074 aa, unidentified
  REGION 1..1074: note = Description of Unknown: Cas Enzyme sequence
MGNNKESNIWAFDLGLGSIGEAVRVGTEFKHVASLLIPPDFAETKTAAGRRRMMRTRLAHKAREDWLDVVWREAGLEPLQKRRPYQDPVSKKWIPEKCQKGDARLEREFAGEGDDTCYTSCLLRIKLLRGEKLEPWQIYKALHSAIQKRGYDKDVPWKRAEAKRAGKKMEDLEKDEARAEADLAKKDPAYRTALEAWKKFKSETPVDYHFSCYYDALKMRLWNPAQPDELKSQIDHTAESTRNIRFDRADIAKEIRELATAAGKQIPALKDKADYLLYGPAEKPYASHYPELRKKYDLHLGGKDDWQGVLGQKIPRFDNRILNDCALIPRFHVCKADDPLVREVTYLQKLKNIKVERCGFQQKLTSKDLNILFGDSKPATFSFTATQWKKWCKDHSYVPLPGNEEIAAPKTNGRSRFSRPALRLVKALILSGDAPMDFYHKNKTTVGKNSDPKKGLVLADLKFIADLGDQHWENFYLPEQKLDAIEAQHTQNGILDNEAAIRVVIGSINDPIVRHRLTIFNQRLQILEKIHGTPDEVVLEFVREDFMGKKARRELSNFQKTREKERKLAREEAGQFSESKSAPLKLELLRQQVRQCLYTGEPLIEALLDDYEIEHIVPRSLGGPDAMVNYVLTTIKTNEEKGEHTPYQWLHTKNGWDAYKARIEKSPINNKKRQLLLREDAPDLVQRYTALAETAWISKLALKILSLRYNWRNGNDREGTKRITVVSGGLTARIRRKFKLNHVLNPKAATEEEAEKKNRDDKRHHALDAMVISFIPSWMRDLSKQHFFRFPEEVQKNPRGFFEKRINEVMPKNLAFEKPKFAATAYGLRFDHAGHEFIAQRTLIYKLAYTGQPQKFDLKYLEGQIESVSEPRIRKLILEVYKFIKQTSKDQQERVWLEKSKMIPLSCKSGKQGSRIIRVTQSSPRSAECVNLSKTNDHGSFYKPSGSHVGQFVTRLDGNYTVHPVYLHESKSAKRCKLKERKLIECGYFQTGCLVETTKALTKENYKLITQVIIDKKKKPRRITPEIDLPPTQFIWKTIITKDANVELAMANGDRIATHFQNLHDAGIRRLKLP

SEQ ID NO: 8249 - protein, 1065 aa, unidentified
  REGION 1..1065: note = Description of Unknown: Cas Enzyme sequence
LRLSKFNTASDFTYLNYWEATAVRYGSHSTKKGMAIGTVKPVERHSMNNPIVEKIVNETISVANDIKQKYGFDEVRIELSRELKASMNERQQIWEAMNNSAAKNEWAKQMLRELKSEFAELDTDSSNKNNLDKIKIIEDVVKFKNAGDYKLKEKEYKLSEPSKAEVKKYLMWLEQNFKCPYTNKPIPFTDVFARGKVVEIEHIIPRERYYLNSYANKVITWREVNQAKANNGNRTAYEFIVSKRVEEKVKVGNNEFSLVSKEGWENHVKSMFPKGAKQNNLLRKEIPEDPINRTLNETQYINKKLKEKLGELVGEQKVWVTSGAVTDILRDRWHLNDIMKELMRNRFENFEIPTGKKSIKLKTLPEQQIMFNNIQKVIDNPDVFKVYKIPTGKKFIEIKDIDKLKKIYTELEILLKENAITANKKIKPYDYSTSDEAFETKSLTHFTKVYNNKTGDYEDREIFEGYSKRLDHRHHAMDAIIVACTKQNHIQYINTLNAINSSDQESDDSKKAKYSSLKANVCIGNSSKRFKTPWIEDKFIPDVRKALSEIVISHKNTRLLISPSKHRVARDIKPNKIASIRGELHKETNYAKKNYFEGGKTNIDKLIPKILKDKKENQYQTMVHFKTFEEIIRETVLKEKYQNILIPLFEKYEAEQLNDNLCKIYSKAILKEIETNKLLINLQTNDPLQWLSTYSDKDKSSRPNGLSMNLNDTKEVNSIADPRIKRLALYRLKYVNDKKAAIDKTDNEVSEKNKAKREVEILPLYSNAIYELRTKQEDGSYKWIELKDLTQIDFDKIDYSNLNDSKYNKKNNTQKVKVLILARGLELSKRSYFEKPLFISSIPIEVKKARQLSYYQNLYEVTPKRYVQVEETFMTYFFQEKNLDDKTKKPLIPKFLKFIDAVNIINVEKPNNIKYKNLIAKEKTNEELQNGIQYDLKFTLAKNDLVYLSENILSEEQELEIDWNNKNTILQNLFIVKDMNPSQKVIVFQHLYKADSIKISEADSKSLFNNSELKELTEEIKYGTVPMLQRCIKVFTDKLGKKIVPYWEFPNGCWDKEKAIELGFI

SEQ ID NO: 8250 - protein, 1017 aa, unidentified
  REGION 1..1017: note = Description of Unknown: Cas Enzyme sequence
MNRYTLGLDIGPTSIGWAMIDDDVGTPPTAGVRIFPEGVKREKGDAEVSRNADRRLARAIRRQIARRAARCRRVRDILQQAGFWGDDAARAIIDPLQARRRGLDHPLSPAELGAALAHMAKRRGFKSNRKLATDKEDGPVLKEIAALQRELDAAGSRTLGEYLAVIRDDPHARVRMRRTLRAMYEHEFEVLTKKQAEFHPSLVAPYAGLDGATPRDRLRDALFFQRKLHPVSRGRVGRCPLEPRERRCPSGHRVAQRFRIVKEVNTLRVADGLGIERALTPDERAAVITLLCSSQKEKVTFNEIRKLLGFHENQRFNLERGERDSLKHHASDAELRKGGKNATFGRRWDTLPEADRDEIVAALLESESAEELQRLGEHHGLDAEAARRFALLQLDRRPVRLSRKAMSRLLPAMEEGAREDEAAAAFAEYERIDGPVLDRLPPPPEELRNPIVRAALFQLRRLVGAITREHGKPAAIHVELAREAKGSPADRKRRSVEMAGRRRQREAAADELRSAFGLARPSRADLERYLLWKEQHEACPYTGDRIGLAELLGPDVEIDHIIPYDRCLDDSFANLALCRAHANRDKGNRTPHEWLADRDPDRYEAMLHRVEPLARDGGRGKARRFAQQHAAPDDFLARQLNDTAYIAREVASYLRRLGVPVVCVRGGTTAELRYRWGLDTVLRDDGLALKNRDDHRHHAVDAVVIALTTPRHLQALAKAGKRRRRTGEEDGGVVLPPPHDGFRDEVAAVVRAINVSHRPRRGVGGALHEDTFYGKTEVPGTFVHRKPLGALTPAMVEKIRDPAIRRIVETRLREHGVEPGSKAAIPSAAWSQPLLMPSGVPIRKVRVLKEDGTIVPIRGGAAHVKTGSNHHVCIFAFTDDKGREKRESVFVSRLEAARRLRLRQPVVVRTHPTRPDARFVLCMCPGDTVLMDVTPEGENEKVERLMIFRSGTSTQGQLYFKDCTDARRDDDVPKGDKPSAKMAGTLKARRVSVDLLGRIRDVDRRPAGGQAHDRGQP

SEQ ID NO: 8251 - protein, 995 aa, unidentified
  REGION 1..995: note = Description of Unknown: Cas Enzyme sequence
MALARVLAVDLGIASCGWALIEEDPEEGRIVAWGVRTFDAPETPDKRIPTNQLRRQHRGLRRVTRRRRQRMNAIRELLAARGLLPSDAKLGLSRPGLDPWQLRAAALDRRLEGEELAVVLAHIAKHRGFRSNSKRQSNKATEDSKMLGAIEASRERLMHYRSVGEMFAKDAAYAGRKRNRDGDYTRSIQRADQEHEVRLIFERQLALGCLLADGSMCEAYDALAFTQRPLANSEGRIGACPFEPEEKRAAKRCYSFELFRFLSRLNTLRIGTRQAERALTAEEVARASNGFGTQRGMTFDRLRKILALADAERFADVPAIEEGKRDVVNRSAGNGCMQGSAALRKAIGDAAWKTLIGVPEKLDRIAFLLSFRESAESIREGLDEIGLPDGVADAVMAGLDQGAFSDFNGAGHISAKACRAIIPGLRAGMVFSEACAATGYDHARRPETRIEDIGSPVARKALAESLKQLRAVIREYGLPDRIHVELARDVGKSAEERDEIQRGIEKRNKERDRLHTVFFDTVGREPRNGTEDMLRFELWKEQAGKCLYTDRCIPPSAILAEDNSVQVDHILPWSRFGDDSFVNKTLCFAGANQEKRGRTPYEWLKDEVQKWETFVAIVESNKSMKGRKKRNYVLKDAAAVEEKFRSRNLNDTRYAARILMEHLGRLYPADGTRRVFARPGALTDRLRRGWGLQDLKKVLEPDGEKRRADDRHHALDALIVAATGESALNRLTRAFQAAEAAGSHRDFSGLAPPWPGFVAEVRAKFPTIMVSRAERGRARGEAHAATIRQVRQEEDGAVVYERKTVAALTEADLARVKDPERNAALVESLRVWITAGKPKDAPPKSPKGDPIGKVRLRSNKKVDVEVRGGAAERGEMVRVDVFRKRNRRGEWEFYLVPIYPHQVADQEGWPAPPNRAVTAHKPEDVWPVMDAGFEFLWSLHQRSFTEVERRDGTIITGYFVGMDRAGGQINIVAPHSTKVIAAGIGTRTLKRFEKF

SEQ ID NO: 8252 - protein, 934 aa, unidentified
  REGION 1..934: note = Description of Unknown: Cas Enzyme sequence
FFDSLNIEQLVRSTFKNSEDILSEILKEKSSLDQFRSLVKEKIIFFQRPWQQAKNKGRCPFEKILVKRQLIEKGTGQKSVVELHVGRMVIPRSHPLFQDFKVWQQINNVRLYLNTKDEKIDLFEFPKIFKTYTGKEPGEVKELLYEALQSAKTLTWRTFVKEKLVIETYEEQIDKAKKGKVVNRETGELIDGFFSVNFRKKRKDGTYEDIRLKGNTTKSAFMSLLGHYDEQWFQELHSKSDQKRLSKTKASNQPETCKEPITNLQLLWEIIYDITTIDKSKVAAILENQFGFETDLAIQLAGIQFDDAGMGSMSAKAIRQILPLMSGKSDPTEKANRRIQSLINLNNSAEELQREEKLESLRDFISDKKARIRLANFKSGLDFRYLNYWEATAVVYGTHSSLNTRTVGQMKTVENHSMNNPIVEKIVNETIRLVNEIYSRIGFDEVRIELSRELKASMDERQQIWESMDENNKKNEWGKQLLREMKAALLEEAMVDNLDTSFLNKANLEKIKIVENVVQNLKKDEYKAKVKEYNLKEPTSKEIQRYLLWLDQNFKCPYTNQPIRLSEVFDRNKVVEIEHIIPRERYYLNSFANKVLTWRAVNQAKQDYGNRTAYEFIVSKRLGSDTIRINDKKEVRLVDKESWEEHVKAMFPKGAKQANLLRKEIPEEPLNRTLKETQYINKKLKEKLSELVGSQRVWVSSGAVTDILREKWKLHGVFKELVRERFEKFKTASGDKVIKIKTVDDQGKMLQLLEGLLENEHGNTYFKIPFGKKFIEITSKASLDDFYHELKSVWKENSQGPDIELKEFEFEINEAKNLVYFTKHTNPKTGQVEEVEMFGGYSKRIDHRHHALDALIVACTKQKHIQYINTLNAIHSSDQEKDEAKKAKYKSLKDEITLGNSAKKFRFPWDENKFLPEVKDALAKVLISHKNTRL

SEQ ID NO: 8253 - protein, 1088 aa, unidentified
  REGION 1..1088: note = Description of Unknown: Cas Enzyme sequence
MKRFGSFLLIILFLGFSAHAQAQKKGKKSYKKHHKTKKRQQLSFVACFFDLIPPQCELPKADEELDENRDYLFTQVDEPPIFEVCKDNINKKKCFQNELEQHVKTHFNPNNIDAEKSEVDVAFRIDETGEVEILFSRSENETHKKEAERILRKQQEFNNKITDEFIADYLTILTGKRKYYHGPGNEKSRTDYGRFRTDGTTLDNIFGILIGKCTFYTDEYRSSKASYTAQEFNLLNDLNNLTVPTETKKLSEDQKKTIVEYAKSVEKLGASTLLKYIAKMIGASVDQIHGYRIDPNKKPEMHTFEVYRKMQSLETIEVEELSREVLDELAHILTLNTEREGIEEAINTKLKDTFSQDQVLELVQFRKNNSSLFSKGWHNFSLKLMMELIPELYETSEEQMTILTRLGKQKSKETSKRTKYIDEKELTEEIYNPVVAKSVRQAIKIINEATKKYGIFDNIVIEMARENNEEDAKKEYIKRQKANLDEKNAAMEKAAFQYNGKKELPDNVFHGHKELATKIRLWHQQGEKCLYTGKNIPISDLIQNQYKYEIDHILPLSLSFDDSLSNKVLVLATANQEKRQRTPFQALDSMDDAWSYREFKSYVKDSKLLGNKKKEYLLTEEDISKIEVKQKFIERNLVDTRYSSRVVLNALQDFYKEHQFDTTISVVRGQFTSQLRRKWGLEKTRETYHHHAVDALIIAASSQLRLWKKQNNPLVSYKAEQFVDQETGEIISLSDDEYKELVFKAPYDHFVDTLKSKEFEDSILFSYQVDSKYNRKISDATIYATRKAKLDKENKEYTYTLGKIKDIYALGTKSPSKTGFYKFLDLYNKDKSQFLMFQKDRKTWDEVIEKIIEQYRPFKEYDENGKEVDFNPFEKYRIENGPIRKYSKKGNGPEIKSLKYYDNLLGKFVNITPSESKNPVALLSLNPWRTDVYYNTETSKYEFLGLKYADLCFEKGGSYGISEVKYNKIREKEGIGKESEFKFTLYKNDLVLIKDTETNCQQIFRFWSRTGKDNPKSFEKHKIELKPYEKARFEKGEELEVLGKVPPSSNQLQKNMQIENLSIYKVKTDVLGNKHFIKKEGEEPKLKF

SEQ ID NO: 8254 - protein, 1132 aa, unidentified
  REGION 1..1132: note = Description of Unknown: Cas Enzyme sequence
MSTDMKNYRIGVDVGDRSVGLAAIEFDDAGFPIQKLALVTFRHDGGLDPINNPKSRKETRGEARRRMRMTRRRKQRLCDLDKVLENLGYTVPEGPEPETYEAWTSRALLASIKLASADELNEHLVRAVRHMARHRGWANPWWSLDQLERASQEPSETFEIILARARELFGEKVPANPTLGMLGALAANNEVLLRPRAEKKKKTGYVRGTPLLDAQVRQIDQVAELRRICEVQGIEEQYETLRNAIFAHKVAYVPTERVGKDPLAPSKNRTIRASLEFQEFRILDSVANLRVRTDSRAKRELTEGEYDAAVEFLMGYTAKEQPSWADVAEEIGVPGNRLIAPVLEDVQQKTAPFDRSSAAFEKAMSKKTEARQWWESNDDDQLRSLFIMFLADATNDTEEAAAVAGLPELYMSWPAEEREALSNIDFEKGRVAYSHETLSKLSEYMHEYRVGLHEARKAVFGVDDTWRPPLAKLEEPTGQPTVDRVLTILRRFVLDCERQWGRPRAITVEHARIGLMGPVQRQKILNEQKKNRGENERIRNELRESGVENPNRAEVRRHLIVQEQECQCLYCGTMITTTTSELDHIVPRAGGGSSRRENLAAVCRYCNGKKNRKLFYEWAGPVKMQETIDRVRQLRAFKDSKKAKMFKNQIRRLKQTEADEPIDERSLASTSYAAVAVRERLEQHFNEGLTLDDKSRVVLDVYAGSVTRESRRAGGIDERILLRGEHDKNRFDVRHHAVDAAVMTLLNRSVALTLEQRSQLRRTFYEQGLDKLDRDQLKPEEDWRNFTGLYEASQRKFSEWKETATALGNVLAEAIEDDSIAVVSPLRLRPQNGRAHKDTIVAVKKQTLGSVWSADAVKRIVDLEIYLAMKAALGKLKKLPEDSARSLELRDGRLVEADDEVLFFPKNAASILTPRGVAEIGESIHHARLYGWLTKKGELKVGMLRVYGAEFPWLMRESGSHDVLRMPIHPGSQSFRDMQDRTRKAVESGEAVEFAWITQNDELEFDPDDYIANGGKDELRQFLEFIPERRWRVDGFKDSGRLRIRPALLSREQLPSEIQTRLDTKSLSKGETVLVKALDDGLYISIGGLLPLESMKVIRRNNLGFPRWRGNGNLPTSFEVRSSALRALGVEG

SEQ ID NO: 8255 - protein, 1039 aa, unidentified
  REGION 1..1039: note = Description of Unknown: Cas Enzyme sequence
MKNILGLDLGITSISFAHIVEDENKEKSEIKELGVRIVSLTTDEQSDFEKGKSITTNANKTLKHGARLNLDRYQQRRKYLIDLLQKANLITSSSILAENGKNTTHSTWQLRAKAVTERVEKEEFARVLLAINKKRGYKSSRKAKTEDEGQAIDGMAIAKHLYDENLTPGQLSLELLQQNKKLLPDFYRSDLQREFDLVWNFQKQFYPDILTDIFYKELQGKGKDATSKAFSKRYHFDTAENKGSKESIRLQAYQWRSEAVSKQLSKEEVAYVLTEINNNLNNSSGYLGAISDRSKELYFNRQTVGQYLYAQLQENRHNSLKNKVFYRQDYLDEFERIWETQASFHKELTDELKKQIRDVVIFYQRKLKSQKGLVSFCEFESKEIEIEKDGKAITKSIGARVVPKSSPLFQEFKIWQILNNVTCKRKGIRKKKSSTNPTQLDLFNEPSQTIFSLDMECKQLLFDELNLKGDLKSDKVLKLLGYSPQEWEINYNQLEGNRTQKALYEAYLKIVEMEAHDVKDILQIKSAKDDWSLDESPLSASEIKEKVKDIFQALGICTKILYFDPLLPVKEFEEQDSYQLWHLLYSYESDDSTSGNETLYRILEKKYAFKREHARILANVALQDEYGSLSTKAIRKIYPNIKENQYSTACEKAGYKHSKLSLTTEELEARELKNIIPLLRKNALRNPVVEKILNQMINVVNALIEKNSERDAKGEITKYFHFDEIRIELARELKKNAQERYEMTQNINKAKLEHQKISEKLQKQFGIKNPTKSDIIRYRLYQELEHNGYKEIYTNTYIAPDVLFSKNIDIEHIVPKARVFDDSFSNKTLAFKEFNIKKGESTAFDYITSLNCEGELNQYLTRVENAYKTKSISLTKYKNLLKKASEIADGFINRDLRDTQYIAKKAKEILFQVTKNVLSTSGNITDRLREDWGLVNVMKELNMPKYQSLGLTEVEERKDGNKVTVIKDWTKRNDHRHHAMDALTVAFTKPSHIQYLNFLNARKDEKHKEYSNIMGIQQLETEKTTDKDGKDKRVFKAPI

SEQ ID NO: 8256 - protein, 1214 aa, unidentified
  REGION 1..1214: note = Description of Unknown: Cas Enzyme sequence
MSKHVLGLDLGVGSIGWCLIALDAQGDPAEILGMGSRVVPLTNLGDDKAFSKGEAFTANQKRTARRTMRRGFARYQLRRYRLRRELEKVGMLPDAALIQLPLLELWELRERAATAGEHLTLPELGRVLCHINQKRGYRHVKSDAAAIVGDEGEKKKDSNSAYLAGIRANDEKLQDEHKTVGQYFAEQLRQNQSESPTGGISYRIKDQIFSRQRYIDEYDQIMAAQRVHYPDILTDAFIRMLRDEVIFMQRPLKSCKHLVSLCEFEKQEKVMRVQQDDGKGGRQLVERKVKFGPKVAPKSSPLFQLCRIYEAVNNIRLTRPDGSPRDITPEERDKLVAYLQTYEAPKPPKRKPAKAKPVKLAHPKLDLDKLKELLCIEEELFADKLLEECLKGDATRIALSIILQPYPQYHHLLDMELETRMMTVQLTDEETGEVTEREVAVVTDSYVRQPLYRLWHILYSIEERDAMRRALITQLGMKEEDLDGGLLDQLYRLDFVKPGYGNKSAKFICKLLPQLQQGLGYSEACVAVGYRHSNSPTSEEITERTLLEKIPLLQRNELRQPLVEKILNQMINLVNALKAEYGIDEVRVELARELKMSRKERERMARNNKDREERNKEVAAKIRECGLYPTKPRIQKYMLWEEAGKVCLYCGRSIEEEQCLNGDDMEVEHIIPKSVLYDDSYGNKTCACHECNQTKGNRTALEYIRAKGWEAEYMKRINDLLKEKKISYSKHQRLRWLKEDIPSDFLERQLRLTQYISRQAMAILQQGIRRVSASEGGVTARLRSLWGYGKILHTLNLDRYDSMGETERVSREGETTEELHITNWSKRMDHRHHAIDALVVACTRQSYIQRLNRLSSEFGREDKKKEDQEAQEQQATETGRLSNLERWLTQRPHFSVRTVSDKVAEILISYRPGMRVVTRGRNIYRKKTVDGREVTCVQRGVLVPRGELMEASLYGKILFQGRERIVKRYPLHDLKGEVVDPCLRELIVKSKGAPLYLDAAEKQEVRSVRCYVTQPSVAKAIPIRFDERGRAITFVQSGSNHHLAIYRTPKGKLVESIVSFWDAVNRARYGLPLIIKYPRKAMEQVIQREDIPESVLSLLPPADYEFVEVFQQNEMAVVGLPEEEFRRAVDTQDYRTLSEHLYRLKRISSKDYEFHYHLDTDDPDETDSSKKKKKRVRNTSGRIPRIYRIRGIGPLQKKNVRKVCIDLLGRLSLL

SEQ ID NO: 8257 - protein, 1369 aa, unidentified
  REGION 1..1369: note = Description of Unknown: Cas Enzyme sequence
MEKQDYFLGLDMGTSSVGWAVTNTKYELLRKKGKDMWGIREFDEASSAAERRTNRVNRRRRQRQVVRLGLLKSYFSEEIAKIDPDFFTRLENSKYFLEDKDERVRTKNGVFNDDNYKDVDYYRDYPTIFHLRQALLDIDNKGVKFDVRLVYLALANMFKHRGHFLLNAEGDALNTEQVEVVYKEILDSLENDYEIIIEQKPVQQVIDIIGNTDNGRKKKHEELQKLFEMTKKDKRANELLKCLCGLSVNVKLIFDENTEEEVQICFNDFSYTDKIPELMEQLTEEEYALIEQLKSIYDYAVLAGTMKGHDYLSCVRVELYKKHADDLKLLKALYRKYKTEEEYNKMFRSNADGTYSAYVNSLNSSDAIFKSDEVVEGSKYRRNMKGRKSEDIYATIKKAFKDITDDKDVTFVLEQIEKEQFLPKQLTGANGVIPNQVHKKEMERILKNAENYLTFLKDKDESGLTVSERIIRLFTFQIPYYVGPLGENSKTGWIVRKEKGSVLPWNINDKVDMSATSEVFISNLIRTCTYIQGEKVMPKASLAYERYCVLNEINNLCIDGERIDTKLKQQIYKDCFMKGKRVTKRQLCSYLTAQNAIHSEEQVTGIDKTINNSLSSYGKMYAIFGERLKEDAILAAAEDIIYWGTIFGDSKKMLKQRLKKYVEEGIIDENQLKRIIGYKFKDWGRFSKALLTLNGCDKSTGEIITLGQAMWEYSLNFMELINSEEFTFREELEKHTKVAMKQLSEFTYEDLEDSYFSVPVKRMIWQTLLVVREIEKVMGYAPKRIFVEMTRTEEEKGDKGRKESRGNQLSELYKSIKNTESHNWKEEIEAADKDGKLRSKKLFLYYMQMGRDMYTGEEIDLGRLYDDNLYDIDHIYPRHYVKDDSIMNNLVLVNKRANQDIKKDFYPIPEQIKANSKVRELWDTLHKQKLITDEKYARLSANTAFTEKQLGDFIARQLVETGQGTKGVADLLEQLFKDTDIVYAKATNVSDFRRDNGLLKSRLINDFHHAQDAYLNIVVGNVYYTKFTRNPWNFIRKDYEKDKEKNRYNLARMFDWNVVRGSEIAWIAGRKDEKGTIATVRKMMQKNTPLMTRMNFEQHGAIANATLYSAKKAKVENYIPLKTSDERMKDVTKYGGFTSATIAYYFIVHHKEGKKENVSIEGLPLHCKTKVEQDANGLEKYCEEVLGYSEVNILRRKLKIQSLLEFNGYQVHLSGKTGDRLILRNAMNLCLPAKWVTYIKKLEKAVNVQIFEEVITSGENIKLYDILTDKHANTVYAKRPNAYGQKLLADRKTFVALQLKQQCEALLQMLQLTKIGSTETNLLLIGESEHSGKILISKNLKTSDRPAIISQSATGLYEKKEWIFDDKVK

SEQ ID NO: 8258 - protein, 1043 aa, unidentified
  REGION 1..1043: note = Description of Unknown: Cas Enzyme sequence
MGQHAVRRILGLDLGIASCGWGIIEVGDLIGRIVAAGVRCFDAPLVDKTGEPKSATRRTARGQRRIVRRRRQRMNSVRRLLNERGLLSDISSDALHRALCRISPAGSESQTTPWMLRAAAHDRLLTNDELAVVLGHIARHRGFRSNSKSEAGANAADETSKMKKAMEATREDLAKYRSFGDMLANDPKFSGRKRNRDKDYSHTAKRSDLEDEVGAIFRAQQRMGSTTANEALLRAFLDAAFFQRPLQDIENKVGECPFEPGQKRTARRAPSFELFRVLSRLAHLRLNVGRVERALTSDEIAMAVKGFGEQKIITFKTLRKTLDLDPNARFAGVAFDKESIDVAARTGGAAFGTYVLRHVLGDAPWQSLSRTPVKLDRIAEILSFREDLNSLRAGLDEIGLEDVVIERLLQAAADGDFKDFTKAAHVSAVAARNIIPGLRQGLVYSEACTRVGYDHAARPAVSLDQIGSPVTRKAFGEAIKQVRAVAREYGPIDLVHIELARSVGKSAEERAKITKGIEDRNVEKEKRRQEAQEHLGRPPSDDELLRYELAKEQNFKCVYTGDAIDPAGISANDMRYQVDHILPWSRFGDDSYMNKTLCTTKANQNKRGRTPFEWFDADKNEPEWMEYVARVEDMKEVKGRKKRNYTIRDAAGIEEKFRTRNLTDTQWATRLLADGLKRMFPAAEEERRVFTRPGAITSKLRRAWGLEGRKKEDGQRIEDDRHHGVDALVLAATTEGLLNRLTREVQQREREGRQDDIFHCAQPWPSFRIDVERTIYGFNGTPGILVSRAERRRARGKAHDATIKQIREIDGDRMVFERKPVEKLTEKELEKIPVPAPYGRVVDPKRLRDELVENLRAWIAAGKPKDRPPLSPKGDVIRKVRVETKDRVAVEVNGGTVDRGDMARVDVFRKKNRRGAWEYYAVPIYPHQIAISESPPNRAIKGGGGPEVGWYEIDGDAEFLWSLYSMSFVQAIKLDGEVIQGYFRKLDRNTGAITISPHVTNAEIRKGIGIKTLKDFHKYATDRLGRKYEVLREVRTWRGEACT

SEQ ID NO: 8259 - protein, 1102 aa, unidentified
  REGION 1..1102: note = Description of Unknown: Cas Enzyme sequence
MVRSFIMNGLVLGLDIGIASVGVGILKKETGEIVHSNSRLFPAATADNNVERRGFRGGRRLTRRKKHRSVRLHDLFEDFGLLTDFSKVSINLNPYQFRVQGLDNQLTNEELFIALKNIVKRRGISYLDDASEDGGTVSSDYGKAVEENRKLLAEQTPGQIQLNRFEKYGQVRGDFTVMENGEKRRLINVFSTSAYRIEAERILRKQQEFNKKITDGFIEDYLTILTGKRKYYHGPGNEKSRTDYGRFRADGTTLDNIFGVLIGKCTFYPDEYRASKASYTAQEFNLLNDLNNLTVPTETKKLSEEQKKIIVEYAKTAKTLGASTLLKYIAKLIGASVDQIHGYRIDSNKKPEMHTFETYRKMQSLETIRVEELHRKVLDELAHILTLNTEREGIEEAINANLKDTFSQDQVLELVQFRKNNSSLFSKGWHNFSLKLMMELIPELYETSEEQMTILTRLGKQKSKETSKRTKYIDEKELTEEIYNPVVIEMARENNEEDAKKEYIKRQKANIDEKNAAMEKAAFQYNGKKELPDDVFHGHKELATKIRLWHQQGEKCLYTGKNIPIADLIQNQYKYEIDHILPLSLSFDDSLSNKVLVLATSNQEKGQRTPFQALDSMDDAWSYREFKTYVKDLKLLNNKKKDYLLTEEDISKIEVKQKFIERNLVDTRYSSRVVLNALQDFYKEHQFDTTISVVRGQFTSQLRRKWGLEKSRDTYHHHAVDALIIAASSQLRLWKKLNNSLISYKEEQFVDLETGEIIALSDDEYKELVFKAPYDHFVDTLKSKKFEDTILFSYQVDSKYNRKISDATIYATRKAKLDNDKSEETYVLGKIKDIYSQSGYDAFIKIYNKDKSRFLMYHKDPQTFEKVIEEILRTYPSKELNDKNKEVPCNPFEKYRQENGPIRKYSRKGNGPEIKSLKYYDKNIPESFINITPSNSKNKVILRQLNPWRTDVYFNHQTEKYELLGLKYADLQFEKKTGNYSITIDKYNEIKEKEGVSKQSEFKFTLYKNDLLLIRDTKNNEEQIFRFLSRTMPNQKNYVELKPYDKGNFEGKERIRVFDTTSNGRCIKGLNKKDISIYKVKTDVLGNKHFIKKEGEEPKLKF

SEQ ID NO: 8260 - protein, 1097 aa, unidentified
  REGION 1..1097: note = Description of Unknown: Cas Enzyme sequence
MNGLVLGLDIGIASVGVGILKKDTGEIIHANSRLFPAATADNNVERRTSRQARRLNRRKKHRSVRFHDLFEDFGLLTDFSKVSINLNPYQLRVQGLDNQLTNEELFIALKNIVKRRGISYLDDASEDGGTVSSDYGKAVEENRKLLAEQTPGQIQLDRFEKYGQLRGDFTVVENGEKRRLINVFSTSAYRKEAERILRKQQEFNNKITDEFIEDYLTILTGKRKYYHGPGNEKSRTDYGRFRTDGTTLDNIFGILIGKCTFYPDEYRASKASYTAQEFNLLNDLNNLTVPTETKKLSEEQKKIIVEYAKTAKTLGASTLLKYIAKLIGASVDQIHGYRIDPNKKPEIHTFEVYRKMQSLETIRVEELPRKVIDDLAHILTLNTEREGIEEAINAKLKDTFSQDQVLELVQFRKNNSSLFGKGWHNFSLKLMMELIPELYETSEEQMTILTRLGKQKSKETSKRTKYIDEKELTEEIYNPVVIEMARENNEEDAKKEYIKRQKANIDEKNAAMEKAAFQYNGKKELPDNVFHGHKELATKIRLWHQQGEKCLYTGKNIPISDLIQNQYKYEIDHILPLSLSFDDSLSNKVLVLATANQEKGQRTPFQALDSMDDAWSYHEFKSYVKDSKLLGNKKKEYLLTEEDISKIEVKQKFIERNLVDTRYSSRVVLNALQDFYKEHQFDTTISVVRGQFTSQLRRKWGLEKSRETYHHHAVDALIIAASSQLRLWKKQNNPLSSYKEGQFVDQETGEIISLSDDEYKELVFKAPYDHFVDTLKSKKFEDSILFSYQVDSKYNRKISDATIYATRKAKLDKDKSEETYVLGKIKDIYSQAGYDAFIKIYNKDKSRFLMYHKDPHTFEKVIEEILRTYPSKEFNDKNKEVPCNPFEKYRQENGPIRKYSRKGNGPEIKSLKYYDNKLGNHIDITPDESMNQVVLQSINPWRTDVYYNNKTKKYEFLGLKYSDLYFEKGTGKYKISKNKYDVIKKLEGVDEKSEFKFTLCKNDLILIKDIETGQEQLFRFLSRNNKGKHQVQLKPIDKSDFEKGEKLIDIFDTVPNSTTQCVKGLNKPNISIYKVKTDLLGNKYFIKKEGEEPKLKF

SEQ ID NO: 8261 - protein, 1105 aa, unidentified
  REGION 1..1105: note = Description of Unknown: Cas Enzyme sequence
MNGLVLGLDIGIASVGVGILNKDTGEIIHTNSRIFPAATADNNVERRNSRQDRRLNRRKKHRVVRFQDLFDDYGLLTDFSKVSINLNPYRLRVHGLNQQLTNEELFIALKNIVKRRGISYLDDVSEDGGVVSSEYGKAVEENRKLLAEQTPGQIQLDRFERYGQVRGDFTIVDNGEKRRLINVFSTSAYRKEAERILRKQQEFNSRPGNEKSRTDYGIYTTKKDSEGKYITLPNMYDIFIGKCTFYPDEYRASKASYTAQEFNLLNDLNNLTVPTETKKLSEEQKKVIVEYAKEAKTLGASTLLKYIAKMIDTSVDQIRGYRVDVNNKPEMHTFEVYRKMQSLETISVGKLSRNILDELAHILTLNTEREGIEEAINTKLMDVFSQDQVLELVQFRKNNSSLFSKGWHNFSRKLMMELIPELYETSEEQMTILTRLGKQKSKETSKRTKYIDEKEVTEEIYNPVVAKSVRQAIKIINEATKKYGIFDNIVIEMARENNEEDAKKDYIKRQKANQDEKNVAIEKAAFQYNGKKELPDSIFHGHKELATKIRLWHQQGEKCLYTGKNIPISDLIHNQYKYEIDHILPLSLSFDDSLSNKVLVLATANQEKGQRTPFQALDSMDDAWSYREFKSYVKDSKLLGNKKKDYLLTEEDISKIEVKQKFIERNLVDTRYSSRVVLNTLQDFYKAHKFDTTISVVRGQFTSQLRRKWGLEKSRETYHHHAVDALIIAASSQLRLWKKQANPLISYKEDQFVDSETGEIISLTDDKYKELVFKAPYAHFVDTLSSKRFEDSILFSYQVDSKYNRKISDATIYATRKVKLDKDKSEETYVLGKIKDIYSQAGYDAFIKIYNKDKSKFLMYHKDPQTFEKVIEEILRTYPSKEFNEKNKEVPCNPFEKYRQENGPICKYSKKGNGPEIKSLKYYDKNIPESFIDITPSNSKNKVILRQLNPWRTDVYFNHQTEKYELLGLKYADLQFEKKTETYSITIDKYNEIKEKEGVGEHSEFKFTLYKNDLLLIKDMEIKEEQIFRFLSRTMPNKKHYVELKPYYKGNFEGKERIKVFNTTSNGRCLKGLGKKGLSIYKIKTDVLGNKHFIKKEGEKPKLKF

SEQ ID NO: 8262 - protein, 1376 aa, unidentified
  REGION 1..1376: note = Description of Unknown: Cas Enzyme sequence
  MOD_RES 339..342: note = Any amino acid
RSRIKKNLLGTLLFDDGNTAESRRLKRTARRRYTRRRNRILYLQEIFTKSMNEIDESFFHRLDDSFLVPEDKRGSKYPIFATLEEEKEYHKKFPTIYHLRKHLADSKEKTDLRLIYLALAHMIKYRGHFLYEESFDIKNNDIQKIFNEFISIYDNTFEGSSLSGQNAQVEAIFTDKISKSAKRERVLKLFPDEKSTGLFSEFLKLIVGNQADFKKHFNLEEKSPLQFSKDTYDEDFENLLGQIGDDFADLFLVAKKLYDAILLSGILTVTDPSTKSPLSASMIERYENHQKDLAALKQFIKNNLPEKYEEVFSDQSKDGYAGYIDGKTTQEAFYKYIKXXXXGYAGYIDGKTTQEAFYKYIKNLLSKFEGADYFLDKIEREDFLRKQRTFDNGSIPHQVHLQEMNAILRRQGEHYPFLKENREKIEKILTFRIPYYVGPLARGNRDFAWLTRNSDEAIRPWNFEEIVDKASSAEEFINKMTNYDLYLPEEKVLPKHSLLYETFAVYNELTKVKFIAEGLRDYEFLDRVQKKQIVNQFFKEKRKVTEKDIIHYLHNVDGYDGIELKGIEKQFNASLSTYHDLLKIIKDKAFMDDSKNEEILENIIHTLTIFEDREMIKQRLAQYDSLFDEKVIKALTRRHYTGWGKLSAKLINGICDKKNGKTILDYLIDDGKINRNFMQLINDDGLSFKEIIQKAQVVGKTDDVKQVVQELPGSPAIKKGILQSIKIVDELVKVMGYAPESIVIEMARENQTTARGKKNSQQRYKRIEDSLKNLAPGLDSNILKENPTDNIQLQNDRLFLYYLQNGKDMYTGKPLDIDQLSSYDIDHIIPQAFIKDDSIDNRVLTSSKDNRGKSDNVPSLEVVQKRKAFWQQLLDSKLISERKFNNLTKAERGGLDERDKVGFIKRQLVETRQITKHVAQLLDARFNTEVNEENQKIRTVKIITLKSNLVSNFRKEFGLYKVREINDYHHAHDAYLNAVVAKAILKKYPKLEPEFVYGDYQKYDLKRYISKSKVSNTIDKATEKYFFYSNLLNFFKERVRYADGTIKKRENIEYSNDTGEIAWNKEKDFATIKKVLACPQVNIVKKTEIQTHGLDRGKPKGLFNSNPSPKPSEDSKENLVPIKQGLDPRKYGGYAGISNSYAVLVKANIEKGAKKQQKTILEFQGISILDKINFENNKENYLLEKGYIEILSTITLPKYSLFEFPDGTRRRLASILSTNNKRGEIHKGNELVLPGKYTTLLYHAKNINKKLESEHLEYVEKHRDEFAEILEHVLLFNEKFVGALKNGEKIRQAFAKWETVDIKELCFSFIGPENSKNAGLFELTSQGSASDFEFLGVKIPRYRDYAPSSLLKATLIHQSITGLYETRIDLSKLGED

SEQ ID NO: 8263 - protein, 1088 aa, unidentified
  REGION 1..1088: note = Description of Unknown: Cas Enzyme sequence
MNGLVLGLDIGIASVGVGILEKNSGKIIHANSRLFPAATADNNVERRKNRQVRRLHRRKKHRGVRLKDLFEDYGFLTDFSKVSINLNPYRLRVDGLNQQLTNEELFIALKNIVKRRGISYLDDASEDGGTVSSDYGKAVEENRKLLAEQTPSQIQLERFEKYGQVRGDFTVVENGQKCRLINVFSTSAYRKEAERILRKQQEFNHGPGNEKSRTDYGRFRTDGTTLDNIFGILIGKCTFYPDEYRASKASYTAQEFNLLNDLNNLTVPTETKKLSEEQKKTIIEYAKLAKTLGASTLLKYIAKMIDASVDQIRGYRVDVNNKPEMHTFEVYRKMQSLETISVGELSRNVLDELAHILTLNTEREGIEEAINTKLKDSFSQDQVLELVQFRKNNSSLFSKGWHNFSLKLMMELIPELYETSEEQMTILTRLGKQKSKETSKRTKYIDEKELAEEIYNPVVAKSVRQAIKIINEATKKHGIFDNIVIEMARENNEEDAKKDYIKRQKANQDEKNAAMEKAAFQYNGKKELPDSIFHGHKELATKIRSGKNIPISDLIHNQYKYEIDHILPLSLSFDDSLSNKVLVLATANQEKGQRTPFQALDSMDDGWSYREFKSYVKESKLLGNKKKEYLLTEEDISKIEVKQKFIERNLVDTRYSSRVVLNALQDFYKAHKFDTTISVVRGQFTSQLRRKWGLEKSRETYHHHAVDALIIAASSQLRLWKKQNNPLISYKEGQFVDSETGEIISLTDDEYKELVFKAPYDHFVDTLRSKTFEDSILFSYQVDSKFNRKISDATIYATRKAKLDKEKSEETYVLGKIKDIYSQAGYDAFIKIYNKDKSKFLMYHKDPQTFEKVIEEILRTYPSKELNDKNKEIPCNPFEKYRQENGPIRKYSKKSNGPEIKSLKYYDNKLGNHIDITPESSDNQVVLQSLKPWRTDVYFNHQTKKYELMGLKYSDLSFEKGSGKYSISNQKYNSIKRIEGIDEQSEFKFTLYKNDLILIKDSENNEQKLFRFNSRNDTAKHYIELKPYDKAKFDGEQELITILGNVAKGGRCLKGLNKSNISIFKVKTDVLGNKHFIKKEGDEPKLKF

SEQ ID NO: 8264 - protein, 1077 aa, unidentified
  REGION 1..1077: note = Description of Unknown: Cas Enzyme sequence
PRGGSPRTSPPTAADSEESGKVKSGIAQLSVEMEKAGCHYLGEYFYQLYRQHGNTVRLRSRYTDREEHYIKEFLAICEKQELDAQWVEKLQSALYFQRPLKSQRKGVGKCTFEPKKPRCAESHPDYEAFRMLCILNNMKIKTPNDTSLRPLNAQEREKIWPLFFRKSKPNFDFEDIAKALAGKNNYAWYKDAGEKPYRFNYRMHQGVSGCPVTAQLIDIFGSDWKAGIAETYTAVEKKNGTKTIDEMADDVWNVLYSFSSKDKLKAFATEKLQLDEASATKFANAKLPHGFAALSLKAIRNILPFLRQGLIYAHAVHLAKIPDIVTKAVWNDAHKREQILSGLMEIIENYNPKDRGVEGTIDFCIKSHLQDVVDLRPGAADALYHPSMIEAYPDAKLNKMGVFQLGSPRTNAIRNPMAMRSLHILRSVVNQLLRDGVIDRDTEVHVEYARELNDANKRKAIADYQREQEKKRKQYRDDIITLYKSECHKEIEPTDTDILKFQLWEEQNHLCLYTGTQIGICDFLGDNPKFDIEHTIPRSVGGDSTQMNLTLCDATFNRQVKGAKLPTELSNHADILVRIDHWKSKCEDLRKQLDKIRTYGGMEKAMKDRLIQKRHSLKMELDYWQGKYSRFTMTEVPEGFSRRQGAGIGLVSKYAGLFLKSLFHNEQNPNKSNVYVVKGVTTAEFRRMWELQGEYEKKSRLNHCHHCIDAITIACIGEAEYQKMAQYYHDEEMSRWHGSANKPQFKKPWPTFTKDVLALEQSLLVKHLTKDNMPKQAKRRVRTAKGKHLAQGDAARGSLHKDTYYGIVEKDGKLYHVLRKPIDKFKKESELENIVDQAVKEKIKAAVAGKNFKAAIAEPIFMNKEKGIRINKVRCYVKAKERLKIRQQRDLSTKEYKQFFCVENENNYLLAIYEGEVKGKKERDFCVVNNLDAAAYLKRSNKGKAAPLVPERSAERNLPLLAVLQRGTQVLFYENSPEEILFDNPQDLARRLYKVVGINTKRDVKKGKTYLYGNIELRFHQNAQKKDDVKLESGGYKNNEAPHQGIVLSHNQFKALVEGIDFEFNILGEIEKKEHHA

SEQ ID NO: 8265 - protein, 1203 aa, unidentified
  REGION 1..1203: note = Description of Unknown: Cas Enzyme sequence
MLMSKHVLGLDLGVGSIGWCLIALDAQGDPAEILGMGSRVVPLNNATDAADFSVGKAFTANQERTARRTMRRGFARYQLRRYRLRRELEKVGMLPDAALIQLPLMELWELRERAATAGERLTLPELGRVLCHINQKRGYRHVKSDAAAIVGDEGEKKKDSNSAYLAGIRANDEKLQDEHKTVGQYFAEQLRQNQSESPTGGISYRIKDQIFSRQRYIDEYDQIMAAQRVHYPDILTDEFIRMLRDEVIFMQRPLKSCKHLVSLCEFEKQERVMRVHQDDGKGGRQLVERKVKFGPKVAPKSSPLFQLCRIYEAVNNIRLTRPDGSPRDITPEERAKIVAHLQSSASLSFAALKKLLKEKALIADQLTSKSGLKGNTTRVALAAALQPYPQYHRLLDMELETRMMTVQLTDEETGEVTEREVAVVTDSYVHQPLYRLWHILYSIEERDAMRRALITQLGMKEEDLDGGLLDQLYRLDFVKPGYGNKSAKFICKLLPQLQQGLGYSEACAAVGYRHSNSPTSEEITERTLLEKIPLLQRNELRQPLVEKILNQMINLVNALKAEYGIDEVRVELARELKMSREERERMAEGNRRREKENKAIAEKIRECGLFPTKSRIRKYMLWEEAGEQCLYCGQILTLSQCLNGDDMEVEHIIPKSVLYDDSYGNKTCACRRCNKEKGNRTALEYIRAKGWEDEYMERINERLKAKKISYSKYQRLRWLKEDIPSDFLERQLRLTQYISRQAMAILQQGIRRVSASEGGVTARLRSLWGYDDILHTLNLDRYDSMGETERVSREGETTEKLRIKDWSKRKDHRHHAIDALVVASTRQGYIQRLNRVSSESEREAMSGEIEMQKVTKTDKLSLLERWLTQRPHFSVRTVSDKVAEILISYRPGKRVVTRGRNIYRKKTADGREVTCVQRGVLVPRGELMEASLYGKILSQGRERIVKRYPLHDLKGEVVDPRLRELIAEYNQEITSKVKAKGAPLYLDAAEKQEVRSVRCYVTQPSVAKAIPIRFDERGRAITFVQSGSNHHLAIYRTPKGKLVESIVSFWDAVNRARYGLPLIIKYPRKAMEQVIQREDIPESVLSLLPPADYESVEVFQQNEMAVVGLPEEELRRAVDTQDYRTLSEHLYRLKRISSKDYEFHYHLDTDDPDETDSSKKKKKRVRNTSGRIPRIYRIRGVGSLQKKNVHKVCIDLLGRISLL

SEQ ID NO: 8266 - protein, 1370 aa, unidentified
  REGION 1..1370: note = Description of Unknown: Cas Enzyme sequence
MEKQEYYLGLDMGTSSVGWAVTNTKYELLRKKGKDMWGIREFEEANSAAERRTNRVNRRRRQRQVVRLGLLKSYFSEEIAKIDPNFFIRLENSKYFLEDKDERVRTKNGVFNDDTYKDVDYYREYPTIFHLRKALLDIDSTGEKYDVRLVYLALSNMFKHRGHFLLNAEGDALNTEQVDLVYQEILDRLKNDYEIIIEQKPVQQVIAIIGSTDIGRKKKHEELQKLFEVAKKDRRANELLKCLCGLSINAKLIFDEKTEEKVTICFNDFSYTDKISELMEQLTEEEYTLIEQLKSIYDYAVLAGTLKGYDYLSCARVELYEKHKKDLKLLKALYRKYKTEEEYNKMFRSNLEGTYSAYVNSLNSTDAIFKSDEAVEGSKYRRNMNKRKSENIYATIKKAFTDITEDKDVGFVLEQIEKEQFLPKQLTGANGVIPNQVHKKEMERILNNAENYLPFLKNKDESGLTVSERIIRLFTFQIPYYVGPLGENSKTGWIVRKEKGAILPWNINEKVDMSATSEAFIGNLIRTCTYIHDEKVMPKASLAYERYCVLNEINNLCIDGERIDTKLKQQIYEDCFMKGKRVTKKQLCSYLVAQNAIHSEEQLTGIDKNINNSLSSYGKMYAIFGERLKEDAILAAAEDIIYWGTIFGDSKKMLKQRLKKYVEEGIIDENQLKRILGYKFKDWGRFSKALLSLSGCDKSTGEIITLGQAMWEYSLNFMELINSEEFTFKEELEKHTQVAMKQLSEFTYEDLEDSYFSVPVKRMIWQTLLVVREIEKVMGYAPKRIFVEMTRTEEEKGDKGRKESRGNQLLELYKSIKNTDSHNWKEEIAAADKDGKLRSKKLFLYYMQMGRDMYTGEEIDLGRLYDDNLYDIDHIYPRHYVKDDSIMNNLVLVNRRANQDIKKDLYPIPEQIKANPNVHMLWDALHKQKLITDEKYARLTSNTAFSEKQLGDFIARQLVETGQGTKGVADLLEQLFKDTVIVYAKASNVSDFRRDNGFLKSRLVNDFHHAQDAYLNIVVGNVYYTKFTKNPWNFICKDYEKDKEKNRYNLARMFDWNVVRGSETAWIVERKDEKGTISTVRKMMQKNTPLLTRMNFEQHGSIANATLYSAKKAKSENYLPLKTADEKMSDVKKYGGYTSMSIAYYFIVHHKEDKKENVTIEALPLYCKDKVEREENGLEKYCEEVLGYGEVNIIRRKLKIQSLLEFNGYQVHLSGKTGNQLILRNAISLCLSTKWITYIKKLEKAVNIQIVEEVVTPEENIKLYNLLADKHANTVYSKRPNAYGEKLLADREIFVTLEFGKQCEALLQILSLTKIGSTEANLLLIGESEHSGKILISKNLKASDRPAVINQSPCGLYEKKEWIFDKIVEK

SEQ ID NO: 8267 - protein, 1126 aa, unidentified
  REGION 1..1126: note = Description of Unknown: Cas Enzyme sequence
LRRLRGGLRIAYTGQDPGPASRVEVARADQPVKLLNSMVFIHDAGVDPNENKAAKSRKLTAGVARRTRRLYRTRHQRLVNLDRVLSKEFGWPLPDLMAFKDPREPWHVRSKLLEGYIADDDKRKAALSIALRHIARHRGWRNPYAKVESLLQPAEPSDFLKGLNERISTSLGRSFPADATPGQLVDAYLAHPDYVKKAGTPKLRGPKGILAGKLHQSDNAEEIRRICEVQQIDPADRDRLIRAVFQAKSPKGSAKERGLVGYDELPGQGKHVRAEKAHPAFQKFRIVSVLANLRVREGRAERPLTPEELQGLTDFLLVVGLKQEVTWQDLADNLGIERSDLRGTAKASFDGSPVLRNPPTDVTTEKILACKVKWLKEWWKDADDEQRGYFVDAFSNSGGSEDSSDVNDEVAELLEQATEDDQLEFEKISLPQGRAAYSLDSLRRLTDRMLRDGVDLHTARRLEFNVGDDWKPAVEPIGTPTGNPAVDRVLKQVSRWLHAATERWGEPTVINIEHARDGLGSERVARELMRENDRRRSANAAAVAEMAAQLKLSGRVRRSDQIRYFALQRQNNECLYCGTEITFTTAEMDHIVPRADGSSTNDRSNLAAVCRTCNHKKGAVPFAAWASSDRANTGVSLKGALDRVKFWVRDNGMSPKQFKQLQREVSARLKSRKPDEEFDGRSMESVAWMAVELRTRIEGFYRTRDEESVPSVCVYRGQLTAEARKSSGFESRVNLIGGRGKTRFDRRHHAMDALVIALMNPSVSRTLALRVNMRDAQRIAGLEETWKNFYGKPGEASNRFESWRESMLRGVELFNIALSDNAIPFVENIRLRVGSSVIHDATVHSFCPPKTPDGEQIITKGCGEQHRLGDALPVELIDRAETPALWTALTRCPDFDPKKGLPENLNRTISVNGTRVGPTELLNFFEYSKEGIKACLKVRGGYVDLSGAIHHARIYRIEGKKPVYAMVRVFQVDLMRMKDRDVFTAPLKPSTISMRAADPKIRKALVSETARQIGWLVRGDELRVDSSAFDEGIIGEVTGAYPELSAWKVAGFPEAQRMKLRPYLLAKEGLEDDEKGALRKVLDTKGWQIGIQKLLSSCRVTVIRRNCLGEERLSSENSMPVTTVLE

SEQ ID NO: 8268 - protein, 1384 aa, unidentified
  REGION 1..1384: note = Description of Unknown: Cas Enzyme sequence
MKNIVGLDLGTNSIGWAVVNGSVNDDGSEQLVKIQASGSRIIPMDAAMIGDFNKGNSISQTAERTRLRGVRRLSERYLLRRERLHRILDILGFLPFHFAQDLDRHGKIVKGKEPKLAWRKNEAGQFELISKEELAWILLNFNQKRGYYQLRGEEEKKNDNVMIINSKVIDVVKAEKDKKYEKYWYNVLLENGLLYRAAFYNDISFWKGHTKEFVLKTIKLKSGGTKQELSFLPSFDEIEKMEKKQKDKMYFKIKLKTEADIDQAHKTVGTYIYDTLLGNPSQKIRGRLVRTIERKYYKEELKLILDKQKEFHPELQDRALYAACIEELYPINEAHRNNVGNRDFTYLFLEDILFYQRPLKSKKSLIDNCPYEENQGLDKETGEIKSFPVKCIAKSHPLFQEFRLWQFIVNLRIYRKDLAQDVDVTNELLKTEEDYVALFDWLNGKKEIDQKAFLKYPVFGLKKEIENYRWNYVQDKPYPCNETRLLMLARLEKCDISIEFLTKENKNEIVKALQKFADKHDLNASFVDVFRKFPPFKKEYGSYSAKAIKKLLPLMRMGKYWSEDSIDKGTRKRMDKIITGEYDEKIENRVREKVIHLADVSDFRGLPLWLVCYIVYGRHSEAKEITQWKSPADIDSYLKSFKQHSLRNPIVEQIIIETLRVVRDIWKQVGNIDEIHVELGREMKNPADKRKKMTQQMSENENTNLRIKYLLTEFLNPEYEVENVRPYSPSQQDILRIYEEGVLNSVSDLPEEISDILKKFTETDLKKRPSRSEILRYKLWLEQKYRSPYTGEVIPLGKLFTPAYEIEHVIPQSCYFDDSFSNKVICEAEVNKLKSNLLGHEFIVKHHGEIVELPFGKKVRIFTVDEYEQFVKDNYSRTRGKMKKLLMDDIPEEFVARQLNDSRYISKVVKSLLSNIVREKGEEEAISKNVIPCTGGVTDRLKKDWGINEVWNKIILPRFQRLNELTGTNKFTTKNVGIQEIPTMPLELQKGFNKKRIDHRHHAMDAIIIACANRNIINYLNNESATAKAELSRYDLQKLLCDKAKTDNNGNYKWVIRKPWASFTQDTYLALENIIVSFKQNLRVINKATNRFLHYNEEGKKIFVKQGKGDNWAIRKSMHKDTVFGEVNLRRIKTVALNEAMKNPQSIVVKDFKRKLLELWNLGFDAKRIKKYFEDNRETWSDINLSKIEVYYFSKDTKDRFFATRKPLDTSFDRKKIENNITDTGIQKILLRHLELKDNNPDIAFSPDGIDEMNRNIIQLNNGKYHQPIIKIRWYEQADKFAVGQTGNKFSKFVEAAKGTNLFFAVYESNILDKKTNTIIKKRNYATIPLNVAIERQKQGLPVAPEDENGNDPIFVLSPNDLVYLPTDDELANGIIAQPLDRGR

SEQ ID NO: 8269 - protein, 1130 aa, unidentified
  REGION 1..1130: note = Description of Unknown: Cas Enzyme sequence
MMNGLVLGLDIGISSVGVGVLKKDTGEIIHANSRLFPAATADNNVVRRSIRQARRLTRRKRHRAVRLHDLFEDYGLLTDFSKVSINLNPYKLRVEGMDIQLTTEELFIALKNIIKRRGISYLDDASEDGGTVSSDYGKAVEENRKLLSEQTPGQIQLERFEKYGQVRGDFTVVENGEKRRLINVFSTSAYRKEAERILRKQQEFNNKITDDFIDDYLTILTGKRKYYHGPGNKKSRTDYGRYTTKKDSEGKYITLDNIFGVLIGKCTFYPDEYRASKASYTAQEFNLLNDLNNLTVPTETKKLSEEQKKTIIEYAKSAKTLGASTLLKYIAKMVDASVDQIHGFRIDPNKKPEMHTFDVYRKMQSLETFNVNEMPREVLDELAHILTLNTEREGIEEAISAKLKDTFSQDQVLELVQFRKNNSSLFSKGWHNFSLKLMMELIPELYETSEEQMTILTRLGKQKSKETSKRTKYIDEKEITEEIYNPVVAKSVRQAIKIINEATKQYGIFDNIVIEMARENNEEEAKKDYIKRQKANLDEKNAAMEKAAFQYNGKKELPDSIFHGHKELATKIRLWHQQGEKCLYTGKNIPISDLIQNQYKYEIDHILPLSLSFDDSLSNKVLVLATANQEKGQRTPFQALDSMDDAWSYREFKSYVKDSKLLGNKKEDYLLTEEDISKIEVKQKFIERNLVDTRYSSRVVLNALQDFYKNHHFDTTISVVRGQFTSQLRRKWGLEKSRETYHHHAVDALIIAASSQLRLWKKQNNPLISYKEGQFVDSETGEILSLSDDEYKELVFKAPYDHFVDTLRSKTFEDSILFSYQVDSKYNRKISDATIYSTRKAKLDKDKSEETYVLGKIKDIYSQAGYDAFIKIYNKDKSKFLMYHKDSQTFEKVIEEILRTYPSKEFNDKNKEVPCNPFEKYRQENGPIRKYSKKGNGPEIKSLKYYDKNIPESFINITPSNSKNKVILRQLNPWRTDVYFNHQTEKYELLGLKYADLQFEKKTGTYSITIDKYNEIKEKEGVGEQSEFKFTLYKNDLLLIKDTKNNEKQIFRFLSRTMPNVKHYVELKPYDKAKFDGNQPLITIFGNVAKGGQCLKGLNKSNISIFKVKTDVLGNKHFIKKEGDEPKLKF

SEQ ID NO: 8270 - protein, 918 aa, unidentified
  REGION 1..918: note = Description of Unknown: Cas Enzyme sequence
MTQKILGIDLGTNSIGTSVRNTDLGNNLVDQLEFFSSDIFNASVNGEGVNGGKGGREYSLASSRSAKRRKRRLYEHRRYKLWATLDLLIKNNLCPMTPESLEQWRTYDKKKKLFRQYPIDDKAFHSWIILDFNGDGKPDYSSPYQLRRELVSVQLDFNQPIDRYKLGRALYHIAQHRGFKSSKGETIAEQEKQEDDSKKNKNSALTEEHVDVVNAMKASEEKLSKGLLVYMQEHNLKTVGAAFAQLEDEGIRIRNNSEYKAIRSQHQDEIKEIFKFQKGLSEQTELLDTLISEKQGIGTIFYKRPLRSQRGNVGKCTLEPHKPRCPIGHPLFEKFRAWTFINNIKAKSPDSDSAEPLPMDLKINIYNKLFLSRVKEDFKFEEIRYFIEKQWGVALSKDDKTINYRDDTSVAGCPITARMIKVLGENWENFQVLGTKERQTQGKSNNALHQVCYTAEDIWHLCYDAEDSGKVRTFAEEILGWDEKKASELVRLWSAIPQGYAMLSQKAIRNINRMLLFGLKYSDAVLLAKLPDILELSDEDIQTIIKKAQQLEEVVNEEKRIGNIVNSLIANYKAESLEHRFADHNYEYQLDESDEREIIKHIESNIGKQRWELMDADEQTSILEGVRSGYQAFFARHKRTFVELPQLGKRLVELLSKEYPSVEKKQWERLYHPSQIAIYRPILLDKSDEKRRLGNPDIGAIKNPTVMRTLNNLRRRVNQLLDDGVLVPNETRVVVETARELNDANAKWALEKYQKTRRDENAQIKKILEEFYSKPNGITDTDVDKARYVIEQCEEDNYKSKKEIGTYSKDIQKYKYWLEQGGQCLYTGRVISLSNLFDSNAFDIEHTIPASVSFDNSDQNMTLCEAHYNRFIKKNNIPTAMPNYEKDVTIDGKLYTAIKPRLEKWKKRIERLSRNVES

SEQ ID NO: 8271 - protein, 1220 aa, unidentified
  REGION 1..1220: note = Description of Unknown: Cas Enzyme sequence
MKKILGLDLGVGSVGWSVISCDDEHRPLEILGMGSRIVPLTPDESNEFSSGNAASKNQSRTQKRTARKGYDRYQLRRQALTVKLRELGMLPDEALIKLPVMDLWTLRARAATPGEKLSLAEIGRVLYHLNQKRGYRHSKEDDSADKTQRDYVQAVNKRFQEIKNEGLTIGQHFAVKLKESEVITDKGAFYNYRIKEQVFPRAAYVEEFDRIIQCQREFYPEVLTEANVNEIRNEIIYYQRPLKSSKHLVSVCEFMQRELFDAEHNPIRNGKGEIVVAGPKCAPKSSPLAQVCKIWEEVNNIRITNKENDEYFISIDNKHEIFDFLNTHEKMKADDLFKILGLAKNSGWSADRAMSKGMVGNTTRVALMKALKGRRDIDEILRFDLREVESNQVNADTGEVLMEIGAECESEPLYRLWHIIYSISDKNEQKATLEKQFGITDESMLESLCRIDFVKQGYSSRSFKFMRKILPYLMDGAKYSEACDAVGINHSDSITKAKNQARELLVKLPQLQKNELRQPVVEKILNQMINVVNAVIDKYGAIDEIRVEMARELKLSKEGRESAAKNISDRKKANEEIARRIEELGLVPSKNKILKYRLWEESGKRCFYCGQPVSAAEFLNGLDVEIEHVIPKSLLFDDSFSNKVCACRKCNAEKDNATAFDFMKGRGENAFEDYLKRVETAFKENKISQTKRNRLLTPADKIPKDFISRQLVQTQYISRKAMEILNQVCRNVYGSSGDVTAYLRRIWGYDEILHSLDLPRYREGNLTGDVTYVHKGQTHTEERIKDWSKRLDHRHHAIDALTIASTRQSIIQRLNTLNAKTAIGEEQISLDKWTLAQAHFSVADVADHVADILVSFKSGKKVTTPGKRYVYKAGRRRVAQENILVPRGALSEESVYGRIKSIEEKVPVKKLFERVDDIVKPRIRHLVRERLEACGGDCSKAVSSLKKSPLYLDEENTIMLEYGSCFKPEYVIKYSLNSIKAKDAVSIVDKHVREVVTARLAAFGDDPKKAFAEPLYADEAGKIQIKTVRCYTGLSQVVPVKKDADGNDIGFVKPGNNHHIAIYKDADGKYQECIVTFRDAVERKKYGIPVVVRKPAAVLDTVIDKNVPEDLAGGLPSPEWTFVMSMQQNEMFVLGMGDDEFNDAMAGRDYKSLGEHLYRVQSISHADYYFRSQYETMLDNSKNAMAMKKYYRIRSFKALFALNPRKVSISMLGEISLKDD

SEQ ID NO: 8272 - protein, 1367 aa, unidentified
  REGION 1..1367: note = Description of Unknown: Cas Enzyme sequence
MNLRNIPSYNVGLDIGTGSVGWAVTDENGNLCHFKNRPTWGSRIFPSANTAAETRLKRGQRRRYDRRRQRLDLLQSLFDEEMAKVDPEFFIRLRQSKLRVEDREEGHKEYRYPFFNSSDFTERMYYKSYPTIYHLRKHLIESDQQEDLRLIYLAFHNIVKTRGNFLYQDTPSLSAKDASMSEAIEELLNALVLWADTAYDFEIDEVDSEKLRKVFEDTSLTRAEKKDEALKVLTLEDKKIAKELINAVLGYKANFNTIFKIEAEKSAFSFDNDEQREAFIASVPDEGMALYEALQKAYSAYILMDIIEDANGKSVSYSMVAKYNKYGEDLKTLKDLVKEYCSTKYSEFFRGERYEAPYQKDYDKSKVKGYTKYNEVRGAKYDDFKKEVENLFKGTAATSDSRYQDMMTKFANGKFLRRLKTSDNGSIPFQLHLEEMNAIIDAQEKFYPFLSEIRHKLNSLVTFRIPYYVGPLTQKSAALDASGKPRFAWSKRQEGKEGEKIYPWNWEEIIDKSGSAVKFIERMTGTCTYLYGEPVLPKCSLLYEKFCVLNELNGAKWSQDNDKWYRFDADDRLSIYEELFERYKSVSFKKLEDWLKQRGEAFPHVKGGQGEGKFESKLSSHHFFKELLGTDEWSDQTRQMIEELILWNTLFEDKKILKEETTKKYGDVLTAEQIKKFCGHRFMGWGRLSKKLLTGIKTEVDFRKMSVMDLLVEGDPYGEHVGSSLILMEILHNKNFEFNKEIEAHNEKYFSKDQSVEDLPGSPAVRRSVNQALRIVEEIAKIAGKPAVHIYIESTRDEDEKKRGKRTTKRNENIKKMLSELKDEYKNADIFTQLAKHSDEQLSKRLSLYFMQNGKSMYSGKAIEINRIADNAYCQIDHVLPQSYIKDDSFENTVLVLSEENQRKGDSLLLDADIRRKMAGLWHELHRVKLIGDKKYKNLTRSVVTDRQMEGFINRQLVETSQIVKFVRMLLKSHYPDTEICSIKASLSHEIREKYDLPKIREVNDYHHAHDAFLACEMGRFLSIRYKEAFTNPVGLTKLMRKFVKKESEEAQKQHRMPGTTPFFVASFSKPGFDLETGEVTRDEWNPIEEVEKIKRTFGFKQCFVSRMPEMTSGAFWKETVYTPKDKTMTLALPVKGNLLPEKYGSYSSVQPSFLAICRGKKKNKSQYYVVDIPRTKSVELYKNSTKTSDYLSKVLESSGVEFEELIYPALLKNQVIEYDGQRFYVVSSAELRNGVAPSFSYEDYVMISNYFDGNQNEDANALVIYDLLWNIISTRMPVLADRLKLDSKRAVFATLNLEDEKKVIISLLNAINGSTVPSDTKKIGGSTRTERLFISISTQLNRSSVEFYVIEQSVTGMFERRRRIGL

SEQ ID NO: 8273 - protein, 1408 aa, unidentified
  REGION 1..1408: note = Description of Unknown: Cas Enzyme sequence
MTDNNEYYIGIDLGTSSVGWAVTDQNYKILKYKDKNLWGTRLFEEGQTAQARREKRSLRRRLKRRLHRIKLLQDIFKDEIAKVDNKFFLRLNESKYYKEDKDDSLLTDDTLFAYINYTDKDFYKEYPTIFHLRKDLMESDDKKDIRLIYLALHHIIKNRGNFLYEGSIENITDFKKSFTELNEYLKDNGYISFEEENFDKIEKTISNKSLKKSEKQKEFKAYIKDTNLIEILNGILGLSTNLAKLFDDEEIVDEKEKAKTIKLGEKEYDILRVEIEPILNEKIALIDIIKGLYDWTIINDILKNSSTLSEYRVKLYEEHKEDLSKLKYLIKNYGTSEEYYKAFKDSKEKNNYVAYIGLNKKGKHKEAIDKISTGDDPLKQVNKYFKNILEKYKDNIKEEDIKLYEEILEKLSESNCLKKIRTNINGSIPYQLHKQELEKIIEKASKYYSFLNDKDENGYITKDKIIKIMEFKIPYYVGPLNPYHKDTSGHVWIEKKSNEKIYPWNFEEVVDTSKTAEEFILRMTNKCTYLIGEDVIPKSSMLYQKFMLLNELNNMKIRGDDIAKGLKDDFIENLFKKFSKVTIKQLCNYYEAKYNVKLDKKDISGLDISFKSNLSSYITFKNIFKDKNIEINPYNEMIENIIKYKTIYADNKEIFERKIRKDYSDILTEEEIKKINTLKFSGFGNLSRKLLLEVPGESPETGESFENIMEALESTNDNLMEILASVNNKRGYTFLENINEINKGNDIGKKELTYENIMNERYISPAVKKSTWQALKIIEEIIKIKGCLPKKVFLETTREEDKVKKRKTSRKEQIKELLKNINEEYFEQDKNNLETLTEDQLRNEKIYLYYKQLGKSMYSDTLINFHDLIHNNTKYDIDHIYPYSKSGDDSIVNKVLVTKDENNLKQDNYPLSEEIRIKNTARWKMLLDKNLISEETFRRLTRNTPLTSEELSGFVARQLVETSQSIKILKDVLEEYYKDIDVNMIKVSVSKKMREALGIKKVRELNNFHHAHDAYLAVLSGDIYTRRFTKNIYKYFKDDNLTSQERKNRRDYDLDKLFVNDVIIKKFKKKSDNNETIVEETKIWSPIRINEIREMMDTSNILVTKKIEESHGNFYDETLYKKTDKNTSMRSLKEGRLSDISKYGGFNSLSTAYFFIVKFKEKNKEKVQIISLPVIDMKKITNKDDLRNYCINTLGMENPIILAEKVRQNTKITYNNHEYRITGKASGGLKFTLNNNVELYLENDKVSDLYNILLYLNKYNKISNKYIKDKKLVFASEEEKELFEKTEYKIRKYYEKDDWFILEEDTLNNIYLLFKEKCETIYKNMKYNIKDIFYNSDSKFNNLKFYEKASVIKETLKLFDVTAQIPNYPEFNYTSGDRIRISNNILGNKFYIHNESVTGIFENKKRIK

SEQ ID NO: 8274 - protein, 1190 aa, unidentified
  REGION 1..1190: note = Description of Unknown: Cas Enzyme sequence
MLMSKHVLGLDLGVGSIGWCLIVLDAQGDPAEILGMGSRVVPLNNATDAADFSVGKAFTANQERTARRTMRRGFARYQLRRYRLRRELEKVGMLPDAALIQLPLLELWELRERAATAGERLTLPELGRVLCHINQKRGYRHVKSDAAAIVGDEGEKKKDSNSAYLAGIRANDEKLQDEHKTVGQYFAEQLRQNQSESPTGGINYRIKDQIFSRQRYIDEYDQIMVAQRVHYPDILTDEFIRMLRDEVIFMQRPLKSCKHLVSLCEFEKQEKVMRVQQDDGKGGRQLVERRVKFGPKVAPKSSPLFQLCRIYEAVNNIRLTRPDGSPRDITPEERDKIVTYLQSSASLSFAALKKLLKEKALIADQLTTKSGLKGNSTRVALASALQPYPQYHHLLDMELETRMMTVQLTDEETGEVTEREVAVVTDSYVRQPLYRLWHILYSIEERAAMRRALITQLGMKEEDLDGGLLDQLYRLDFVKPGYGNKSAKFICKLLPQLQQGLGYSEACAAVGYRHSNSPTSEEITERTLLEKIPLLQRNELRQPLVEKILNQMINLVNALKAEYGVDEVRVELARELKMSREERERMAEGNRRREKENTAIAEKIRECGLFPTKSRIRKYMLWEEAGRQCLYCGQILTLSQCLNGDDMEVEHIIPKSVLYDDSYGNKTCACRRCNKEKGNRTALEYIRAKGWEAEYMERINDLLNEKKISYSKHQRLRWLKEDIPSDFLERQLRLTQYISRQAMAILQQGIRRVSASEGGVTARLRSLWGYDDILHTLNLDRYDSMGETERVSREGETTEKLRIKDWSKRKDHRHHAIDALVVASTRQGYIQRLNRVSSESEREAMSEEIEVQKATKTDKLSLLERWLTQRPHLSVRAVSDKVAEILISYRPGKRVVTRGRNIYLRHGKKCVQSGLLVPRGPLSKETVYGQITVNGEPQIVCKYDLHSLKAKDVDYVVDLALRKRLKELLAQHGGKEKEAFAGDVYMDEAGTQGPIRSVRCFTGLDRAKMKAVKYDEQGEAVGFVSPRNNHHLAIYRTPKGKLVESIVTFWDAVDRARYGIPLIVTHPREVMEQVLQRGDIPELVLSLLPSSDWMFVESIQRDEMVLVGLSDEEILQAVEAQDYCKLSEHLYRVQKIATGNYMVRYHLETDTDTGNRSGRIPKLYQLSLTSYEGKNVRKVRVDLLGRISLL

SEQ ID NO: 8275 - protein, 1145 aa, unidentified
  REGION 1..1145: note = Description of Unknown: Cas Enzyme sequence
MTQKYSYSPKKYSLGLDIGTSSIGWAVLDLDKERIHDLGVRIFERPEDPQNGDSLAKPRRDARSARRRLKRRRQRLNNLKQFFIDQNILTRDRIEEVLSGKSEFNKLDVYALRSKALTEELSPEELLKVMYQIAKRRGFKSNRKVEEESEKEGGRVSKALKTNEKFLAENGYKTVGEALSRDENFASHKRNKRDDYTNSFSRGDFLHELEEIIEVQKRYVLKNVSDTAINEMLYGLDDDKNVVNVSAIMYQRPFMTEELIKKMVGNCTFEEDEKRAPRASYSFEIFRLASDLSHLVFIPRDASKRQAKRENLEIRLSSEQINKVIEAAKNQKSLTYKKVRSIAGISEDYVPKYTHGKKKDGDEFGEGNAFGGLKAYHDIKTALKNLPEDWVKIDNESMINQIAYILTTQKSDEGIKAELNALPISDDAKNAIIKIKATNFGSFCHLSIKALQKITPHILNGMTYDKACEAAGYDFKKQSASLEQITNPVVKRAISQTLKVVRAIERKYGKPYFIKVETARDLAKNFKERNAIKKENEENQGYNEDIKSIIADGYEASPKTKGGKQLLSHLKELSVPLNKNADFNGQQIIKVKLYREQNGICPYSGKPIDFDTMLQDDNAYQIDHIVPFSRSNNDGITNKVLVLTEENQKKSNKTPFEYFGADENRWKEFVARVESIYKTRDIKTDDKATNVINYKYNGYAMKKKQNLLLQDYKNDSWNVRALNDTRYITRFIQNYLRQNVGFAEGEEKQHVIAPNGTTTAYLRKRWGLAKDRSEDVLHHAKDAAVVAAIDHKIIMQANLHAKRHEIKELLAAAKTMEEKTDKLTGEIIDEDEFNKAQRRKNAMFVLSSKHFPQPWDGFGKEVMKRTLNVDIKTLQNELRGLDNYDEEFRLSVKPIFVSRMPRRKATGSAHKETIRSPKVKDGDQRTVRVPLKKVKRKDVENSTLKESDKWLYKKLLERLDACDDNPEKAFAEPIYKNDKKTDKNGNKLSPVSTIKVYSTQPSGFYINDDKAFVNNGSMVRLDVYQKPDKKGKIEHFFVPVYAHQVGKNKPAPTKILPAPKGFTDVDETFAKVCSLYPNDYVRIYLKNEIREGYYIKYNIANGAMQLLPNYAPGKNQDTFVQAYGKNAQAIERYDISILGDNYRWL

SEQ ID NO: 8276 - protein, 1118 aa, unidentified
  REGION 1..1118: note = Description of Unknown: Cas Enzyme sequence
MTQKSSYLPKKYSLGLDIGISSVGWAALDLDKERIHDLGVRIFERPEVPKTGKSLAEPRRAARSTRHRLRRRRQRLNYLKRFFIDNNLISESRIRDILSPTHPKKWRPAYDPYDLRIKGLGEKLSLEELFVALYHIAKRRGYKSNRISVEKQDVEGSQVLSAISENKLLLEKYKTKSVAKVLTLDEKFKNNKRNKTSTYKNSFVRKNFEDEVILLLESQKKFGLKLPYEKMQTLLYGDVKNGNYNGIFSQRPFMTKELIEKMRGNCEFEPEKPRAPKASYSFELFRLAQNLSHLRIVVDQETRQLSEDEIAKIIEKAKNVKVLKYEHIRDILGYKGDQSFSFAQGMIRGKIKNDDKKNGEGNKFDSMIFYHTVKKNLEQYPKDWNILAADNFELLDNAGLILTVNKDDSSLRAELSKLDISTDAIEALLPINVSGFVHLSFNSLHRITPWLLRGLNYSEAVEKAGYSFFQSLSGNKKKLPPLSKKQANQITNPVVKRAVSQTIKVVNAVIGKYGLPCSVKVEAASELAKNAQERDKIKKIQDENAEYNEKIKQKLINEFNIPTPTGLQITKFKLREQQNGVSLYSGTEINLENLFTDEHYGEIDHIIPFSRCGNDGLNNKVLVFTDENQEKGNLTPYEAWGGDDKKWTQFEARVRATAGLPAAKRDRLLSKSKPVEDWNVRALNDTRYISRFLRQYIRDNLDFPKIEGKTGAQRVFSPSGPITSYLRRVWRVGNKNRDDNNLHHAADACIIAATDPGIIQKVSSLNKYYELFRYSDKNEVIDKLTGEVLNRNQFEQHIADLEPWHDFGKEVRKRSKLYDTPSELHNELTGLKNYDEEFRLSTLPIFVSRMPKRSGKGSTNSETFRSPKIVEGYLDEKGKPAIARKQRVPLHSVDLKKLYDSPIRETDPKLYKILEQRLKDFNGDPAKAFVESVYKPTKDSKRGNIVRSIKIYNTRDSRSGFLVNEQRAFVNNGKTVRLDVYKRKNYKDIYEYYFAPVYTHLINAQKIEVLPTPTGRSKNEKADFDTIRTEDDKIYATLENGFIKQFSIYPNDYVRIYFGNEIVEGYYVKYNTNDGSLKLIKHSETSKNDNNLISKSAKTATLIERYDISALGDNYRWL

SEQ ID NO: 8277 - protein, 1508 aa, unidentified
  REGION 1..1508: note = Description of Unknown: Cas Enzyme sequence
IGTQLYFNQTLSSLNMKRILGLDLGTNSIGWAYLVFDDNGNLIEKIRLGSRIIPMSQDVMGKFESGISVSQTAERTQYRSTRHLRERSLQRRERLFRVLHMMGFLPQHFDQSIGWDKNNNKTYGKFLDESEPKLAWRRNKDGKMEFLFMDSFHEMIADFMAHDSSWTPDQKVPLDWTIYYLRSKALRAPISKEELAWIILNFNQKRGYYQLRGEEEEEDKTKRVEFLEARVVRVEATDRKKGKSTWYNVYLDNGMIDRRTSAISLENWVGQTRQFIVTTEYEADGVTLKLDKEGNVKRSFRIPKDDDWTLRKKRTEHDIEESGLHVGTFIYQALRDRPKVKIRGNFVHTIERKFYKQELRAILTKQAEFIPELQDQALLQDCIANLYPSNEAQRQKLRGKDFIYLFLDDIIFYQRPLKSKKNLISNCSLEKRISIDHSTGECIDRPIKCIARSNPYYQEFRLWQFITNIRLFDRDSQEDVTSRYLSTSEEWERLYAFLYNRKEINQDTLFKEFFGWKKPKGRNSVYPIHWNYAEDKEKTYPCNETRATLLTTFEKAEMNTAELNTREGEMQWWHLLYSVTDKLELEQALRKRGLSQEQIRVFTRIKPFEKDYGAFSEKAIKRFLTLLRKGSFWNADAIDTTTRARIDNIIAGNIDEKLRDKMQHKSYPLQKLEDFQGLPVWLASYIIYGRHSEVSEIVRWETLQDLQNYIHNFKQHSLRNPIVEQVVLETLRTVYDIWKKFGDIDEIHLEMGREMKKTAKQRQDDSQRIQRNENTKLRIKALLMELKNDATISDVHPYSPSQQDILRIYEEGALATLEKSDQDYDEIIKISQKSQPSASEMKRYKLWLEQKYQSPYTGRFISLTKLFTPAYEIEHVIPQKRFFDDSFSNKVICEAEINKAKSSMLAHEFITKRGGEIIHSQSLGDLRVLKVDDYESLVKHIYKDNATKRRKLLLDDIPTEFIQRQLNDSRYIARFIQSVLSNLVREEGEEEAKSKHVIVCTGGITNRLKKDWGLQDVWNHLVSPRYQRLNELTNSEDFGHWENKDGKRVFQTSMPIELQKGYSKKRIDHRHHAMDALVIACASHNIINYLNNENAASPQSREDLRKQLCDKGRTLRKPWKTFTQDVEQALHGVVVSFKNYVRIINKATNFYQHYEQGKKKYIPQKGETLWAIRKPMHKGMPFGRVNLRYPLMVSLAYALERPQNIVDKALREYILHLIAQNFDTKQLKKHFKSLGNKFENRDISKVEIWVMSDDREPLVASRKPLNENFDKESIAKITDTGIQKILLNFLKYKGDDPKVAFSPEGIIELNANIAKFNDGKSHQPIKKVRIFELLGNKYPVGQRGNRKTKFVEAQSGTNLYFAIFEDGEGKRSYETIQLIEVVERLKQGLSPVPDSNDKNISLKFFLSPNDLVYVPNEEEIGSNMKVEDLQRERIYKFIDSSNTTANFIPHRIATTLLNVKTPINNIQNELGLGSPQSKHQRALTGEIIKSVCWKLEVDRLGNITKIIR

SEQ ID NO: 8278 - protein, 1213 aa, unidentified
  REGION 1..1213: note = Description of Unknown: Cas Enzyme sequence
MNKHVLGLDLGVGSIGWCLITLDEQDNPAEIVAMGSRVVPLNDPNDANDFSIGKAFTANQDRTARRAMRRGFARYQLRRHRLHQELSKVGMLPDAQLIQLPLLELWELRERAAQPGERLTLPELGRVLCHINQKRGYRHVKGDSLSTVTEEGEKKKDSNSDYVTAINQRYAHLQEAHLTVGQYFAEQLRSSQTESGAIVYRIKDQVYPRQAYIDEYDQIMQVQSAYYPEVLTPHFIKMLRDEVIFMQRPLKSCKHLVSLCEFEKQEKVMRVQQDDGKGGKEVVERKIKFGPKVAPKSSPLFQLCRLYEAVNNIRLTYPDNSPRPLTNEERTKLVAYLQGNEATTASKKKKESTTEKPKKLTAPKLTYKVLTKLLKIKEELRADKLLESGITGDTTRVALASILQPYEQYHHLLTMELETRPMKVQTTDEATGEITEYEVAVLTDSYTQQPLYRLWHILYSIEERDAMRKALITQLGMSEEDLDGGLLDQFYRLDFVKPGYGNKSAKFMCKLLPQLQQGLGYSEACAAVGYHHSGSLTREEIAERILLPQIPLLQRNELRQPLVEKILNQMINLVNTLQAEYGIDEVRIELARELKMSREEREKISIANRSREKENKKIAEHIQECGFYPTKTRIRKYMMWEEAEHRCMYCGKEISLSQCMNGDEMEVEHIIPKSILYDDSFGNKTCACRRCNKEKGNLTAREYIQSKGWEADYRKRLTDLLQKKSISYSKNQRLLWLKKDIPTDFLERQLRLTQYISRQAMSILQQGIRRVAASEGGVTARLRSLWGYDDILHCLNLDRYESMGETELVPKHPNSELDESMKCRITDWSKRKDHRHHAIDALVVACTRQGYIQRLNRLSSESDRDEMRRETELHKEPTTDKLSLLERWLSQRPHFSVQDVSDKVAEILISYRPGKRAVTRGRNIYLRQHKKCVQAGLLVPRGPLSKETVYGEININGQRQIVCKYDLHSLQAKDVDFVVDLGLRRKLKELLELHGGKEKEAFADPIYLDQARTQPIRSIRCFTGLDKEKMKPVKYNEQGEAVGFVSQQNNHHVSIYRTPKGELTESLVSFWDAVDRARYGLPLIIKHPREVAKQVLQRDDIPEKVLRLLPPADYEFVDSFQQNEMVIVGLSDEELQRAVDQQDYRTLSEHLYRVQALSSMYYIFRYHLETSVSDNKNTTGRIPKFHRIRSLKAYEEKKIHKVRIDLLGRITLP

SEQ ID NO: 8279 - protein, 1066 aa, unidentified
  REGION 1..1066: note = Description of Unknown: Cas Enzyme sequence
MMEKFHYVLGLDLGIASVGWAAIEIDKETETSIGLLDCGVRTFERAEVPKTGDSLAKARREARSTRRLIRRRSHRLLRLKRLLKREIFRQPETFKDLPINAWQLRVKGLDSRLNEYEWAAVLLHLVKHRGYLSQRKSEMSETDSKSEMGRLLAGVAENHQLLQQEQYRTPAELALKKFVKHFRNKGGDYAHTFNRLDLQAELHLLFQKQRELGNPFTSPELERQVDDLLMTQRSALQGDAILKMLGHCGFEPEQFKAAKNTFSAERFIWLTKLNNLRIQDQGKERALTADERTKLLDEPYKKSKLTYAQVRKLLSLPQTAIFKGLRYDLEHDKKAENSTLMEMKSYHKIRQTLEKSGLKTEWQSIATQPEILDAIGTAFSIYKTDEDISHELKTCRLPENVLNELLKNINFDGFIQLSLTALRKILPLMEQGYRYDEACTQIYGNHHSGSLQQESKQFLPHIPIDDVRNPVVFRTLTQARKVVNAIIRLYGSPARVHIEMARELGKSKSERDRIEKQQQKNKKERENAVAKFKEDFPDFVGEPRGKDILKMRLYEQQHGKCLYSGHDIDIKRLNEKGYVEIDHALPFSRTWDDSQNNKVLVLGSENQNKRNQTPYEYLDGANNSQRWLEFQARVQTCHFSYGKKQRIQLAKLDDETEKGFLERNLNDTRYIARFMCQFVQDNLYLTGKGKRLVFASNGGMTATLRNLWGLRKVREDNDRHHALDAIVVACSTASMQQKITKAFQRHESLEYVDTETGEVKFRIPQPWDFFRQEVMIRVFSDQPCEDLVEKLSARPEALHDNVTPLFVSRAPNRKMSGQGHLETIKSAKRLSEENSMVKKPLTTLKLKDIPEIVGYPNREPQLYAALKTRLETHDDDPIKAFAKPFYKPNKNGELGALVRSVRVKGVQNTGVMVHDGKGIADNATMVRVDVYTKAGKNYLVPVYVWQVVKGILPNRAVTSGKSETDWDLIDESFEFEFSLSRGDLVKVKMSSKKEEIFGYYNGLDRSNGSIGIREHDLEKSKGKDGIHRVGVKTASEFNKYYVDPLGKEIHQCSSEPRPTLKIKSKK

SEQ ID NO: 8280 - protein, 1194 aa, unidentified
  REGION 1..1194: note = Description of Unknown: Cas Enzyme sequence
SFDIKNNDIQKIFSEFISIYDNIFEGSLLSGQNAQVEAIFTDKISKSAKRERVLKLFPDEKSTGLFSEFLKLIVGNQADFKKYFELEEKAPLQFSKDTYDEDLENLLGQIGDDFADLFLVAKKLYDAILLSGILTVTDPSTKAPLSASMIERYENHQKDLASLKQFIKNNLQEKYDEVFSDQSKDGYAGYINGKTTQESFYKYIKNLLSKFDGADYFLDKIEREDFLRKQRTFDNGSIPHQIHLQEMNAILRRQGEHYPFLKENREKIEKILTFRIPYYVGPLARDNRDFAWLTRNSDEAIRPWNFEEIVDKASSAEAFINKMTNYDLYLPEEKVLPKHSLLYETFAVYNELTKVKFIAEGLRDYQFLDSGQKKQIVTQLFKEKRKVTEKDIIQYLHNVDGYDGIELKGIEKQFNASLSTYHDLLKIIKDKEFMDDAKNEELLENIVHMLTIFEDREMIKQRLAQYGSIFDAKVIKALTRRHYTGWGKLSAKLINGICDKKTGKTILDYLIDDGYSNRNFMQLINDDGLSFKDIIQKAQVVGKTDDVNQVVQELPGSPAIKKGILQSIKIVDELVKVMGHKPESIVIEMARENQTTAKGNSKSQQRFKRLSNAISKLGSNILKEHPTDNTELQNDRLFLYYLQNGKDMYTGEALDINQLSSYDIDHIIPQAFIKDDSLDNRVLTSSKENRGKTDNVPSLEVVQKRKAFWQQLLDSKLISYRKFNNLTKAERGGLDREDKVGFIRRQLVETRQITKHVAQILDARFNTEVTEKDNKKRNVKIITLKSNLVSSFRKEFELYKVREINDYHHAHDAYLNAVVAKAILKKYPKLEPEFVYGDYQKYDLKRYISRSKDPKDVEKATEKYFFYSNLLNFFKEEVHYADGTILKRENIEYSKDTGEIAWNKEKDFATIKKVLSLPQVNIVKKREVQTGGFSKESILPKGNSDKLIPRKTKDILWDTTKYGGFDSPVIAYSILLIADIEKGKAKKLKTVKTLVGITIMEKAAFEKNPITFLENKGYHNVRKENILCLPKYSLFELENGRRRMLASAKELQKGNEIVLPVYLTTLLYHSKNIHKLDEPEHLEYIQKHRNEFKDLLNLVSEFSQKYVLAEANLEKIKNLYADNEQADIETLANSFINLLTFTALGAPAAFKFFGKDVDRKRYTTVSEILNATLIHQSITGLYETRIDLSKLGED

SEQ ID NO: 8281 - protein, 1031 aa, unidentified
  REGION 1..1031: note = Description of Unknown: Cas Enzyme sequence
MNVKNQNYILALDLGVASVGWGLVGLDEQEKPSSIIDLGVRLFDKSEDPKTGESLNSAKRAYRLQRNAYKSKKVLVKQVKALLLKHNLLQNTELSQHNLSHKTWELRVKALDNKLSNKELASILIHIAKNRGFQTKANNGDDKKAGLVLSSISNNHQLLNAYRSVAELAVKHFQLNDSHIRNKAGNYTHSFARQDIVNEVELIFKNQRQFGNQNATIELEKAYIELINYQKPSLTGDSLLKMVGKCTFEKEQYRAPKASYSAERFILLSSLTGLKILENGEQRTLTQSERELLIQKAYELNKITYAQIRKWLGLSDSVIFNFLRYQKLDKESAETKVFVELKHYHQLRKAFENANLENEWNVIANNGQLLDEIAFTLTICKEESEIRQRLAKLNGLNDKVIDVLVNIRFTQFINLSLVCLNKINPLMEMGKTYLEATSEIYGAYNRKTGTKLNELLPVIPVSDISNPIVLRTVTQARKVINAVIRKYRQPAYIHIESGRDLGKSYQERQEITRQQAKNAKENEKLKERLVKEFNVRATNSNVLKLKLYEQQNGKCLYSGKTIDSNKLFANGYVEIDHALPYSRTYDDSANNKVLVLASENQTKRNRTPFEWLNGADNSAQWQNFKSLVEASDFAYQKKQKLLTKQLADNEFKARNLSDTRYINAYLSKFIADNLLLVGKGKQKVFTPNGRITSFLRYNWGLTKNRQENARHHALDAIVIACANEYMQKEITQFAQKRECNELAINEYIDVKTGEIKQLTFPEPWAGFSKELTARVYSDNPKAELADMENIDLNTVKPLFISRMPTRGASGQGHKETIKSIKNTGENRSVKRVDLKSLNLDMLERFVAKDTEKALYKSLKKRLKESKNDPLKAFAEPLKQRGKIVRAIKVWETQKSGLQVRNGIADNGDTVRIDIYTKDGKNYIIPVYAHHIAKKVTPNAMITNGKTEDDWDKLDDTYQFKFSLFPNDLIKISNKKESFTGYYKGADRSNGGLTLLSHDCVDANKIKRFGPKTATIEKLEVDVLGNVAGLKA

SEQ ID NO: 8282 - protein, 405 aa, unidentified
  REGION 1..405: note = Description of Unknown: Cas Enzyme sequence
  MOD_RES 118..121: note = Any amino acid
MLRRQAFKFEIMPNGEQTRRINQFCGCSRFVFNRGLDWQNAQDNSVTFSYTKISKLLPQWKKAFPWLEDCHSQVLQQSLKDLDRAFKNFFQKRSNFPKFKKKGVKERIRFPQGCKLEXXXXKERIRFPQGCKLEQHNNRLYLPKIGWVRYRNSRNVVGEIKNVTVSKKCGRFYVSIQTEYEVEISQHQGGEIGIDMGIVRFATLSNGEYFEPLNAFKTYKGKLAKLQRQLKNKIKFSKNWQKLQAKIAKLHHKIANCRKDFLHKISTTISKNHAMIYIEDLQVSNMSKSAQGTVEAPGQNVKQKSGLNRAILDQGWAEFRRQLDYKSQWQGGVLVAVPPQNTSRTCPCCGHTDKENRPTQAKFECVECGYRNNADVVGAINILERGWATVQRNPTGGDTAGALVK

SEQ ID NO: 8283 - protein, 1377 aa, unidentified
  REGION 1..1377: note = Description of Unknown: Cas Enzyme sequence
MKKGYSIGLDIGTNSVGWAVITDDYKVPSKKMKVLGNTDKYFIKKNLIGALLFDEGTTAKDRRLKRTSRRRYTRRKNRLLYLQEIFSKEMSKVDSSFFHRLDDSFLIPEGKRGSKYPIFATLAEEKEYHKQFPTIYHLRKQLADSKEKADLRLIYLALAHMIKYRGHFLYEESFDIKNNDIQKIFNEFISIYNNTFEGSSLSGPNAQVEAIFTDKISKSAKRERVLKLFPDEKSTGLFSEFLKLIVGNQADFKKHFDIEEKAPLQFSKDTYDEDLENLLGQIGDDFADLFVAAKKLYDAILLSGILTVTDPSTKAPLSASMIERYENHQNDLAALKQFIKTNLPEKYVEIFSDQSKDGYAGYIDGKTTQESFYKYIKNLLSKFEGADYFLDKIEREDFLRKQRTFDNGSIPHQIHLQEMSSILRRQGEHYPFLKENREKIEKILTFRIPYYVGPLARGNRDFAWLTRNSDQAIRPWNFEEIVDKASSAEDFINKMTNYDLYLPEEKVLPKHSLLYETFAVYNELTKVKFIAEGLRDYQFLDSGQKKDIFYTLFKAEDKRKVTEKDIIHYLHNVNGYDGIELKGIEKQFNASLSTYHDLLKIIKDKEFMDDPKNEEILENIVHTLTIFEDREMIKQRLAQYDSLFDEKVIKALTRRHYTGWGKLSAKLINGIRDKQTGNTILDYLIDDGKINRNFMQLINDDGLSFKEIIQKAQVIGKTDDVKQVVQELPGSPAIKKGILQSIKLVDELVKVMGYAPESIVIEMARENQTTARGKKNSQQRYKRIEDALKNLAPGLDSTILKENPTDNIQLQNDRLFLYYLQNGKDMYTGEALDINQLSSYDIDHIIPQAFIKDDSLDNRVLTSSKDNRGKSDNVPSIEVVQKRKAFWQQLLDSKLISERKFNNLTKAERGGLDERDKVGFIKRQLVETRQITKHVARILDARFNTEVSEKNQKIRTVKIITLKSNLVSNFRKEFKLYKVREINDYHHAHDAYLNAVVAKAILKKYPKLEPEFVYGDYKKYDLKRYISKSKDPKEVEKATEKYFFYSNLLNFFKEEVHYADGTIVKRENIEYSKDTGEIAWNKEKDFVTIKKVLSLPQVNIVKKTEEQTVGQNGGLFDNNIVSKKKVVDASKLIPIKSGLSPEKYGGYARPTIAYSVLVIADIEKGKAKKLKRIKEMVGITIQDKKKFEANPIAYLEECGYKNINSDLIIKLPKYSLFEFNDGQRRLLASSIELQKGNELILPYHLTALLYHAQRINKISEPIHKQYVETHQNEFEELLTTIISLSKKYIQKPNVESLLQQAFDQADKDIYQLSESFISLLKFTSFGAPGAFKFLGVEISQSSVRYKPNSQFLDTTLIHQSITGLYETRIDLSKLGED

SEQ ID NO: 8284 - protein, 1054 aa, unidentified
  REGION 1..1054: note = Description of Unknown: Cas Enzyme sequence
MENKNLNYILGLDLGIASVGWAVVEIDEKENPLRLIDVGVRTFERAEVPKTGESLALSRRLARSARRLTQRRVARLKKAKRLLKSENILLSTDERLPHQVWQLRVEGLDHKLERQEWAAVLLHLIKHRGYLSQRKNESKSENKELGALLSGVDNNHKLLQQATYRSPAELAVKKFEVEEGHIRNQQGAYTHTFSRLDLLAEMELLFSRQQHFGNPFASEKLLENLTALLMWQKPALSGEAILKMLGKCTFEDEYKAAKNTYSAERFVWITKLNNLRIQENGLERALNDNERLALMEQPYDKNRLFYSQVRSILKLSDEAIFKGLRYSGEDKKAIETKAVLMEMKAYHQIRKVLEGNNLKAEWAELKANPTLLDEIGTAFSLYKTDEDISAYLAGKLSQPVLNALLENLSFDKFIQLSLKALYKLLPLMQQGLRYDEACREIYGDHYGKKTEETHHFLPQIPADEIRNPVVLRTLTQARKVINGVVRLYGSPARIHIETGREVGKSYKDRRELEKRQEENRKQRENAIKEFKEYFPHFAGEPKTKDILKMRLYKQQNAKCLYSGKPIELHRLLEKGYVEVDHALPFSRTWDDSFNNKVLVLANENQNKGNLTPFEWLDGKHNSERWRAFKALVETSAFPYAKKQRILSQKLDEKGFIERNLNDTRYVARFLCNFIADNMHLTGEGKRKVFASNGQITALLRSRWGLAKSREDNDRHHALDAVVVACSTVAMQQKITRFVRFEAGDVFTGERIDRETGEIIPLHFPTPWQFFKQEVEIRIFSDNPKLELENRLPDRPQANHEFVQPLFVSRMPTRKMTGQGHMETVKSAKRLNEGISVIKMPLTKLKLKDLELMVNREREKDLYDTLKARLEAFNDDPAKAFAEPFIKKGGAIVKSVRVEQIQKSGVLVREGNGVADNASMVRVDVFTKGGKYFLVPIYTWQVAKGILPNKAATQYKDEEDWEVMDNSATFKFSLHPNDLVKLVTKKKTILGYFNGLNRATGNIDIKEHDLDKSKGKQGIFEGVGIKLALSFEKYQVDELGKNIRLCKPSKRQPVR

SEQ ID NO: 8285 - protein, 1192 aa, unidentified
  REGION 1..1192: note = Description of Unknown: Cas Enzyme sequence
MLMSKHVLGLDLGVGSIGWCLIALDAQGDPAEILGMGSRVVPLTNLGDDKAFSKGEAFTANQKRTARRTMRRGFARYQLRRYRLRRELEKVGMLPDAALIQLPLLELWELRERAATAGRRLTLPELGRVLCHINQKRGYRHVKSDAAAIVGDEGEKKKDSNSAYLAGIRANDEKLQDEHKTVGQYFAEQLRQNQSESPTGGISYRIKDQIFSRQRYIDEYDQIMAAQRMYYPDILTDEFIRMLRDEVIFMQRPLKSCKHLVSLCEFEKQEKVMRVQQDDGKGGRQLVERRVKFGPKVAPKSSPLFQLCRIYEAVNNIRLTRPDGSPRDITPEERAKIVAHLQSSASLSFAALKKLLKEKALIADQLTTKSGLKGNSTRVALATALQPYPQYHHLLDMELETRMMTVQLTDEETGEVTEREVAVVTDSYVRQPLYRLWHILYSIEERDAMRRALITQLGMKEEDLDGGLLDQLYRLDFVKPGYGNKSAKFICKLLPQLQQGLGYSEACAAVGYRHSNTPTSEEITERTLLEKIPLLRRNELRQPLVEKILNQMINLVNALKAEYGVDEVRVELARELKMSREERERMAEGNRRREKENKAIAEKIRECGLFPTKSRIRKYMLWEEAGEQCLYCGQILTLSQCLNGDDMEVEHIIPKSVLYDDSYGNKTCACRRCNKEKGNRTALEYIRAKGWEAEYMERINGLLDKKAISYSKHQSLRWLKEDIPSDFLERQLRLTQYISRQAMAILQQGIRRVSASEGGVTARLRSLWGYDDILHTLNLDRYDSMGETERVSREGETTEKLRIKDWSKRKDHRHHAIDALVVASTRQGYIQRLNRVSSESEREAMSEEIELQKVTKTDKLSLLERWLTQRPHLSVRAVSDKVAEILISYRPGKRVVTRGRNIYRKKTADGREVTCVQRGVLVPRGELMEASLYGKILSQGRERIVKRYPLHDLKGEVVDPRLRELVAVYNQEITSKVKAKGAPLYLDAAEKQEVRSVRCYVTQPSVAKAIPIRFDERGRATTFVKSGNNHHLALYRTPQGKLEESIVTFWDAVDRARYGIPLVITHPREVMEQVLQRGDVPESVLRSLPPSDWVFVDSLQPDEMVIIGLSDEELQQALEVQDYRKLSEHLYRVQKVSSLYYVFRYHLETSVADDKNTAGRIPKFHRVQSLKAYEEKNIRKVRVDLLGRISLL

SEQ ID NO: 8286 - protein, 1127 aa, unidentified
  REGION 1..1127: note = Description of Unknown: Cas Enzyme sequence
MNDKNQRYRLGLDLGTNSIGWCIYSLDGNNKPEALIDMGVRIFSDGRDPKTKEPLAVERRTARGLRRILHRRKLRRKQMFCLLQEQGLMPNDAVQATALKSLNPYELRVRALDAKLEPYELGRVLFNLSVRRGFKSNRKEAVQEKEKDSQNDTKSQNEKCEQLAKAIKDSGFRTLGEFLWKHKNTETPQMENDAGDIGMRFVPGRSNYYPTRRMYAEEFDTIRKVQEPYYSGVNWDALYEKLFYQRPLRAQERGKCRYMPDKERTFKAMPCSQKIRILQEVYNMDYIDEYGKTIPLEEAQTNSLISLLDKKEKLSFKAMKKELGIDESCTFNLERGGREYLQGNVTAVKLRNKNRFGELWDSLSLAEQDAIVEKLITADEDAEIISMLAQYNLTDEQKKNIVATVLPSGTAMLCKEVTEMLVQKMEQNKIPLTVAVQMLGYRYADQSVHEEGELPYYGTVLTGSTMGAHPEADESKPELKYGKISNPTVHVALNQTRTVVNTLIKAYGKPQQIVVELSRDLKASREAKARIQKTITMNQKRNERDNKNITEITKNPYPNREDRLKYRLWEELGSDSFSRKCLYCGKPISGSEIFTKDIEIEHILPFGRTLFDGETNKTIAHTSCNAFKKDRSPFEAFGSSPNGYNWHDIRARANSLKNPAKRALFAENAMEKFEKDSSFIQRQLIDNAYLSRSALRYLRCICKDVWSVNGGMTKLLRDKWNIDSILKRKIDDPEIAHFELKNDQIGQYKKNRYDHRHHALDASVIALIDRAIVQEISRLNQIRLKNRIEVPQMPVLRSELIEKVKHITVSFKPDHGWQGKLSKETLLGKIKKIEKVNIDSIQTDDDIASIKDDVVRTRFETKRRELGDITKAKAALKTEFPKLDVFKTYYVSRTPIVSLTEKNIDSIVDEKIKEKLKTFIKEHADLSFAEQLQKFSETEWIGKPSAAGKPGKKYRIVKVRCINWGQTPITITSSAVPRYLCPEDYLAAVVWQMPSKTKNAEPEYKATFLRRDEFNDDNKPKNLEKPHDAAKYICMLYKDDYLEFTESGATHLCRIAGLPASQNNKIDIRPIYAVSDCKDWIIATNENMLEPCWKPQKEEKRISVNVLFGKHKARSVTVNPIGRVFRK

SEQ ID NO: 8287 - protein, 1282 aa, unidentified
  REGION 1..1282: note = Description of Unknown: Cas Enzyme sequence
MITRILGLDTGTNSLAWAVVDRDANGNYTLVKRGDVIFTEGVKIEKGIESSKAAERTAHKALRVHYSRRRLRKIDTLKVLVSLDLCPYLSDEQLSLWKAKKTYPLTDDFMLWQRSGSAEENNPYYCRYRCLTQKLDLTDQSQRFLLGRAFYHLAQRRGFLSNRLDTSADSDESGKVKSGIAELSVEMEKAGCHYLGEYFYQLYRQHGNTVRLRSRYTDREEHYKKEFLAICEKQELDAQWVEKLQKALYFQRPLKSQRKGVGKCTFEPKKPRCAESHPDYESFRMLCFLNNVKIQTPNDTSLRPLNEGEREKIWPLFFRKSKPNFDFEDIAKALAGKNNYAWIKDAGEKPFKFNYRMQQGVSGCPVTTQLIDIFGSDWQTAIAETYTAVEKKNGTKTIDEMADDVWNVLYSFSSKDKLKAFATEKLQLDEASATKFANAKLPHGFASLSLKAIRNILPFLRQGFIYAHAVHLAKIPDIVTKAVWNDADKREMILSGLMEIIENYNPKDRGVEGTIDFCIKSHLQDVIELRPGAADALYHPSMIETYPDAKLNKMGVFQLGSPRTNAIRNPMAMRSLHILRSVVNQLLRDGIIDRNTEVHVEYARELNDANKRKAIADYQREQEKKRKQYRDDIIALYKSECHKEIEPTDTDIIKFQLWEEQNHLCLYTGTQIGICDFLGDNPKFDIEHTIPRSVGGDSTQMNLTLCDATFNRQVKGAQLPTQLSNHADILVRIDHWKSKCEDLRKQLDKIRTYGGMEKNMKDRLIQKRHRLKMDLDYWQGKYSRFTMTEVPEGFSRRQGAGIGLVSKYAGLFLKSLFHNEQNPNKSNVYVVKGVTTAEFRRMWGLQGEYEKKSRLNHCHHCIDAITIACIGKAEYDKMAQYYHDEELFQWRGTTTKPHFNKPWPTFTEDVLAIEQSLLVKHLTKDNMPKQAKKRVRTATGKHLAQGDTARGSLHKDTYYGAIEQDGEIRYVLRKPLNRFENEAELEKIVDQAVKEKIKEAIAGKNFKTAITEPIFMNKEKGIRINKVRCYVKPSARLKVRQQRDLSPKEYKQFFCVENESNYLLAIYEGELKGKKERDFCVVNNLDSAAYLKRSNKGKAAPLVPERSDERNLPLLAVLKRGTQVLFYENSPEEILFDNPQDLVRRLYKVVGISTKRVKTGGKLTLIGSIIANVNGDKKDGGNLTLSYGELESSDLHNYDKMVNISGNIEVSQRSKDNNTNIVLNKNRKRNEDVIEVPNRTDETYGVGIEGYDKQKITRSTIGNGTINGEKTPVIGVNRDITK

SEQ ID NO: 8288 - protein, 1041 aa, unidentified
  REGION 1..1041: note = Description of Unknown: Cas Enzyme sequence
MKKQKFSDYYLGFDIGTNSVGWCVTDLDYNVLRFNKKDMWGSRLFDEAKTAAERRVQRNSRRRLKRRKWRLNLLEEIFSDEIMKIDSNFFRRLKESSLWLEDKNSKEKFTLFNDDNYKDYDFYKQYPTIFHLRDELIKNPEKKDIRLIYLALHSIFKSRGHFLFEGQNLKEIKNFETLYNNLIAFLEDNGINKSIDKDNIEKLEKIICDSGKDLEDKKKEFKEIFNSDKQLVAIFKLSVGSSVSLNDLFDTDEYKEVEKEKISFREQIYEDDKPIYYSILGEKIELLDIAKSFYDFMVLKNILADSQYISEAKVKLYEEHKGDLKNLKYIIRKYNKENYKKLFNDNKKDLKNYTAYIGLNKVNGKKEILIEKKAKIDDFAKIIKGYLPKGEKIEEKDRAIYNEILDKIELKTILPKQRISDNGTLPYQIHEVELKKILDNQAKYYDFLNYKENGISTKDKLVMTFKFRIPYYVGPLNSYHKNKGGNSWIVRKEEGKILPWNFEQKVDIEKSAEEFIKRMTNKCTYLNGEDVIPKDSFLYSEYIILNELNKVQVNNEFLNMKNKKKIIEDLFKKSKKISEKNFKEYLLVNQIANKTVELNGIKDFFNSNYVSYIKFKDIFGDKLNLDIYKEISEKSILWKCLYGDDRKIFEKKIKSVYGDILTKDEIKKINSFKFNTWGRLSEKLLTGIEFLNLETGECYSSVMEALRRTNYNLMELLSSKFTLQESIDNENKEMNEVSYRDLIEESYVSPSLKRAILQTLKIYEEIKKITGRVPKKVFIEMARGGDETMKNKKIPARQEQLKKLYDSCGNDIANFSIDIKKMKSSLSSYDNNSLRQKKLYLYYLQLGKCMYTGREIDLDRLLQNNDTYDIDHIYPRSKVMKDDSFDNLVLVLKNENAEKSNEYPVKKEIQEKMKSFWRFLKEKNFISDEKYKRLTGKDDFELRGFMARQLVNVRQTTKEVGKILQQIEPEIKIVYSKAEIASSFREMFDFIKVTELNDTHHAKDAYLNIVAGNVYNTKFTEKPYRYLQEIKENFDVKKIYN

SEQ ID NO: 8289 - protein, 901 aa, unidentified
  REGION 1..901: note = Description of Unknown: Cas Enzyme sequence
YMGGLDDLTERLSSARIELDDILCEIEKKAEELVRIWSAIPQGYAMLSQKAIRNINKMLILGLKYSDAVLLAKVPEIVEIADEEILSVTEDYHRVEAQVGHEKQINNIVNALIAKYKSTSEEYRFADHNYDYQLDESDEKDIIKQIESNIGTRKWSLLDADEQTDILQKVRDKYQNFFRSHERKFVESPKLGECFEEYLMKKFPMIEGEQWKKLYHPSQIAIYRPVSAGKDRSALRLGNPDIGAIKNPTVLRVLNTLRKRVNQLLDDGVISPGETRVVVETARELNDANRKWALDTYNRIRHDENEKIRKILEEFYPKRRDTISTDDIDKARYVIDQREVDYFTESKTYNKDIKKYKFWLEQGGQCMYTGRTINLSNLFDPNAFDIEHTIPESLSFDSSDMNQTLCDAHYNRFIKKNHIPVDMPNYDKAVIIDGKEYPAITSQLQRWIDRVERLNRNVEYWKGQARRAQNKDRKDQCMREMHLWGMELEYWKKKLERFTVIEVTDEFKNSQLVDTRVITRHAVLYLKSIFSHVDVQRGDVTAKFRKILGIQSVDEKKDRSLHSHHAIDATTLTIIPSSAKRERMLELFAKIEEVNKMLSFSGSEDRTGLKQELDGFKNQLNKEVKACRIGHNVSEIGTFINDNIIVNHHIKNQALTPVRRRLRKKGHIVGGVDSPRWQTGDALRGEIHKASYYGAITQFAKDDEGKVLMKEGRPQVNPTIKFVIRRELKYKKSSTDSGFASWDDLGKAIVDKELFALMKGQFPAETSFKDACEQGIYMIKKGKKGMPDIKLHHIRHVRCEASQSGLKIKEQTYKSEKEYKRYFYAAVGDLYAMCCYTNGKIREFRIYSLYDVSCHRKSDIEDIPEFITDKKGNRLMLDYKLRTGDMILLYNQICILLICVK

SEQ ID NO: 8290 - protein, 1074 aa, unidentified
  REGION 1..1074: note = Description of Unknown: Cas Enzyme sequence
MFIHLPAIPGCFQGSVFFLFIFCMDLQKMEHSLMSKQNYLMRYRLAIDLGTTSLGWSILHLNQQDAPTAIIKAGVRIFSDGRNPKDGSSLAVTRRAARAMRRRRDRLLKRKARMLNMLIKHGFFPQDAAARKALETLNPYQLRAKGLDQALTPSEFARALFHINQRRGFKSNRKTDKKDNESGALKTAINQLRQQLQDENARTVGEWLWRRLQAGQGTRARYRETRFTTEEGKNKIDKSYDLYVDRQMVADEFDALWAAQAAFNPSLFHEQARAELRDTLLHQRPLRPVKPGRCTLLPEEERAPLALPSTQRFRILQEVNHLRILHPDLREEPLTLAQRDAIVDMLENSIKVTFKAMRKKLKLGDSVQFNLEDAKRAELKGNATTAVLSKKEFFGTAWQDFDETLQDEIVLRLVTEESEAALVQWLIKNTGVDEDRATAIASTSLPEGYGSLSRKALARIVPALRAEVITYDKAVQAASFAHHSDLGFDFEHGDDEVEQIGERIIASTGEIKPVFVFKQLPYYGKALQRHVAFGSGNPKDPEEKRYGKIANPTVHIGLNQVRKVVNALMSRYGRPTEIVVELARDLKQSREQKQETQRKQAENQKRNARIRQEIAALLGCSEECVKHADIQKWILWEELSFDVADRRCPYSGVQISAAMLLSDQVEIEHILPFSQTLDDSLNNKTVSMRQANRIKGNRAPWQAREDFETQGWAYDSILLRADRMPKAKRYRFASDGYERWLKEDKDFLARALNDTRYLSRIAKAYMQLVCPQGTRVIPGQMTALLRAKFGLNDILGLDGEKNRNDHRHHAVDACVIGVTDQGMLQRFAQASAAARQQGLQKLVDDMPLPWPTYRTHVERAVQNIWVSHKPDHGHEGSMMEETSYGIGKDGHIKQRRKADGSAGREISNLIRINEPTQPERHGVDADGQPLPYKGYIGGSNYCIEITRNDKGKWEGEVISTFRAYQIVRKHSVARLRHPKLAQNGKVLVMRLMIDDCVRLELDGQEETTMRVVKIGGNGQVFMAPVHEANLDARNRDKSDPFSYTSKMAGSFQQAKARRVTISPIGELRDPGFKG

SEQ ID NO: 8291 - protein, 907 aa, unidentified
  REGION 1..907: note = Description of Unknown: Cas Enzyme sequence
RENIEYSKDTGEIAWNKEKDFATIKKVLSLPQVNIVKKTEEQTVGQNGGLFDNNIVSKKKVVDASKLIPIKSGLSPEKYGGYARPTIAYSVLVTYKQNNKIKNTMVGIPVLTKLEFERDPNLYLRNLGINNVSHVIKLVKYTVLEFKHKYGTYRRFIVSNQELKRANQIFVTTKQMKLISQYTTLDKNEHDSLLKNNQQLIQSIWNQFLEFMLATDLVNKKQYDELILTNNQTIEECRNIISRQFNISAGERPGFFAMPEGIISAGAALRYLYETQKSSCPNIQSINYYSCGEYMIMDAGSKRNLELFETMREKKKYGSLLWVIDKTRTAMGARLLRSYIEQPLINTDAIEKRHESVSEFLDRYIDRQELGEYLSSVYDLERLIGRISSGLAGTKDMLALAASLKMLPHIKNIINTFSSRLICSLNQDFDVLEDVYELIFNSISEDAPALLKEGGIIKSGYSDEIDKLRSAGSEGKNWLAKLETKERKKTGIKTLKIKYNKVFGYYFEVTNSYKASVPDYFIRRQTLANAERYTTTELAEIEELILGANGKLIELEYSVFNLIREKTAAQVARIQASAKTIAAFDVLISFANAAYKYNYVKPSINSKGIISIKEGRHPVVERMIKNEAFIANDTFLDNAKNRMGIITGPNMAGKSTYMRQNALIVLMAQIGAFVPAKSADICICDRIFTRVGASDDLGSGQSTFMVEMNEVADILKNATKNSFIILDEIGRGTSTFDGLSIAWAVVEHISNTKILGAKTLFSTHYHELTELEGSISGVNNYCILVKESGDNITFLRKIIKGGADKSYGIQVAKLAGIPENVIKRAKELLEELSGADIANNARVIASGKGYKPVPRQDELEASQLSIFDTVKDDEIISEIRDIDLSVITPIDALNTLYRLQNTVKNRV

SEQ ID NO: 8292 - protein, 1228 aa, unidentified
  REGION 1..1228: note = Description of Unknown: Cas Enzyme sequence
MSNKPYSIGLDIGTNSVGWAVITDDYKVPSKKMKVLGNTDKHFIKKNLIGALLFDEGTTAEDRRLKRTARRRYTRRKNRLRYLQEIFSQEISKVDSSFFHRLDDSFLVPKDKRGSKYPIFATLEEEKEYHKKFPTIYHLRKYLADSKEKADLRLIYLALAHMIKYRGHFLYEDTFDIRNNDIQKIFNEFISIYDNTFEGSSLSGQNAQVEAIFTDKISKSAKRERVLKFFSDEKSTGLFSEFLKLIVGNQADFKKHFDLEEKAPLQFSKDTYDEDLENLLGQIGDDFADLFLVAKKLYDAILLSGILTITDPSTKAPLSASMIDRYENHQKDLTALKQFIKTNLPEKYDEVFSDQSKDGYAGYIDGKTTQEAFYKYIKNLFYKFEGADYFLDKIEREDLLRKQRTFDNGSIPHQIHLQEMNAIIRRQGEHYPFLQENKEKIEKILTFRIPYYVGPLARSNRDFAWLTRNSGQAIRPWNFEEVVDKARSAEDFINKMTNYDLYLPEEKVLPKHSLLYETFAVYNELTKVKFIAEGLRDYQFLDSGQKKQIVTQLFKEKRKVTEKDIIQFLHNVDGYDGIELKGIEKQFNASLSTYHDLLKIIKDKEFMDDAKNEEILENIVHTLTIFEDREMIRQRLAQYNSLFDDKVITALTRRHYTGWGKLSSKLIKGIRDKQTGKTILDYLIDDGKNNRNFMQLINDDGLSFKEIIQESQVVGKTDDVKQVVQELPGSPAIKKGILQSIKLVDELVKVMGHAPESIVIEMARENQTTARGKKNSQQRYKRIEDALKNLAHGLDSNILKEHPTDNIQLQNDRLFLYYLQNGKDMYTGEPLDINQLSSCDIDHIIPQAFIKDDSLDNRVLTSSKDNRGKSDNVPSLEIVQKRKAFWQQLLDSKLISERKFNNLTKAERGGLDERDKVGFIRRQLVETRQITKHVAQILDARFNTEVTEKYKKDRTVKIITLKSNLVSNFRKEFRLYKIREINDYHHAHDAYLNAVVAKAILKKYPKLEPEFVYGDYQKYDLKIYISRTKDPKEVEKATEKYFFYSNLLNFFKEEVHYADGSIVKRENIEYSKDTGEIAWNKEKDFATIKKVLSLPQVNIVKKTEVQTHGLDRGKPKGLFNSNPSPKPSEDSKENLVPIKQGLDPRKYGGYAGISNSYAVLVRAIIEKGAKKQQKTVLEFQGISILDKINFEKNKENYLLEKGYIKILSTITLPKYSLFEFPDGTRRRL

SEQ ID NO: 8293 - protein, 1425 aa, unidentified
  REGION 1..1425: note = Description of Unknown: Cas Enzyme sequence
MIQKIFGLDLGTNSIGSSVRNLELGENLTEQLEFFSSDIFGSSVSKNSNGREYSLAGNRSAHRRSRGLNEARRRKLWATLDLLIEHGLCPMSPDSLMQWRTYDKQKGLYRQYPIEDKDFNAWIMLDFNGDGKPDYSSPYQLRRELVVRQFDFDQPIERYKLGRALYHIAQHRGFKSSKGETIADQEKNEKKPIAEEGADIANEMKASETKLSKGLVAYMQENHLKTVGEAFAKLEDERVRIRNNESYRAIRSQYQDEIKEIFTYQKKLSVESELYERLTSEKKGVGTIFYKRPLRSQRGNVGKCTLERNKPRCPIGRPEFEEFRAWTLINNIKIRETAGEPYKQLPIKLRQELLKDCFLSKVKADFKFEDIRKYIEKRLGLSFSNDDKTINYKDSVSIAACPVTVRMKKLLGENWANCRIDGEKRRQAHGKNNNNEHIVSYTEEDIWHVCYNAEDPEEVSNFARKALHWDENKIKELVRLWTSIPQGYAMLSLKAIRNINRMLLLGLKYSDAVLLAKLPDIVPVSDEDILAITKEFLQLEDKLNQEKQINNIVNSLIANYKSKLEENRFADHNYQYQLGEGDDEDINTQIKSHIGAKLWVQIGADEQTKIFQAVRSKYQDFFKSYKRKFVESPKLGELLVAFLTEKFPNVKSKQWERLYHPSQIAIYRPIPVDNDRSKLRLGNPNIGAIKNPTVMRVLNTLRRRVNQLLDDGVISPDETRVVVETARELNDANTKWALDRYNRIRRDENEKIRKILKELNPTTNSISEQDIDKARYIFEQCETDFYTDGKVPYYNKDIKKYKLWLEQGGQCLYTGQTINLTNLFNPNAFDMEHTIPKSISFDNSDQNLTLCESYYNRFIKKNNIPTDMPNYDKDVTINGKEYTAIKPRLQRWKERVDRLSRNVDFWKGQARRAQDKDRKDECIREKHLWDMELAYWKGKLERFTMTDVTDGFKNSQLVDTRVITRHAVLYLKSIFNHVEVQRGETTAEFRKILGLQSIDEKKDRSLHSHHAIDATMLTVIPSAAKRDRMLELFYKIEETKKALKNYNDNNKTGLNLELKGLEEKLDKEKKDCRVGRRVNDLDRFINENIIVSHHTKDQALTPAHRRLRKRGKIVGGKEHPRWQTGDSLRGEIHKASYYGAITQFAKDANGKVLMKDGQAQIDPTIYYVIRRELKYKRSTQDSGFTNWEDLEKVIVDTDLFGLMKGQFPEGTSFKDACEQGFYMIKKGKNGEGDVKTHRIRHVRCKAVKTALRIKEQTYKSSKDYKQFFYAAVGDLYVMCYYTDGKKRDFKIYSLYDISNHRKSGTEDIPKFITDKKGNHLPLDYKLRTGDMVLLYKDNPEELKDLDQVNLKRRLYKVNRFESEGLIILLTHHLSTTTERGCSIGKIENYQNLPTAIRCGIKTIKFLIMGKHRDFVIRNGNIEFKH

SEQ ID NO: 8294 - protein, 1368 aa, unidentified
  REGION 1..1368: note = Description of Unknown: Cas Enzyme sequence
MEKRNYYLGLDIGTNSVGWAVTDESYNLCRFRGKDMWGIRLFESAETAKVRRVARNNRRRLKRRNQRIKLLQEIFAQEITKIDDTFFIRLNESKLHMEDKSVKEKYPLFIEKDYNDIDYYKQYPTIYHLRKELIENDGPHDARLVYLAIHHILKNRGHFLIEGNLGEAKDFNVVFDKLSEVLKNELEWECELDESEKDKIKSILTEKSKAKSKKVKEIIEFLKIEDSSLSKEEEKRQKDITEIIFKFIVGNRGDVEKLFNLEKKSLAKGSFSFAELNYEEDVRPDMEGEIPDLIHIIDLTKGVYDWRVLVDILQGKDYISYAKVSQYEKHRSNLKEIKELILKNLGRNVYRELFVEKDKKSYSGYIGAANRNGKKYSVKKNQNDDFFKELKKQLGKIVDGGYGYHEAQEICKAEKIEDILPLQRNKLNGVVPNQVHKAELIKILGNAEKYIPFLSEKDVDGISNKDKIISIFEFRIPYFVGPLNDSHKNQGSNCWMVRKEGENGKIYPWNIEKVVDYNKSNEAFIERMTNKCTYLIGEDVLPKNSLLYSRYMVLNELNNLRIRGNKVDVKTKQNIYKDLFQTKARVTGKALLDYLKTDMPELRKEDLSGFDKDFNTSLKAYMDFKKQIFPNGELESSETQNMVEDIIRWITIYGDDSKMIKSVIEKEYPNKLTQEQLKKVSSFRYSGWGNFSRKFLKGIDGADIESGETFKLIEAMWETNENLMQLLSERFTFRKEIEKENDKVTEKIEKISYEELVDTMYVSPATKRAIWQSVQISEEIKKVMGYPPEKIFVEMARGGGEKGKRTVSRKKALEELYKSCKEDVRYLSEKLEAFEERDLNSMKLYLYFTQWGKCMYTGERIDLEELMKKNSKWDRDHIYPQSKIKDDSIDNLVLVNKAVNARKSNDVLDGEIQKKMIGYWKALLEKGFISKKKYNRLTRKGGFTEEELAGFISRQIVETRQSSKAVAELLKRINEDTEIVYVKASLASQFRKKPLNVLKSRRINDYHHGKDAYLNIVVGDVYNAKFTSNPILWFKKNKKEEYSLNRIFSFDVKRGDKIIWEKCIEDEEGVGYGGTIDRVRKIMKQDNLLHTEYTYCGKGELFDANPISKDNKNLNIKLKAGLDPNKYGGYRGAGTSYFAQIEFDNKKGKRVKNIIGVPIYVASQLKHNPKAFEDYCKEVKGLKNVEIIVPKIKKNTLMEINGFPMRIRGEDERNLQFKGAIQLRLDGENTEILRAVEKYLDKNEGKKEEHKISESLDKLSNEKVNKLYDKLKEKLSKIYKNRPANPIQKICDNQEMFKDSDDLYKKIKTINEILNLLRCDVAPSADLKFINGSENAGVMSVNKNTVGGGKVTIINQSVTGLFETREEI

SEQ ID NO: 8295 - protein, 1099 aa, unidentified
  REGION 1..1099: note = Description of Unknown: Cas Enzyme sequence
SLMTKDMTYLLITDLIFYQRPLKSKKSLIADCPYEYYEYTIKETGEIKRQGIKCIAKSNPYYQEFRLWQFIINLRLFDRTDDKEVTSEYLSSMEDYTKLFTYLNDRKDINQETLLKDFFKQKKVKMGMEKEFPIRWNYIEDKEKKYPCNETRHELLAALDKAGIDHSWLDDKERFYWLWHLLYSVESKEEAEGALRKLKDNDDFVNAFLKVKPFKKDYGAYSEKAVKKLLAVMRMGSLWNETDICEQTRNRIQSIIKGEIDEKIKERMGRTFCQLSDFQGLPEWLACYVVYGRHSEATDIQRWTKPENLMAYINGFKQHSLRNPIVEQCILETLRTVHDIWKEAGHIDEIHVELGRSMKSTADQRARMSKSILQNENTNLRIKSLLMELKNAKEIENVRPYSPMQQEILRIYEEGALQELTKEDAQYPEISKISQMAQPSAKELLKYRLWLEQKYCSPYTGKPISLSKLFTSAYQIEHIIPQSRYFDDSFTNKVICEAEVNQLKSNMLGYEFIKKHSGEIVHCTTIGDVKILDAKEYYNFVTEHYANNRRKKEKLLLEDIPQEFLNRQMNDSRYISKKVMAILSNIVREEDEQEANSKFVVSCSGGITDRLKQDWGLNDVWNSIVYPRFERLNKLTQTEAFGRWENKEGKQVFQTSVPLELQRGFSKKRIDHRHHAMDALVIACASRNIINYLNNESAKSQEQREDLRKKLCDKNRIIRKPWETFTQDARTALEDVVVSFKNYVRVINKATNYYEKYDESGKKGMAEQKGQDMWAIRKPMHKETVFGQVNLRRKVTVKLKDALENIPAICDKALRDYVNDLIAKKFNTKQMLAHFKSINYRLNMKYVDKVDIWVFSDEKEPMVATRKAIDTSFDTKRIDTITDTGIQKILRNYLASKGNDPNIAFTPEGIAEMNKHIIDYNNGKQHQPILKVRISEPKGAKYQVGETGNKTKKFVEAQKGTNLYFAIYEDKDGNRFYNTIPLNEVAERLKQGLSPVPDKNEKGISLKFYLSPNDLVYVPTEEEKLSNECKLSKERIYKMVSSTGNQCFFIPQRIANSIVNKVEYSPLNKMEKTILGEMIKAICWKLEVDRLGNILKIIK

SEQ ID NO: 8296 - protein, 1142 aa, unidentified
  REGION 1..1142: note = Description of Unknown: Cas Enzyme sequence
VCLCLFAPMYHITGKGYNDVMKYSLGLDIGTSSVGWAVLDLEKERIHDLGVRIFERPEDPQNGDSLAKPRHDARSARRRLKRRRQRLNHLKQFFINQNILTKDQVEEVLDPESDYNKLDVYALRSKALTEELTPEELLKVIYQIAKRRGFKSNRKVVEESDKEDGRVTSALKTNEKFLTENSYATVGDALNHDEKFAPHKRNKRDNYTNSFARNDFLRELEAIIRTQRNCVLKDVSEQAINELVYGINDGQVTNVNAIMYQRPFMTKELIEKMVGDCTFEKGEKRAPKASYSFEIFRLASDLSHLVFIPRDTSKRQAKRENLEIKLSSEQIRKVIDAAKNQKSLTYKKVRSIAGISDDYVPKDVRGKKKDGDEFGEGNTFGGLKAYSDIRSALKDMPEDWAKIDNETMINQVAYILTTQKADQGIRTELNQLPLSDKAKEAIIQIKPTNFKAFGHLSIKALQKITPHILEGMTYDKACEAAGYDFKKQSVSLEQITNPVVKRAITQTLKVVRAIERKYGKPYFIKVETARDLAKNFKDRKAIENENKENQAHNQSIVQTLNENNIVTPTGQQIIKVKLYREQNGVCLYSGKPIDFETMLRDDNAYQIDHIVPFSRSNNDGMTNKVLVLTEENQKKSNKTPFEYFGTDDQRWKEYAARVEAIYKTCDVKTADKATNVVNYKYNGYAMRKKQNLLLQVYKNDSWNVRALNDTRYITRFIQNYLSQMVDFAEGEEKQRVVAPNGTTTAYLRKRWGLAKDRTDDVLHHAKDAAVVAAIDMRIVYQANLFSKEQEMEQYLVNANTIDKKRQILLQSTDKDTGEITDEDAFLKAQKDLAEAEYFKLRSDEETKNHFPQPWSDFSKEVMKRTLNTDIATLQNELRGLDNYDDEFRLSVKPIFVSRMPRRKATARAHKDTIRSPKAKDGDQRTVRMPLSKVKRKDVENSVLKESDQWLYDKLLERLDNHDDNPEKAFAEPIYKNDKKYDKNGKQLSPVSTIKVYSTQPSGFFINKGKAFVNNGSMVRLDVYRRSNKKGKIEHFFVPVYAHQVGKNKPAPTKILPAPKGFTDIDETFTKVCSLYPNDYVRCYFNNRVEEGYYVMYGIAVGQMVLLKHSAPGKSETKSISPRSATKIERLDINVLGDNYKWD

SEQ ID NO: 8297 - protein, 1045 aa, unidentified
  REGION 1..1045: note = Description of Unknown: Cas Enzyme sequence
MAQKSSYSPKKYSLGLDIGTSSVGWAVLDLDKERIHDLGVRIFERPEDPQNGDSLAKPRRDARSARRRLKRRRQRLNHLKQFFVDQNILTKNQVEEVLDYRSDFNKLDVYALRAKALTEELSPEELIKVLYQIAKRRGFKSNRKVVEESDKEGGRVTSALNTNKKFLADNNYTTVGEALNRDKKFASHKRNKRDDYTNSFARDDFLCELEAIIKTQRNYALKNVPEQAINELIYGIDDGQVTNVSAIMYQRPFMTKELIEKMVGKCTFEDGEKRAPKASYSFEVFRLASDLSHLVFIPRDASKRQAKRENLEVRLSPEQIKQVIELAKSQKSLTYKKVRSTAGISEDYVPKDVRGKKKDGDEFGEENVFGGLKAYNDIRLALKDLPEDWAKIDNESALNQIAYILTTQKADEGIRAELDVLPLSDKAKEAIVKIKPTNFKAFGHLSIKALQRITPHILEGMTYDKACEAAGYDFKKQSASLEQITNPVVKRAITQTLKVVRAIERKYGKPYFIKVETARDLAKNFKDRKAIENENKENQTRNQSIIQTLNENGIVTPTGQQIIKVKLYREQNGVCLYSGKAIDFETMLCDDNAYQVDHIVPFSRSNNDGITNKVLVLTEENQKKGNQTPFEYFGADEKRWKEFAARVESTYKTRDIKTADKATNAINYKYNGYAMKKKQNLLLQEYKNDSWNVRALNDTRYITRFIQNYLRQNVDFAEGEEKQRVIAPNGTTTAYLRKRWGLAKDRAEDVLHHAKDAAVVAAIDQKIVMQANLHAKHHEIKALLAATKTMEEKTDKLTGEITDENEFDKAQRRKAAILVLSSKHFPQPWDNFGKEVMKRTLNTDIATLQNELRGLENYDDEFRLSVKPIFVSRMPRRKATAQAHKETIRSPRVKDNDQRTVRMPLNKIKRKDVENSVLKESDKWLYDKLLEKLDTHGDNPEKAFAEPIYKNDKKFDKNGNQLSPVSTIKVYSTQPSGFYINKGKAFVNNGSMVRLDVYQKPNKKGKIEHFFVPVYAHQVGKNKPTPTKILPAPKGFTDIDETFVK

SEQ ID NO: 8298 - protein, 1109 aa, unidentified
  REGION 1..1109: note = Description of Unknown: Cas Enzyme sequence
QNAPADGLTSVGFLFTKGFALNSANVNYRVGIDVGSYSLGMAAIAIDDDGKPTEILSAISLIHDSGVDPDSAKSAATRLATSGIARRTRRLYRRKRKRLAKLDKFISSQGWPLKEFEKYEDPFYPWRVRAELATTAITDQQELGEKLSIALRHIARHRGWRNPYSKVTALYTVTEPSDAFLAMQEECAKQLGRTIPETITVGQLVTGMNLGKTRLRGENSLLAARPRQSDNANEIHTIAKVQGLSNELVRQIIDHVFAAESPKGSAAEQVGKDPLQPTKKRALKASDAFQQYRIAALIGNLRIRGGKGNRRLTTEETRLVFDYLRSLPAKQEPTWQLVAEQLKIDRGNLVGTAIMTDDGERAGAKPPVHDTNRIMENTKIKPLATWWKSADADARAAMVKALSNAEVDDFDSQAGAQVQEFFFGISDEDQEKLDGLHLPIGRAAYSEDTLDRLTKRMIGEGMDLYEARQAEFKISNDWAPPAPEIGERVGNPAVDRVLKATARWLNAAERQWGAPKSVNIEHVRAAFMSESSARELDRDNQQRAKRNVKVVAEMQEKLGIEGRPSRADVWRFQSIQRQNGKCAYCGAEISFKNSEMDHIIPQAGEGSTNTRDNLVAVCRECNSSKSNIAFAVWAENTSRPGVSVQKAIERTHHWVTDSGLRKPEFDKFRKQVCDRLRRKATDEPIDARSLESVAWMANELRSRIAQKFKDGDTKVRVYKGALTAEARRASGISGKLEFVDGKGKSRLDRRHHAVDAAVVAFTSNYVAETLALRSNMKFDQELRRKAPQWREFTGSDHVHQVEWTKWKYRMQALAELLNNALVQDRIVVMHNLRLRLGNGAAHEDTIGKLTRLKVGDAISTTDIDRASSEALWCALTRDPDYDPKTGLPENPNRTIRIHGTHLTASDEITVFPVAAASIPIRDGFAKLGSNYHHVRLFRVPSGKKYKYCLMQVYTVDLLKFRKEDLFTVELKPQTISVRTCEALLRKALANGTAEYLGWLVSDDELLIDTSSFDTPGIVKLREEYGPVNRWRLAGLTSVTRLNLRPLYLSKEGLKPNVNPEIKKIIDNRSWIITVNKLFSSGHVKIIRRDALGRPRLHSAAHLPICWEVK

SEQ ID NO: 8299 - protein, 1526 aa, unidentified
  REGION 1..1526: note = Description of Unknown: Cas Enzyme sequence
MKNILGLDLGTNSVGWALVSVDENGKLVKKIRLGSRIIPMSQDVLGKFDSGVTVSQTAERTEYRSHRRLLERALLRRERLHRVLHLLGFLPEHYAACIGWDRNDNATYGKFLPETEPKLAWRKVDDGGYRFVFMQSFEEMLDDFSASQPSLVANGKRIPLDWTLYYLRTKALTEPIAKEELAWILLNFNQKRGYYQLRGEEEEETPSKRVEYHELKVVKVEATDEGKGGNIWYNVLLENGWVYRRQSKYPLDKWLGQTLPFIVTTDLEADGVTPKRDKDGNEKRSFRSPKEDDWTLVKKRTEDHLEKSGLTVGAFIYQHLLANPSDKVRGQLVRTIDRKYYKRELQAIIAKQMEFHPELRDAELLKACAEELYRNNGEHRTQLMAKDFKHLLVEDVLFYQRPLKSKKSLIANCPYETRQYINKETGEIKDVNVKCIAKSNPYFQEFRLWQWISNLRLLRQADGQDVTAAYIKGNDDKERLFDMLNNQGEIKQEHILRDFLKLKKPKGGEFSLRWNYVDDKIYPANETRHAINKAIKGMAVDKEEKETLGQLFVQPAVEYMLWNLLYSITDRNELASALRRFALTHGVSSVDAFVESFLKVKPFKKEYGAYSEKATKKLLQVMRLGKYWCGDELPEPAKRTKGNKQAVYDEMANRGICKQTLQNISNIIEEDIDERLMGALLNPERPLTELSHFQGLSVSDACYVVYGRHSEVAEIVKWKDAGELNTFINNFKQHSMRNPIVEQCVLETLRTVRDVWKQEGQIDEIHVELGRNMKRTAEQRARDTQAIQRNENTNMRISLLLTELKNDPSISDVRPYSPSQRELLKIYEEGALENLTNEDEDIAKISRLAQPSSSELRRYKLWLDQKYVSPYTGRPIPLAKLFTPAYEIEHIIPQSRYFDNSFSNKVICEAEVNKLKDNLLGMEFIKKFGGKTKGILDEETYKLHVTTNYAHNPAKRSKLLMEDLPTDFNSRQLNDTRYISKTVMALLSNVVREEGERETRSKHVVVCTGGVTDTLKKDWGLHDVWHNLVYPRFIRLNNLTGSQNFGYWRYLDEENNKKGEDSRKVFQITLPPECQRGFVKKRIDHRHHAMDALVIACASANIVNYLNNQSAANPHIHENLQRLLCDRKRVIRKPWPTFTQDAQKALEDLVVSFKNTVRVVNKASNTYLRYDKEGKKKRFKQEGEGLKAIRKPMHKETYYGEVNLIRKEMLPLKRALDDVNAIVDKELRASIKSLLRDGFNLQQVLANFKAKDFKFNKRDIKKVEVYVSSAKSTPMVATRKSLDTSFNAKRIADITDTGIQNVLLNYLKANDNSPEQAFTPEGIAYLNEHIAEYNNGKRHQPILKVRVSEIRGAKFAVGQTGSKKTKFVEAQSGTNLYFAIYEDKEGKRNFETIALNVAAERLKTGQTPVPETNDAGQPLKFYLSPNDLVYVPTDEDRAAACPSIDKRRIYKMVSATDVNCFFLPFEVASTIYNKVEFESMNKMGRAIDMMEYSDNYDSSAINKLMIKDVCWKLEVDRLGNITKIVR

SEQ ID NO: 8300 - protein, 1142 aa, unidentified
  REGION 1..1142: note = Description of Unknown: Cas Enzyme sequence
MNGLVLGLDIGIGSIGKGILKKDTGEIIHANSHIFPAATAENNVERRKNRQARRLRRRKKHRGVRVQYLFEDYGLLTDCSKVSINLNPYRLRVHGLDNPLTNEELFISLKNMVKRRGISYLDDASEDGSVGSSEYAKAVEENRKLLAEQTPGQIQLDRFERYGRVRGNFTIEEDGEKKRLINVFSTSAYRKEAERILKKQQEFNNKITDEFIKDYLTILTAKRKYYHGPGNEKSRTDYGRYTTKKDSEGEYITLDNIFDILIGKCTFYPDEYRASKVSYTAQEFNLLNDLNNLTVPTETKKLSEEQKIKIVEYAKTSKTLSSTTLLKYIAKMIDGSLDQIRGYRVDVNNKPEMHTFEAYREMQSLETISVGDLSREVLDKLAHILTLNTDREGIEEAINDKLKDTFNKDQVLKLVQFRKNNSSLFSKGWHNFSLKLMMELIPELYETSEEQMTILTRLGKQKPKKTSKRTKYIDEKELTDEIYNPVVAKSVRQAIKIINEATKKYGIFDNIAIEMARESNEEDAKKEYIKRQKANRDEKMLAMGKAAFQYNGKKELPANVFHGHKELATKIRLWYQQGEKCLYTGRNIAISDLIHEQDKYQIDHILPLSLSFDDSLSNKVLVLSTANTEKDQRTPFQALDSMDDAWSYREFKSYIIDSELLSDKKKEYLLMEEDISKIEVKQKFINRNLVDTRYSSRVVLNALQDFYKEQQFDTTISVVRGQFTSQLRRKWGLEKSRETYHHHAIDALIVAASSQLRLWKKYNNLLISSKEDQFIDLETGEIISFSDDEYKELVFKEPYDHFVDTLKSKKFEDSILFSYQVDSKYNRNISDATIYATRKAKLDKEKKEYTYTLGKIKDIYALGKKTPSKTGFYKFLDLYNKDKSQFVMYQKDRKTWDEVIEKIMEQYRPFKEYDKNGKEVDFNPFEKYRQENGLIRKFSKKGNGPGIKSLKYYDEKLGNYKKVTPSNSSNKVVLRSLKPWRTDVYFNHQTKKYELMGIKYCDLNFKRGSGEYKITDEKYNDEKYNSIKKKEGVSEHSEFKFTLFRNDLLLIKDSENNEQEIFRFVSRTGSAKHYVELKPYDKARFEENEYLMSVLGKATKGGRCLKGLNKPNISIYKVKTDVLGNKHFIKKEGDESKLNFKK

SEQ ID NO: 8301 - protein, 945 aa, unidentified
  REGION 1..945: note = Description of Unknown: Cas Enzyme sequence
MKKPYSIGLDIGTNSVGWAVITDDYKVPAKKMKVLGNTNKKTIKKNLIGALLFDAGNTAADRRLKRTARRRYTRRRNRILYLQEIFAAEMNKLDESFFHRLDDSFLVPEDKGGSKYPIFGTLEEEKEYHKQFPTIYHLRKSLADSKEKADLRLIYLALAHIIKYRGHFLYEDTFDIKNNDIQKIFNEFTSIYNNIFEESSLSNENAQVEEIFTDKISKSAKKDRVLKLFPDEKSTGLFSEFLKLIVGNKADFKKHFDLEEMAPLQFSKDTYDEDLESLLGQIGDDYADLFVVAKKLYDAILLAGILSVKDPATKAPLSASMIERYDNHQNDLSALKQFIRSNLPEKYAEVFSDDSKDGYAGYIDGKTTQEGFYKYIKNQISKFEGTKYFLEKIEREDFLRKQRTFDNGSIPHQIHLQEMNAILQNQGGYYPFLKANKERIEQILTFRIPYYVGPLARGNSDFAWLTRNSDDAIRPWNFEEVVDKASSAEDFINKMTNYDLYLPEEKVLPKHSLLYETFAVYNELTKVKFIAEAMKDYEFLDSGQKRKIVENIFKNHRKVTEKDIINYLHNVDGYDGIEIKGIEKQFNASLSTYHDLLKIIKDKEFMDNPKNGEILESIIHTLTIFEDREMIKQLLAQYNSVFDEKVIKALSRKHYTGWGKLSAKLINGIRDKQTGNSILDYLMDDGKSNRNFMQLIKDDGLSFKEIIDKAQVVGETDNLRQVVQNLPGSPAIKKGILQSIKLVDELVKVMGSDPESIVIEMARENQTTNKGKSKSQQRLKTLSDAISELGSNILKEHPTDNIQLQNDRLFLYYLQNGKDMYTGEALDINQLSNYDIDHIIPQAFIKDDSLDNSVLTSSKDNRGKSDNVPSLEIVEKMKGFWQQLLDSKLISERKFNNLTKVERGGLDERDKVGFIKRQLVETRQITKHVAQILDARFNAEVNEKN

SEQ ID NO: 8302 - protein, 927 aa, unidentified
  REGION 1..927: note = Description of Unknown: Cas Enzyme sequence
LVSICEFESKEIPLKDKQGNPISKNGIPVTKLVGQKVVPKSSPLFQEFKIWQNLNNALVRPKGSRKRKVTTDQQSTLLEGQEPVFELNLEQKELLFEELNIKGNLKTDYCLELIGYSAKEWEMNYPTLEGNKTNKALYEAYLKIIDSEGYDAKKLLKVKTDKDDINLGDIKVSASEIKTMISDIFNELGINTKILDFDAELERKQFEAQASYRLWHLLYSYEGDDSKSGNELLYRLLEDKFGFKREHSKTLANVSLLSDYGNLSTKAIRKIYPYIKENKFSTACELAGYRHSKLSITKEENENRTLKDTLDVMKKNSLRQPVVEKILNQMIHVINQTSEAYGKPDEIRIEMAREIKKNKIQREKLANQLRQNTAELERIKDILRKDFKLSHISHNDILRYRLYEELSLNGYKTLYSNTYIERQQILDPTVTIEHIVPKALAFDDSFSNKTLEIQPVNGEKSNQTAFDFISKKYGSEALEQYINRVNNLFENGKISKTKRDNLLRKQEDIPSDFLNRDLRNTEYIAKKALEILEDYVPRVTPTIGEITKTLREDWQLVNIMRELNWEKYNSLGLTSFYYDRNGTKIGLIHNWTKRNDHRHHAMDALTIAFTKPSIIQYLNNLKSQNDKGSSIYAIQAKETYIDETRKRLIKPPYNIKQFRNDAKQMLDNIFVSHKAKNKVVTPNTIVTKKKRKAGKETKAEEKRTFLTPRGALSNETVYRKICNYETKEITINSKLTYEIALTIAKKKEREAVLERLAQHNNNPTTAFKNYNKNPIMLQTSVGEKPLISVKIVNYKELFVKRSEINEKLDIKRVLDAKVRARLTDRLKEYNNDPKAAFANLEENPIWLNEEKGIALKHVTTIERVVGLPIRPKRNINGEIMKDEQGQPLKSHYVATGGNHHVAIYEDEEGKWHEKVVSFNEAASRSIQ

SEQ ID NO: 8303 - protein, 1109 aa, unidentified
  REGION 1..1109: note = Description of Unknown: Cas Enzyme sequence
MAIAPTDARIARVGFFNLIGVAMDTSLTRYAVGIDVGDFSVGMAAIKVGEDGMPQEILSAISHIHDSGLDPDNIQEARTRLEISGIARRTRRLFRHRRRRLIRLDAFIQSKGWGLPQNDESDDPYLPWRVRAELASRPIPTEEELGAKLSIAIRHIARHRGWRNPYSRVSSLMADVPPSDAFKAVQDEFSKILGRSLADDMTLGQMVAACNLTNTKLRGKGGAISARLQQSDFAHEIRKICAMQEIDESTVREIIEHVFVAESPRSANAARVGKDPLQPSEDRALKATDAFQRYRIAALIGNLRVREGSGKRELSFDERKLVFDHLVHLEPKIESDWSAVAEKLNISRRDLLGTATTTDDGERAGARPPVHETNRRILTCSVKPLVKWWQEADDAERREMLIALGNGSVEDYDSAQGAKVQAFFIDLPDEDIEKLDKLQLPVGRAAYSEDTLTKLTEAMLSNGVDLYTARRQVFGISEDWEPPVPEIGEPVGNPAVDRVLKVVARWLRAAENTWGVPESINIEHVRAGFMSRSKSLELDRDNERRAKRNLELFTQMQQKFGQDIRPSRADLWRYQSVQRQNGQCCYCGATITYQNCEMDHIVPRAGRGSTNTRDNLVAVCHDCNLSKGNTPFAVWAEKSTKPGVSVAEAQERLRHWVCDPGLKTPQFRRFVKSVNDRLSRKTIDEELDARSIESVAWMANELRGRIAHKYQDAKVRVFRGQLTAEARKASGISKKIAFIDGPGKSRLDRRHHAVDAAVIAFMSAKVAETLAIRSNLKFDQELRKDAPQWKEFTGSTDAHKIIWSKWRSRMIALADLLQTALDEDRIVVMSNLRLRLGNGAVHEEKIRKLKKLKVGGPISAVDVDRASTEALWCALTRHPDFDPKEGLPADPDRNIRVQGRHLSADDTIEVFPVSAGAVAVRGGYVKLGRSFHHARVYKIVDGNKVEYAMLRVYSIDLNKYKNEDLFTVELQPQTMTMRKCKSSLRKALAAGKAEYLGWLVVDDELYLDTAKFNTGQIVNIQEELGKITRWRVDGFKTESKLRLRPLQMSKEGIRKDMSEDVNKILDSEGWQPTVNKLFGVGKVTVIRRDALGRVRLSSNAHLPVTWTAG

SEQ ID NO: 8304 - protein, 1172 aa, unidentified
  REGION 1..1172: note = Description of Unknown: Cas Enzyme sequence
MKKVLGLDLGVGSIGWSLIALDEDQHPAEILGMGCRIVPLTTEESKFASGEGISKNAERTQMRTMRKMLDRYQQRRTKLANILREHQMYPDEALMQLPLMQLWQLRADAATPGRQLSLPELGRVLYHLSQKRGYRHSKSDESGEKKDTEYVAKVKSRYQQIQEEGLTVGQHFAKLLKDNEQHSERGGVYYNYRTKDQVFPREAYAEEFDRIMAVQRGFHPSLTDRLIAKLRDCIFYQRPLKSCKHLVSYCEFERKQVELPVKQVERDGTITYKRQLVDVGPKVAPKSSPLAEVYRIWETLNNLRLYFPDGSERAITQEERQRLFDYLQENDTLSFTQAKKLLKIKPKEQVWCNDLLTSKVKGNRTIAPLIKAFADYPQYLDLLSFELSEEEKADPETGELRPVISEHYQREPLYKLWHILYSIQDKEAMRRTLTKQLGISEADLDTGLLDQLFKVDFVKQGYANKSIKFISKLLPHLMQGQMYSEAAKRAGKRYSESLTLDELQTRPLLDKIPVLQRNSLRQPVVEKILNQMINLVNQLKADYGEIDEVRVELARELKMSREERERTAKNQRKNEKENKRIAGLIKELGLSPTRARIQKYKLWEESQECCMYCGKMMNLTQFLSGSEVEVEHIIPRSILYDDSLSNKTCACRMCNQEKGNRTAKEYILSKDEATQKDYNARVQELFELHKISAAKRSRLHMTLSDIPEDFIERHLRLTQYISREAQSILAKGIRYVRASEGTVTATLRRLWGYDEILKRLNFEIYKSRGETETVSLGGVAAERLANWSKRNDHRHHALDALVVACTRQGYIQRLNRLNTEDDKLSMREELPPLERQHAERLQLLERWLTAQPHFAPRVVQDKVAEILVSFHPGGKTYSRGRNIIKRKGQRFVQEGILVPRGALSAETVYGSIQQGDHREIVCKYPLHNITAKDTPYIIDPRLRNIIAERLAEYGDDPKKAFAEPLYSDRAQTQQVRTVRCFTGLQKEKLAPLRRDEEGRATAFVSPSNNHHVALYRDAKGQLQEYISSFWQVIERVRFGLPPIIYDPRIAMEQALAIADLPESVLKGLPPSDWRLEVTLRQNEFFLMGLTDQELATALEVQNYSLLSLHLYRVQKLSSMYYVFRHHLETSVKDEQNTTGEVPKFYRVRSMKAYISLNPRKVKVDRLGKISLL

SEQ ID NO: 8305 - protein, 1190 aa, unidentified
  REGION 1..1190: note = Description of Unknown: Cas Enzyme sequence
MARKVLGLDLGVGSIGWCLITLDKDEKPQSILGMGSRIVPLSTDDATEFTQGKAITKNKMRTVARTIRKGMDRYQLRREALKKVLREHGMLPDESLIQLPLLELWKLRARAATPGEQLSLTELGRVLLHINQKRGYKHAKADEAAEAEAEGKSKKEKEGYVAQVKGRYQALKEKGQTIGQHFAEELRANQQTAPRGVYYTYRIKEQVYPREAYLEEYDHIMAVQREFYPEILTDELIRRIRDRIIFYQRPLKSCKQLVSTCEFEKKERVVQVKCINKDGVEELVERTITIGPKVAPKSSPIFQVCKVWESIQNIRLYYPDGTELKLEQEEKQKLFDYLQKNDKLSLTALRKVLKIKPKDKLWCDKLLDKGIAGNTTTAILRKALKGYEQYEGLLRFDLTIRDGHKADEDGVIRPIVDESYQNEPLYKLWHILYSIEDRADMRRALVGQLGIKEEDLDDGLMDALYKIDFVKQGYGNKSAKFICKLLPHLQEGKMYSEAAEAAGVRHSDSMTAQERDERSLLDEIPLLQKNALRQPVVEKILNQMINLVNALKREHGEIDEVRVELARELKMSREEREETTKSNNAREKENKDIAERIAEYGLTPTKSRIQKYRLWQESAESCIYCGEHVDLVQFLRGEGIEVEHIIPRSILFDDSMSNKVCACRSCNGKKGNRFAMEYIKSLGMEREQQYISRVEGLFEGKKISHSKRQRLLILPKDLPEDFIERHLRLSQYISREAQGILRKGIRLVSASEGSVTAKLRKLWGYDNILRDLNLERYRSMGETEVVTVEHRDGARTDERIKDWSKRKDHRHHAIDALVVACTRQSYIQRLNRVNAEADREEKDAFIKVQQQKPSHSKREKLSSLENWLIRQPHFTTGEVMKHAEGILVSLRPGKRTISRGRNIYKRSGKTDVQRGVLIPRGALSEETIYGVIRVDGEDKVVCKYPFQSLKLKDVEYIVDKALRKEVKKRIKQRGEKEAFAEPLYLDEAQTQEVRSVRCFTGKDQAKLIPLRYNDESEAVGFVAPGSNHHLALYRDVDGRLVESVVTFWQAISRIRYGLPAIVTHPREVMEQALSISELPEEVLGALPKSRLRLMEVLRINDMFLLGMTDEAIDRAIEGEDYPTLSRHLYRVQKLSSMYYVFRYHLETEVKDEKNTSGEIPKFYRIKSLGAYQKLNPRKVKIDLLGRISLT

SEQ ID NO: 8306 - protein, 1392 aa, unidentified
  REGION 1..1392: note = Description of Unknown: Cas Enzyme sequence
MTKKPYSIGLDIGTNSVGWAVITDDYKVPSKKMKVRGNTDKHFIKKNLIGVLLFDEGTTAEDRRLKRTARRRYTRRKNRLRYLQEIFAEEMNKVDSSFFHRLDDSFLVPDDKRGSKHPIFATLAEEKEYHKQFPTIYHLRKQLADSKEKADLRLIYLALAHMIKYRGHFLYEESFDIKNNDIQKIFNEFTNIYDNTFEGSSLSEQNVQVEAIFTDKISKSTKRERVLKLFPDEKSTGLFSEFLKLIVGNQADFKKHFDLEDKAPLQFSKDTYDEDLENLLGQIGDDFADLFLVAKKLYDAILLSGILTVTDLSTKAPLSASMIDRYENHQKDLAALKQFIKNNLPEKYDEVFSDQFKDGYAGYIDGKATQEAFYKYIKNLLSKFEGADYFLEKIEREDFLRKQRTFDNGSIPHQIHLQEMNAILRRQGEHYPFLKENREKIEKILTFRIPYYVGPLARSKRDFAWLTRNSDEAIRPWNFEEIVDKASSAEDFINKMTNYDLYLPEEKVLPKHSLLYETFAVYNELTKVKFIAEGLRDYQFLDSGQKKQIVNQLFKEKRKVTEKDIIQFLHNVDGYDGIELKGIEKQFNASLSTYHDLLKIIKDKEFMDDPKNEAILENIVHTLTIFEDREMIKQRLAQYDSLFDEKVIKALTRRHYTGWGKLSAKLINGICDKKTGKTILDYLIDDGYSNRNFMQLINDDGLSFKEIIQKAQVVGKTDNVTQVVQELPGSPAIKKGILQSIKIVEELVKVMGHEPESIVIEIARENQTTAKGKKNSQQRYKRIEDSLKILAAGLNSKILKEHPTDNNQLQNDRLFLYYLQNGKDIYTGKPLDINQLSSYDIDHIIPQAFIKDDSLDNRVLTSSKENRGKSDNVPSLEVVQKRKAFWQQLLDSKLISERKFNNLTKAERGGLDERDKVGFIKRQLVETRQITKHVAQILDARFNTEVNEKNQKIRTVKIITLKSNLVSNFRKEFRLYKVREINDYHHAHDAYLNAVVAKAILKKYPKLESEFVYGNYQKYDLKRYISRSKDPKEIEKATEKYFFYSNLLNFFKDEVHYADGTIVKRENIEYSKDTGEIAWNKEKDFATIKKVLSLPQVNIVKKTEIQTHGLDRGKPKGLFNSNPSPKPSEGSKENLVPIKQGLDPRKYGGYAGISNSYAILVKAIIEKGAKKQQKTILEFQGISILDKINFENNKENYLLEKGYIKILSTITLPKYSLFEFPDGTRRRLASILSTNNKRGEIHKGNELVIPEKYTTLLYHAKNINKALEPEHLEYVEKHRNEFAKLLDYVLDFNEKYVGALKNGERVRQAFDDWETVDIKELCFSLIGPENSKNAGLFELTSQGSASDFEFLGVKIPRYRDYTPSSLLNATLIHQSITGLYETRIDLSKLGED

SEQ ID NO: 8307 - protein, 1121 aa, unidentified
  REGION 1..1121: note = Description of Unknown: Cas Enzyme sequence
MNGLVLGLDIGIASVGVGILEKNSGKIVHASSRIFPAATADNNVERRKNRQARRLHRRKKHRGVRLKDLFEYYGLLTDFSKVSINLNPYRLRVDGLDQQLTNEELFIALKNIVKRRGISYLDDASEDGGTVSSDYGKAVEENRKLLAEQTPSQIQLERFEKYGQVRGDFTVVENGQKCRLINVFSTSAYRKEAERILRKQQEFNSKITDEFIEDCLKILTGKRKYYHGPGNEKSRTDYGRFRTDGTTLDNIFGILIGKCTFYPDEYRASKASYTAQEFNLLNDLNNLTVPTETKKLSEEQKKTIIEYAKLAKTLGASTLLKYIAKMIDASVDQIRGYRVDVNNKPEMHTFEVYRKMQSLETISVGELSRNVLDELAHILTLNTEREGIEEAINTKLRDSFSQDQVLELVQFRKNNSSLFSKGWHNFSLKLMMELIPELYETSEEQMTILTRLGKQKSKETSKRTKYIDEKELAEEIYNPVVAKSVRQAIKIINEATKKHGIFDNIVIEMARENNEEDAKKDYIKRQKANQDEKNAAMEKAAFQYNGKKELPDSIFHGHKELATKIRLWHQQGEKCLYTGKNIPISDLIHNQYKYEIDHILPLSLSFDDSLSNKVLVLATANQEKGQRTPFQALDSMDDGWSYREFKSYVKESKLLGNKKKEYLLTEEDISKIEVKQKFIERNLVDTRYSSRVVLNALQDFYKAHKFDTTISVVRGQFTSQLRRKWGLEKSRETYHHHAVDALIIAASSQLRLWKKQNNPLISYKEGQFVDSETGEIISLTDDEYKELVFKAPYDHFVDTLRSKTFEDSILFSYQVDSKFNRKISDATIYATRKAKLDKEKSEETYVLGKIKDIYSQAGYDAFIKIYNKDKSKFLMYHKDPQTFEKVIEEILRTYPSKELNDKNKEIPCNPFEKYRQENGPIRKYSKKSNGPEIKSLKYYDNKLGNHIDITPESSDNQVVLQSLKPWRTDVYFNHQTKKYELMGLKYSDLSFEKGSGKYSISNQKYNSIKRIEGIDEQSEFKFTLYKNDLILIKDSENNEQKLFRFNSRNDTAKHYIELKPYDKAKFDGEQELITILGNVAKGGRCLKGLNKSNISIFKVKTDVLGNKHFIKKEGDEPKLKF

SEQ ID NO: 8308 - protein, 701 aa, unidentified
  REGION 1..701: note = Description of Unknown: Cas Enzyme sequence
LLSLWEARQAGDNGRLDDIFECLHTKNDDELHQELVETHGLDGETADKLMALQIGVLTSSVSRRFMEEIVPVLRDKGLIYSDAAAELKDDNGKPLHHCLDRDGKRWSRLPYYGEVLRGSMLGADPTANPLTQPEQHFGRINNPTVHVALNQLRKVLNALIDRLGSPPVEIHVELARALKQSRKRRDKVMKRQTRERNRNNKIRELCADLGKSEPSDQDIKKIKLWEELGEDASKRLCVYSGRPISKKQLFKENEVVIEHILPFLRTGDNSMANLTLSLSWVNQLKGSHTPYEAFADGQHKDFVWAKILERARGLPENKRWRFKHDAMELYIRDDDFSPRQLTNTAYISRAAQRYLRSLEGVRQVVPHRGVLTALVRGKWGLNGLLNSGNRKTREDHRHHAIDAAVIALTDRSVLNKVSRLSSRDADLQQALSELELELDPKISDDIRARVPKIVVSYKPDHGLSGKMYAETAYGKVPPKSRDSNLPEHRWVARKELTKLGEKGCNTIRDRALRDALQKHLDKAKADKMTPNKALAKFSKDYGVRRVRVLINNQTIKSIPSASYKGYAPDSYVCCDVWQVPAAGAGKGERDKFTWRGEFWSYTDTAGEKTPHKAKKKPHSAARFVARLFKDDLISYEEDGRTCFARVAEFSTTDNRLDVRPHHLADCPKNRHSINELGKKGLRKVYVSPDGRVNSAGGGPLP

SEQ ID NO: 8309 - protein, 383 aa, unidentified
  REGION 1..383: note = Description of Unknown: Cas Enzyme sequence
MHWRLDLGTNSIGWWAIRVKRKGNAPNAPWQAIESIDGGVRIFSDGREPPKKGRVGDSRAAARRDARCMRRNRDRGRIRMRKLISYLIKLGLLPNTPEERLVLFKTPKKSKGDPDRYNPYRLRAEALKRALSPHELGRALQHLGLRRGYKSNSKVNNDEDGGKLRERIAELRARLGKETLGQYLWENYQREKLKPSKKAKPSGIRFRGEKDVFPDRKLCAAEFDAIRDVQEPHHKITGADWDRLRNEHILFQRPLRSVERGYCEFFPKLRRHWKDTPIGHDFRIFQQLNSLLWIDSQEEEHPLDAEQRASVLNLLMSEPEKLSSSSCSAKKEKTANLCSRPDPGSKWKAKKAKAWNLTVLLPNCERTHCCLFGRPVRLAITAA

SEQ ID NO: 8310 - protein, 1089 aa, unidentified
  REGION 1..1089: note = Description of Unknown: Cas Enzyme sequence
MKDEYRLGLDIGTNSLGWAIWRLGEKGPEEIVDMGVRIFPDGREPGKNGTPGLSLAVNRRMARGMRRMRDRALRRKKVLVNELVRQELWPKEEGRFDYSCWDPYKLRAKALRKRLEPAELGRILLHFAQRRGFKSNRKLDSGDDEMGMNKKRIAALKEKLKSERFETLGEYLNSRKKTGARFREGSEFYPDRQLYIDEFRRIQEGQKEYFPKLGWDDLYKILFSQRGLKPQVKGRCQFTGEERARKCLPSSHRSRILQELANMRIIDSHGGKISLSREEFSLVFEKLERQKSLTFSKLRTLLKVNRRFNLEDEKRKKLSGNDTSYELRKKDHFGDLWDDFDEKTQDDIVNEIVEAEEDSKLRDYLYRYKLSSSQVEKIVKLTFPGGISRYSACFNRMCSRIMRRDCVGFAAACKTLGCDHRLPEGRGEAELLPYYGEVLSESCIPHGAPNQNASEAEFGKIGNPTVHITMNQLRRVVNPLIEKHGKPKEIVLETSRELKHGRKKVSEIIHQQTENRKYNEKLDKELKEDFSLTNPGPDDSDKLRYYKELKLKNSTAFCPYCGKVIKAEDLFDSGIEVEHILPFLRTLDDGRNNKTIAHKKCNHSKGDKSPYEAFGHSPKGFNWQEICSRASYLPGGKRWRFDQDAMERFENNGFIARQLTDNAYNAKAARRYLTAICHTDRVWGVACRQTAELRRQWGLNHILSKKGDVNNRSDHRHHAVDAAVIGLIDRSMIQSIAEANSRSEGYLRRAKFKAPPFPGGEEGRRRVAAVVKSIVPSFRPDHGSGGRLYKETAYGKIRKALPLDTADLKKDMIARIVPVRVRKEFENMKDKEGFKKTKKTLLKIHPRVRVMQELWTTSKPITSIEESDLKEPAYGKNTRGPSDFALRKRLKEYIKEYIKERPEEELKKVLESYSEVSGVRHVRYIPKNQEIKAIASSPGKGYEIGDYAYADIWKIPDSKGKGSYKYEGIFVSKLEARRIEQKGSVPRKPHPAARRLMRLHKNDTIRVEGEKYCLIYRIAGFSTKANKLDIQPIYAGNESWFENTNPKSLDVSYPSPKKSRPQCFKSVNSLWHKHSRITRIIVRCDGSFR

SEQ ID NO: 8311 - protein, 959 aa, unidentified
  REGION 1..959: note = Description of Unknown: Cas Enzyme sequence
RMLNYLVSLNLLPNALQESPQPEIILNKLGDPYQLRAKALDHQITAHEFGRVLLHFVARRGFLSSKKQVAGDLIDDPDTVAFLNELDDQPTADKEEGAFKADISEVRKSINEAGARTLGEYLYKLTEGVCKRNRSHEGGHLRTDRKMYQDELELIWQQQSPYFSRLPDDFMEKDNGIKQIIFYQRPLKLKKDRIGKCSLEPKNNRSSMARLEVQRFRYLQDVNNLQRFERHSEQWLAINKADKTKLIAYFEHHPKITITALKKLLNFDKSSKINLEAKNLKGNITACEIRSVLGEQWDNYSDVSQHSLVEDLLSIKKKSALKTRLINHWGLGVAQAIELCLLEFEPSHSNLSLKAINKLLPFLQQGLIYSRKDKETGELGALQAAGYDDEVNELEPQNKLGQPIETSNPIVNKGMHELKRVVNAIIKQYGKPDGIRIEMARDLEMNTKRYKENEARQNKNKKENENAVDAYKGLKLSKYPSHDDKIKYRLWQEQDKHCAYSNKPIPLNAVFTSTVEIDHILPFKKSLDDSYMNKVLCYVAENRNKGDRTPKDAWGGNEEKWNQITQAISRWKGLDSKVERFSQTEADLQKRDFISSQLNDTRYISKLALDYVKQLGCDVSVTKGFVVSQIRHQWGFNNLIGETDKKERTDHRHHAIDAVVIAATSRRLYTKAVNQIERNKLKIEPPYPELRHELDEKLKHMLISHASQRKLSGGLHEETGAGYIEQHGGLVYRKTLSPEFTTKNAKNIVDEAIKELVLAHLDHYGNDSKKAFADNVTVYHENGKTPIKRVRVLQSKTTLKKLEKNKFGVKDKSGKVFKYMSYGNMHHVEIIQHKETGKYKGEFVTTMQASHRIKGIQSALNPEGRKQAITKIDHGDDWQFVMALHRNDLVSVAVADDERVYYRVQKLNTHSNTLVLRENRASTLQNKQQELNVSIISDNFGSKDIHLHQINAIGMLAND

SEQ ID NO: 8312 - protein, 979 aa, unidentified
  REGION 1..979: note = Description of Unknown: Cas Enzyme sequence
AKVDPNFYLRLKESKYYREDKTHKLPYTIFNDKDYTDKDYYKEYPTIYHLRSSLMTEKEPDIRKVFLAIHHILKNRGHFLYKDLSVERNNLEDLIKELLEKGQFLDIEEIDTLLLNRIKEISYSEISKENKEDEINKLLGKYKNVYNVKQLKKVFKLIFGRTLSLSDLFDDERYKDVDKDVKKISFKEKNYDELRYMYEEVLKEGRDMKVLDLAKKCYSCITLDKIIQGGKTLSESKVELFEKHKTDLMKLKSLIKNDAKLSEEKRDEIYRVILKVDKEKGTNYVNYVKTTKKGTCCTYEEFKIFLKKELAKLQDCEEKNIIIKELDLETFLPLQRTKDNSVVPYQIHREELIKILDNAEKYHSFLKEKDESGYTVKEKIIQLLEFRIPYYVGPLNSHKKANEGGYAWSVRKKGEENTPVTPWNYSKVIDESASAEKFITNLTNKCTYLKGEEVLPKYSLLYSEFALLNELNALRYDGNRISVEARNTIIEKLFKEQGKKVRKKTIKELLKIEGYIDGNGEISGIDKTVKNDLESYRDFKKILGDKFNTEHVENIILWLTIFDKGEGKKLVKEKIKKEYRNIYTEGEISEILKLNYSGWGKFSRNLLTEITSKKLVNESTGECLNIINAMRYNNILFMELLTDRFDYMGQIEDFNKALQKEVTEITPDILEDLYVSPAVKRSIWQTIRIVEELKKIIGCEPAKIFIETTRKNKTKKDTTSSRKETLEEVYNKISSNEDIMNLEKELEYTFNLQYKNKMLKGENNFSLKRKKLFLYYLQLGRCVYSGESIKLDKLFNDNYYNIDHIYPRSKVKDDSIYDNLVLVTREKNEKKEDKSIFEVGFQTSNNKRFWKFLKEKKLITEEKYYRLTRTSEFTDYELTGFIARQLVETSQSVKEVASILRTLNPNSTVCYSKAENIIDFRKNFGKIKDGNRQSKNTEQLIKVREINDYHHAKDAYLNIVVGNVYDTKFTRNPYNYISN

SEQ ID NO: 8313 - protein, 1122 aa, unidentified
  REGION 1..1122: note = Description of Unknown: Cas Enzyme sequence
MNGLVLGLDIGIASVGVGVLKKDTGEIIHASSRLFPAATAGNNVKRRTSRQARRLHRRKKHRGVRLQDLFEDYGLLTDFSKVSINLNPYRLRVYGLDIPLTNEELFISLKNMVKRRGISYLDDASEDGGVVSSEYGKAVEENRKLLAEQTPGQIQLDRFERYGQVRGDFTVVENGEKRRLINVFSTSAYRKEAERILRKQQEFNNQITDDFIDDYLTILTGKRKYYHGPGSAKSRTDYGRFKTDGSESDNIFGILIGKCTFYPDEYRASKASYTAQEFNLLNDLNNLTVPTETKKLSEEQKKTIIEYAKSAKMLGASTLLKYIAKMVDGSIDQIRGYRIDVNNKPEMHTFEAYRKMQTLETISVGDLSIEVLDELAHILTLNTDREGIEDAINTRLINAFSQEQILELVQFRKNNSSLFSKGWHNFSLKLMRELIPELYKTSEEQMTILTRLGKQKSKETSKRTKYIDEKELTEEIYNPVVAKSVRQAIKIINEATKKHGIFDNIVIEMARESNEEDAKKDHIKRQRANQDEKNAAIEKAALQYNGKKELPDSIFHGHKELSTKIRLWYQQGEKCLYTGKNIQISDLIQNQYKYEIDHILPLSLSFDDSLSNKVLVLTTANQEKGQRTPFQALDSMDDAWSYREFKSYVKDSKLLGNKKKDYLLTEEDISKIEVKQKFIERNLVDTRYSSRVVLNALQDFYRTHKFDTTISVVRGQFTSQLRRKWGIEKSRDTYHHHAVDALIIAASSQLRLWEKQNNSLISYKENQFVDSETGEIVSLSDDEYKELVFKAPYDHFVHTLTSQAFEDSILFSYQVDSKYNRKISDDTIYATRKAKLDKDKSEETYVLGKIKDIYSQPGYDAFIKIYNNDKTKFLMYHKDPQTFEKVIEEILRTYPSKELNDKNKEVSCNPFEKYRQENGPIRKYSKKGNGPEIRSLKYYDNKLGNYIDITPDGCDNQVVLQSINPWRTDVYYNNKTKKYEFLGLKYSDLYFEKGTGKYKISKEKYDVIKKLEGVDEKSEFKFTLCKNDLILVKDVETGQEQLFRFLSRNSKGKHQVQLKPIDKSDFEKGEKLIDIFGTVPNSTTQCVKGLNKPNVSIYKIKTDVLGNKHFIKKEGDKPKLKF

SEQ ID NO: 8314 - protein, 906 aa, unidentified
  REGION 1..906: note = Description of Unknown: Cas Enzyme sequence
MTEKSSYSPKKYSLGLDIGTSSIGWAVLDLDKERIHDLGVRIFERPEDPQNGDSLAKPRRDARSARRRLKRRRQRLNHLKQFFVDQNILTKDQVEEVLNYKSDFNKLDVYELRSKTLAEELSPEELIKVLYQIAKRRGFKSNRKVVEESDKEGGRVTSALKANEKFLADNNYTTVGDALSRDEKFALHKRNKRDDYTNSFARDDFLRELEAIIKTQRNYALKNVPEQAISELIYGIDDGQVTNVSAIMYQRPFMTKELIEKMVGSCTFEKDEKRAPKASYSFEVFRLASDLSHLVFIPRDASKRQAKRENLEVRLSSEQISKVIDLAKNQKSLTYKKVRSTTGISEDYVPKDARGKKKEGDEFGEDNIFGGLKAYNDIRLALKDLPEDWAKIDNESAINQIAYILTTQKADEGIHAELDSLPLSDKAKEAIVKIKPTNFKTFGHLSIKALQKITPHILEGMTYDKACESAGYDFKKQSASLEQITNPVVKRAITQTLKVVRAIERKYGKPYFIKVETARDLAENFKDRNAIKKENEENQGYNEDIRSIITDGYEVSPKTKDGKQLLSHLRELNVRLNKNADFNGQQIIKVKLYREQNGVCLYSNKEIDFETMLRDDNAYQVDHIVPFSRSNNDGITNKVLVLTEENQKKGNQTPFEYFGADEKRWKEYVARVESTYQTREVKKGDKDAGTNYKYNGYAMKKKQNLLLQDYKNDSWNVRALNDTRYITRFIQNYLRQNVDFAEGEEKQRVIAPNGTTTAYLRKRWGLAKDRAEDVLHHAKDAAVVAAIDPKIVYQANLFSKEQEMKLYLNNAKTIDEKRQILLQSTDENTGEITDEATFTQAQKDLAQVEYFKLRSDEETKKRFPDPWPGFSKEVMKRTLNTDIATLQNELRGLDNYDEDFRLNVKP

SEQ ID NO: 8315 - protein, 1050 aa, unidentified
  REGION 1..1050: note = Description of Unknown: Cas Enzyme sequence
AEEAGAAEAEAEGKPKKEKEGYVAQVKGRYQALKEKGQTIGQHFAEELRANRQTASRGVYYTYRIKEQVYPREAYIEEYDRIMAVQRTFYPELLTDALIGRIRDRIIFYQRPLKSCKQLVSFCEFEKKERVIRVKHTNKEGVEELIEKTITIGPKVAPKSSPIFQVCKVWESIHNIRLYYPDGTERELVQEEKQKLFDYLQKNDKLSLTVLRKELKIKPKDKLWCDKLLVNGIAGNTTATILRKALKGYDQYEGLLRFNLTTRDSHEVDVIRPIIDESYQDEPLYKFWHILYSIEDRAEMRSALIGQLGIKAEDLDGGLMDALYKIDFVKQGYGNKSAKFICKLLPHLQEGKMYSEAAKAAGIRHSDSMTAQERDERSLLDEIPLLQKNALRQPVVEKILHQMINLVNALKREHGEIDEVRVELARELKMSREEREKVLSNNRKRKAKNETIAKRIAAEGITPTKARIQKYSLWEESGGRCIYCGNPVGVVQFLRGEEIEVEHIIPRSILLDDSMSNKVCACRSCNQEKGNRFAMEFIQSKGGVKEYTDRVEQFFHDNYPKRQRLLMLPENLPEDFIERHLRLTQYISREAQGILRKGIRLVSASEGGVTAKLRQLWGYDNILRDLNLERYRSMGETEVVTVEHRDGQRTDERIKDWSKRKDHRHHAVDALIVACTRQSYIQRLNRVNAEADRQEMDAFIKEQQQEHKLSKKEKLSLLEHWLIRQPHFTTKEVMKHVEEILISFRPGKRTVTRGRNVYKRSGKTDVQRGVLIPRGALSEETIYGTIQLHRKDRSGTELVRSYVKRIPLSKVNPSNVKNIVDSQIREVIQAALLSLSGRKGVLPTELYLDHSRRRVVRSVRCLVRSSTLIPIRFNADGEAIGFTKPGLNHHVALYRDGVGKIRESVVPFFRAVERARYGIPMIISDPSKAREQARANPNLPESVLLSLPEEDWQLEEFLQRDEMFLLGMTDEAIDRAMETKDYTTLGRHLYRVQNLAAGDYVFRYHLETTLDGKDNVGDIPSSYRIASQKIYQELNPRKVKIDLLGRISLA

SEQ ID NO: 8316 - protein, 1087 aa, unidentified
  REGION 1..1087: note = Description of Unknown: Cas Enzyme sequence
MSAHHLRVGIDVGTHSVGLATLRVDDQGTPIELLSALSLIHDSGIGEDGKKTASTRKEISGVARRTRRLLRRRRKRLQQLDKVLLDLGFPIPDLGGQTDPYLVWRVRAQLVEETLPEELRGPAISMAVRHIARHRGWRNPYSKVESLLSPAEDSPFMEALRERIMKGPGVLLDDDITPGQAMAQVALTQRITMRGPDGILGKLHQSDNANEIRKICARQGISPDVCKQLLRAVFKAESPRGSAVSLVAPDPLPGQGSFRRAPKCDPEFQRFRIISIVANLRISEAGNRDRPLTADERRQVVTFLLEDPREDLSWVDVAEKLGISRQALRGTATLTADGERSAAQPPINVTDQIMRKTKISLLKTWWAKADAERQGAMVRYLYEGLEDSECAEVIADLPEEDQAKLDSLHLPAGRAAYSRESLTALSDHMLATTDDLHEARKQLFGVDDSWTPPAEPVGAPVGNPSVDRTLKVVARYLAAVENVWGKPEVIQVEHVRDGFASERAARERDRANNRRYEVSQRAIKDIQQSYGVEGHVRPGDVMRHHAITLQDSACLYCGGTIGYHTSQLDHIVPQAGTGSNNHRENLVAVCERCNRSKSNTPFAVWAQTCGIPDVGVKKAVERVRGWRNRPGGMTSGELKRLKKEVIARLQRTQEDPEIDARSMESVAWMANELRHRIAATYPDTDVMVYRGSVTAAARKAAGIDSRINLIGEKGRKDRIDRRHHAVDASVVALMEPSVAKTLAERSSLRWAQRLTGQEETWKQYTGLTVGAREHFESWRSHMLRLTELFNERLAADEVHVVENLRLRLGSGNAHDDTIRKYATPRLGDGLTANQVDRACSPALWCALTREKDFDEKNGLPAREDRFIRVHGQELTSNDRIELFSKKRGNDAKEKPFGAIAVRGGYAEIGSTIHHARIYRIEGKKPVYAMLRVFTHDLLSHRHGDLFSAVVPPQSISMRCAEPKLRQAIAEGNATYLGWVVVGDELEIDIDSFKTGQIANFLEEYPGTTRWRIRGFYNDHALRLRPAYLSAEGLVDPSEAVLKTLSAPGWLPAINPLAATHPRVIRRDALGRMRKSSRSGLPTSWIIK

SEQ ID NO: 8317 - protein, 1438 aa, unidentified
  REGION 1..1438: note = Description of Unknown: Cas Enzyme sequence
MKYIKYILGLDIGSNSIGWALIQLFIEEKQGKIIATGSRIIPMDQGILGDFEKGNTVSQTAERTFYRSARKLRSRHLLRRERLHRVLHILGFLPSHYDKQIDFSKRYGKFIDNTEPKIAYNEGKFLFMDSFQEMLADFKSHQPDLFYTKKNGEESKIPYDWTIYYLRKKALSRKISKEELAWIILNFNQKRGYYQLREEEEENKENDFEIISSKIISVIKKDKDKKYNKYWYDIILENGLVYQAAFYNDFVYNWINQDREFIIERTSLKNGTEKVKLSYLPTFDEIDKMDKKEQDKYYKKIKIKTENSIGNKTVGCYIYDHILQNPNEKIKGKLVRTIERKYYKEELKAILEKQVALQPELFTDQLFADCIRELYSKNEAQQRNLAARDFVHLFVEDIIFYQRSLRRQKSTLANCSLESRSYIDKDSHTRKEVPLKVCPKSNPYYQEFRVLQWLQNLKIYEIDTDQEVTHEFIKTLEDKQQLFDFLMNQKEIDCEELLKYFLNQTYPNAREKALKSELKKWKDTYRWNYVYDIGEKSSKKYPMNETRYELKRHLEKVANLPDDFLSSEVEYLLWHLIYSVKDKVAYEKGLKKFAQKHHLDKDSFVESFKKFKPYPSEYGSFSEKAIRKLLPLMRFGAYWDFNHIDKNTQKRIEDLITGVENEEIRTILREKAEKYQLEKETDFQDLPLWLAQYIVYNRHAEASSLEKWTSVNDLETYLNEFKQHSLRNPIVEQVVMETLRVVRDIWQQYGQGQASFFDEIHIELGRELKKTAKEREKLSKQNQKNEDINLSIKEKLKELKKYNTRAYSITHQEKYKLWLEQKHISPYTGQIISPENLFTDNYEIEHIIPQSRFFDDSLSNKVVCESIVNKAPYKDRQLGLEFIKNQGGRIVKELSKENKTIKIFTEEQYRTFIKEHYSNNPEKTKKLLLEEIPEKMVARQMNDTCYISKFISEILSKIVRSDEQDEGVHSKNVILCTGKITSILRQDWGLNDIWDNLILPRFERMNNLLQKEKFTIYSIEKQKKIPVVPINDQFKSFQKKRIDHRHHALDAIIIACVTGEHINYINNQHALEKEKDKKEKQKEHDKLREKLCIKKYNKGSEENYSWIFKKPWAHFTQEVRTALEGIVVSFKQNLRVINKATNYYERWVEENGRYIKKMVKQEGTNWAIRKPLHEETISGKIYLDREEITKNDILTATRKTVDSSFDEKRIKKITDTGIQKILLNYLKYKGSPEIAFSPEGLEELNKNLSIYNDGKPHKPIYKVRIYEKGSGRFALGEKGRKYKKYVQGAPNLYFGIYQGANKRSFVTIPLNEVIERQKQGRPSIPEYNEKGDPLLFSLSPNDLVYVPIKGEIIEDIDFQNLSNEQKERIYNVNDFSSTCYFTPNRIAKAIFPKEVDLQRKGDKLSGSYDTKTASLEGIQIKEVCIKLKVDRLGNISKA

SEQ ID NO: 8318 - protein, 1261 aa, unidentified
  REGION 1..1261: note = Description of Unknown: Cas Enzyme sequence
MKTLGLDIGTNSIGWGIVDEAAGKIEDCGVYIFPEGVKKEKGNESSKAAERTGFRLARRLKFRRKLRKYETLKVLIKNKMCPLSMEELEKWRRQKIYPTSRDFLNWYRTDEVKNREPYFLRKKCVEQKAEPHEIGRALYHLAQRRGFLSNRKETTKASEGEVSKSIGELSSLIGDRTLGQYFYELKQSSEKVRGKYTSRKEHYEKEFNRICEVQGFSEELKNDLYRAIFFQRKLKSQKFLVGKCTFERNKPRSPISHFEFEEFRMLSFINSIKISKNPSEDEKNDFEPLTEEEKELIKPLFFRISKPSFQFADIEKKLKGKNEFWKFNYRKETNVSGCPVSAGLKNIFGDDSSNESWKVKKIGQYDMCDIWHVLFDFDDDEKLLEFAKGKLFLSDEMAKKFCAIKIQQGYANLSLKAIRKINPFLRKGYIYSTAVFLANIPTMIGQNSFLQNEEEIENSVKNIIGTLKDKNNIIVLANRCLESAFKDKDNDFRFEEWDKSVVENSAQDLFGKKKWNEYDEEKRKDIILQVSKKVEDKLKKNTGRNPNDCKYLLLRTDKLIEKYLDQKGFAVKGELYHPSDPNYNLEIPVPAEDGKIYLASPRSQSVKNPVVMRALHQLRKLVNYLIKTGKIDSSTRINVELANEVNDKNKRKALEEFARANEKNNADAKKKIEELCVEAGFNIVPTDSDIKKFRLWQEQNETCPYTGKHISFTDLFGPLPKFDFEHTIPRSLSYDDSLENLTLCDSEFNRNIKKQKLPSELPNFEEINKRFQKFYEDKIDNCLKIIEHNTKRGGTYEDPAAKDLRIVKKHKAEYELDYYKGKLKCFSATEVTSGFKHSQLNDTRIITKFSLSYLKGVFGYVQPVKGSMTDTFKRQWGLMERDETKDRSNHIHHTVDALTIACINRGKFNLLSEAIKNSSDGKHLKFPKPWETFDTDVLSAVQYMIPKYFEDENSLRQSKKIMRNRDGKPVLKNGKPVFIQGATARGSLHKDTFYGCIKTVPEKGGKSDMIYVQRVSVSTLDEKSAEKIIDKGIKETFKKNLSDGIQTLQEIQTSGILLPFKKDGRDVFVKRVRIKAQPTSPITLKEHHNVILKNPKDYKQNYYVVNDENYLLAIYRGKDEKGKDVSDHKICNLLDAVKSRQNKTELYPDFKEKNGANLQLYKVLKVGKIVILQNDIQEDVFALPKEKLWKRMYRIAGLATSGKDVYIKLVHIVSAKPWEYMKGEKDLNAGIECLRYLQSNFKGLVEGQDFAVSPIGEIIRK

SEQ ID NO: 8319 - protein, 1400 aa, unidentified
  REGION 1..1400: note = Description of Unknown: Cas Enzyme sequence
MGKQKFNDYYLGFDIGTNSAGWAVTDLQYKLLRFNKKDMWGSRLFDEAQTSKERRVYRNSRRRLDRRKKRLKLLEELFLDEISKIDNTFFKRLKESNLYNEDKSIKFNYPLFNDKDYTDIDFYNEYKTIYHLRKDLIFEDKKFDIRLVFIALHHILKYRGHFIFEGQSFEEIKSFDSIFTQLSSYFLENFDFNIDVSIKEKLEEIILSDNTKSIKKTEFKKIFSDNKVLSVLNMAIGSKVSLKDVFNNEELKEQKISFSEIDYENEKRDEFYQLLGEDIFLIDLAKKIYDFMVLKKILKNTDSFSASKVALYCEHKKDLDDLKYIFKKYLTKEDYFKFFRSNVEKINYPSYIGLNKIKSKKIIKENKCSISDINKELKNKYLKDIKLEAKDKELFNRIFNKLDEFKFLEKLKSSENSTVPYQVHEIELKKILDNQRKYYPFLNEKIDGKSVYEKIIQLFEFKIPYYIGPLNTDPNVKGKNTWVVRKDENNKTPITPWNFEQKVDMQKSAEEFIKRMTNRCTYLKAEDVIAKNSLLYEEFILLNELNKVTVDNEILHPTLKTEIINELFKTTVKVTKKKFIEFLKKKQAVNDVESITGIGVEFNCKLQGYNTFRKILGKKIENVNVKNFVEKCIELKCLYGSDKKLFENAIGKIYREYNITDEEFNKINRLNFNKWARLSKKFLTEISFEKTDGTKRFESVIEALRSTNYNLMELLSDKFNLQSKIDEINGEDDFSNIDIKEYVDKLYVSPSVKRSIIQTYKIAMEIKKITKKDPKKVFIEMTKGKGEKGKRTEKRKDKIKKLYKNIKDTLSDYCNNLQDLTLQVEKYDDNRLRQKKLFLYFMQMGKSMYTGRCIDLEDLFNNNVYDIDHIYPQSKVKDDSFDNIVLVEKEENHRKSNELLKEEIQSRMNNYWIFLRENKFISKEKYNRLTRKKDFTDEELGDFVARQLVTTRQSTKEIAKFFEKIFEKTTVVYSKASLVSEFREKYDIIKVREVNDAHHAQDAYLNIVVGNVFNTKFTKNYWKFTKDIKRQNEENPNEKKGYNLRKIYESDVFCNDSVAWVYSKENPKYNTINTVKDMVYRKTANITRMLVEGKGQLFNLTIKDKTQLKKNVGNIVANTPISLKNRKLHLNSVEIAKKYGYFDSLNNAYFVLFKYEEKGKEKIGFDSITIAYKERLKKNLDIEKFLENKGYKNSKLIRKIFKNQKVLINGYPYLLKSFNKQSQIKFNNFKILYLNENNLKFAKDAIKFEKNNANVDLKKQKYIVSFLKKKKQNEINETYEECIDRLNDEFDTLFLKLCDIQKSSIYTNYKLQDFSSNKKSIEIKDKFDIFKSLDLYKKSKLIKEFLNYYKYEKNDLDFSLIDIDKKANCIQKHFTEDLVKDFVIVDESVTGLFVKKERLK

SEQ ID NO: 8320 - protein, 1082 aa, unidentified
  REGION 1..1082: note = Description of Unknown: Cas Enzyme sequence
MTAFKPNPLNYILGLDIGIASVGWAMVEIDNEENPIRLIDLGVRVFERAEVPKTGDSLAAARRAARSIRRLIRRRAHRLLRARRLLKHEGVLKPEDFDENGFIKLLPNTPWQLRAAALDRRLAPLEWAAVLLHLVKHRGYLSQRKNEEQTADKELGALLKGVADNTHALQAGDFRTPAELALNKFEKESGHIRNQRGDYSHTFSRKDLQAELVLLFEKQKEFGNPYVSDDLKNGIEDLLMTQRPALSGDAIQKMLGHCTFEPAEPKAAKNTYTAERFIWLTKLNNLRILNQGNERPLTDAERTTLMDEPYKKSKLTYAQARKLLGLDDTAFFKGLRYGKDNAESATLMEMKAYHAISRALEKEGLKDKKSPLNLSPELQDEIGTAFSLFKTDEDIAGRLKDCLQPKILDALLKHISFDKFVQISLKALRRIVPLMERGKRYDEACAEIYGDHYGEKNSEEMLYLPPIPADEIRNPVVLRALSQARKVINAVVRRYGSPARIHIETAREVGKSFKDRKEIEKRQEENRKDREKAAAEFQEYFPNFVGEPKSKDILKLRLYRQQNCKCLYSGKEINLGRLNEKGYVEIDHALPFSRTWDDSFNNKVLVLGSENQNKGNRTPYEYLNGKDNSREWQEFKARVETSRFPHSKKQRILLQKFDEEGFKERNLNDTRYVNRFLCKFVADHMQLTGKGKRRVFASNGQITNLLRGFWGLRKVRAENDRHHALDAVVVACSTVAMQQRITRFVRYKEMNAFDGKTVDKETGEVLHQKTHFPQPWEFFAQEVMIRVFGKPGGKPEFEEADTPEKLRALLAEKLSSRLEAVHEYVSPLFVSRAPNRKMSGAHKDTLRSAKRFVKHNEKISVKRVWLTDIKLADLENMVNYKNGREIELYETLKARLEKYGGNAKQAFDPKDNPFYKKGGQLVKAVRVEKTQESGVLLNKNNAYTIADNGDMVRADVFCKTDKKGKNQYFIVPIYAWQVAENILPDIDCKGYRIDDSYTFCFSLHKYDLIAFQKDEKSKVEFAYYINCDSSDGRFYLAWHDKGAKEQQFRISTQNLVLMEKYQIDELGKEIRPCRLKKRPPVR

SEQ ID NO: 8321 - protein, 930 aa, unidentified
  REGION 1..930: note = Description of Unknown: Cas Enzyme sequence
LNNIKELYPKEKQLLEVFRLIFGGKPSLDKLFAIDEYKELDAAIKSVSFKEKIYEEVRHDYEQVLSNYIELLDLAKLVYDSIILSDIKKEGKTLSESKVDFYNKHRDDLTKLKNLVKNDSKLSEDKKVELYAAIFKEDKDKGSNYVNYIRKSDEGKGCNYEDFKNFLVKELAKLEESAAKEEILRDLELELFLPLQRTKDNSVVPYQIHKEELVRILDNAAKYHNFLDEKDESGYSIREKVIQLLEFRIPYYVGPLNSSKKAREDGFAWSVRNKGYENTPVTPWNYEKVIDESASAEKFITNLTNKCTYLKGEDVLPKSSLLYSEFALLNELNALKYDGNRISLEARNAIMEKLFKQQGKKVTKTSIKNLLKAEGYIDGKGEITGIDITVKNDLKSYRDFKKILGNKFNSEHVENIILWITLYGESRKLIKAKIESVYGEVYSKDEITKMSRLVYKDWGRFSRKLLTELVSKKLYNEETGECLNIIGAMRQNNILFMELLADRFDYSKQIVEFNKELQEDVTEITPEILDDLYVSPAVKRSIWQTVRIVEELKKIIGCAPAKIFVETTRSNQGKKEPTSSREKQLKLAYKAVKKDVKELEKEIGAINFDVLNDRLSSEEQSKLKAKKLYLYYTQLGRCMYSEKPINISELFDNNKYDIDHIYPQSKIKDDSFTNTVLVERGYNAAKSDRYPLGSDIQTTSNRKFWKFLKEKKLITDEKYNRLVRTEEFSDEELTGFIARQLVETSQSVKAVAGILGELNPETSICYSKAENVSSFRQNFGKIKDGSSKSNNNEQLVKVREINDFHHAKDAYLNVVVGNVYDTKFTRNVFNFIKDKKEGRKYSLNKVFYENVSDSKTVAWEMDKTIHQVKKVMDNNSILVTRRKSEQKGGLFDATVYKAKVAAKAKEGVYYPLKTSNSIVNNVTKYGGFTK

SEQ ID NO: 8322 - protein, 1456 aa, unidentified
  REGION 1..1456: note = Description of Unknown: Cas Enzyme sequence
MKNILGLDLGSNSIGWALVQQDFENKQGRIMAAGSRIIPMDQSVLGDFEKGNTVSQTAERTTYRSTRRLRERHLLRRERLHRVLHILGFLPPHYDVQLDFTKRYGKFIDNAEPKIAYNNGTFIFMDSFNEMIEDFRKYQPQLFYKKPNGEESKIPYDWTIYYLRKKALSQKITQEELAWLILNFNQKRGYYQLRGEEEIQNPNKEIAFHSLKVVEVEAEAPNKKGEVWYTIHLENGWIYRRTSKISLKDWKGKTRDFIVTTDLNDDGTIKVDKEGNEKRFFRAPDENDWNLLKKKTEHDIDFSRKTVGAYIYDHLLQSPNQKIKGKLVRTIERKYYKDELKAILAKQIALQPELFTENLLASCIRELYRKNEIQQQNLLSKDFLHLFLEDIIFYQRPLRSKKSTIANCSLEKHSYIDKETNERKDAPIKVCAKSNPYYQEFRVLQWLQNLKIYKLETDCEVTAEFIKTAEDYQALFNFLMTQKEIDNEGLLKYFLLAKNPQIKDKAAKSELKKWLTTYRWNYVYDVADNSSKKYPMNETGYELQRYLQKVEGLPANFLTFELTYRLWHLLYSVKDKIEFEKALKKFAQKNQLDEASFVESFKNFKPYPNEYGTFSEKAIKKMLPLMRFGNHWDFSCIDVSTQKRIADLINGVENEDIRTIIREKAEKYQLNNETSFQGLPLWMAQYVVYNRHAEATDIEKWTSVSDLEAYLQDFKQHSLRNPIVEQVVTETLRVVRDIWQQYGGGQANFFDEIHIELGRELKNTSKERERLSKQNQENENTNLRIKKLLAELKEDTTIQNVRPYSPVQQELLKIYEEGVFSSTDEIDEDIQKIRKKAQPTTSEIQRYKLWLEQKYRSPYTGEVISLTKLFTEEYEIEHIIPQSRYYDDSFSNKVICESAVNKLKTNQLGLEFIQNYHGEKVPLAGNKEVTIFTEEQYKEFVKKHYANNSVKQQKLLLNEIPEKMVARQMNDTRYISKYISEILSKIVRSDEKDEGVNSKNIIPCTGKITTALKQDWGLNDVWNELILPRFERMNQLTQTQLFTSYNDRFQKNLPTVPMEYSQGFQKKRIDHRHHAMDALVIACATRKHINYMNNQHALDKSKDEKEKQQSRIDLRTILCEKKNNNWQFKKPWGTFTQEAKEALEHIVVSFKQNLRVINKATNYYEKWEEKNGVLVKKKVKQEGTNWAIRKPLHKETVSGKIVLDRKIGKDKILTATRKAVDITFTEKIISSITDTGIQKILLNYLNYKGSPEVAFSAEGLEELNKNIAQYNNGKKHQPIYKVRIFEEGSKFSLGETGTKTTKYVEAAKGTNLFFGVYQGKEKRTYATIPLNEVIERQKQGLPSAPERNEKGDPLLFSLSPNDLVYVPMEGEIAETIDFNNLSKEQKERIYNINDFSSTTCYFTPNRVAKAICPKEIDKKGKDSGSFDTKTASIEGVQIKEVCIKLKVDRLGNIIKA

SEQ ID NO: 8323 - protein, 1420 aa, unidentified
  REGION 1..1420: note = Description of Unknown: Cas Enzyme sequence
IQKIFGLDLGTNSIGSSVRNLELGENLTEQLEFFSSDIFGSSVSKNSNGREYSLAGNRSAHRRSRGLNEARRRKLWATLDLLIKHRYCPMSPESLMRWRTYDKRRRLFREYPIDDKDFNAWILLDFDGDGKPDYSSPYQLRRELVTRQFDFDQPVERYKLGRALYHIAQHRGFKSSKGETLLQQETNSKQSLTDETTDIAGEMKVSEEKLSKGLSTYMKENNILTVGAAFAQLEDEGVRIRNNNDYRAIRSQFQREIETIFKFQQGLSIESELHERLVSEKENVGTIFYKRPLRSQRGNVGKCTLERTKPRCAIGHPLFEKFRAWTLINNIKVRMPETEQAEQLPMKLRFELYNDCFLAFVRAEFKFEDIRKYLEKRLGVHFSNDEKTINYKDSTSVAGCPITARFRKLLGEDWESFRVDGQKQRQAHGKNNASFHTVSYAVEDIWHFCYDAEEPEAVSSFAQDTLKWEKKKAEELVRIWSAMPQGYAMLSQKAIRNINKMLILGLKYSDAVLLAKVPEIVKMSDEEILSVTEDYHRVEAQVGYEKRINNIVNALIAKYKSTPEEDCFADHNYEYILDESDEKEIVSKIENSLGARRWSLMDADEQTDILQKVRDKYQDFFRSHERKFVESPKLGDCFEEYLVKRFPMVEGEQWKKLYHPSQIAIYRPVPAGKNHSDLRLGNPDIGAIKNPTVLRVLNTLRRRVNQLLDDGVISPDETRVVVETARELNDANRKWALDTYDRIRHDENKKIKEILAEFYPKRRDTISTDDVDKARYVIDQREIDYFTESKTYNKDIKKYKFWLEQGGQCMYTGRTINLSNLFDPNAFDIEHTIPESLSFDSSDMNQTLCDAHYNRFIKKNHIPADMPNYDKAVRIDGKEYPAITSQLQRWIDRVERLNRNVEYWKGQARRAQNKDRKDQCMREMHLWKMELEYWTKKLERFTITEVTDGFKNSQLVDTRVITRHAVLYLKSIFNHVEVQRGETTAEFRKILGLQSIDEKKDRSLHSHHAIDATVLTVIPSAAKRDRMLELFYRIEETKKALKNYNENNKAGLNLELKGLEEKLDKEKKDCRVGRRVNELDRFINENIIVSHHTKDQALTPAHRRLRKRGKIVGGKEHQRWQTGDSLRGEIHKASYYGAITQFAKDANGKVLMKDGQAQIDPTIYYVIRRELKYKRSTQDSGFINWEDLEKVIVDTDLFGLMKGQFPEGTSFKDACEQGFYMIKKGKNGEGDVKTHRIRHVRCKAVKTALRIKEQTYKSSKDYKQFFYAAVGELYVMCSYTDGKKRDFKIYSLYDISNHRKSGTEDIPKFITDKNGNRLTLDYELHKGDMVLVYKDSPEELYDMEQTNLKRRLYMVYGFENGGMRIRMSNHLFDTDDKAESVKDYKNLPTAIRCGIKTIKFLIMGKHRDFVIRNGNIEFNH

SEQ ID NO: 8324 - protein, 1153 aa, unidentified
  REGION 1..1153: note = Description of Unknown: Cas Enzyme sequence
GSNSIGWALVQQNCESRQGKIMAAGSRIIPMDQSILGDFEKGNTVSQTAERTAYRGTRRLRERHLLRRERLHRVLHILGFLPPHYDSQIDFNKRYGKFIDSTEPKIAYNNGHFIFINSFNEMIEDFRKCQPQLFYKKPNGEETKIPYDWTIYYLRKKALSQKITQQELAWLILHFNQKRGYYQLRGEEEIENPNKEVAFHSLKVVEVEAEAPNKKGEIWYTIRLENGWIYRRTSKIPLGDWKGKTRDFIVTTDLNDDGTIKLDKEGKEKRSFRAPDENDWNLLKKKTEHDIDFSGKTVGAYIYDHLLQNPNQKIKGKLVRTIERKYYKEELKAILAKQIALQPELFTETLLADCIRELYRKNETQQQTLLSKDFLHLFVEDIIFYQRPLRSKKSTIANCTLEKRSYIDKETNERKDVSIKVCAKSNPYYQEFRVLQWLQNLRIYEIETDREVTAEFIETPEDYEALFNFLMSQKEIDNEGLLKYFLFAKNPQIKDKATKSELKKWLTTYRWNYVYDATDNSSKKYPMNETGYELQWYLQKVEGLPANFLTFDITYQLWHLLYSVKDKIEFEKALKKFAQKYQLDEASFVDSFKNFKPYPNEYGSFSEKAIKKLLPLMRFGNYWDVDSIDVDTQKRIDDLINGVVNEKISTIIREKVEKYQLNNETSFQRLPLWLAQYIVYNRHAETTDIEKWTSVSDLEAYLEDFKQHSLRNPIVEQVITETLRVVSDIWQQYGGGQANFFDEIHIELGRELKNTSKERERLSKQNQENENTNLRIKKLLAELKEDASIQNVRPYSLVQQELLKIYEEGVFSATDEVEEDIQKIRKKAEPSKADLQRYKLWLEQKYRSPYTGEVISLTKLFTEEYEIEHIIPQSRYYDDSLSNKVICESAVNKLKTNQLGLEFIQNHHGEKVRIAGNKEVTIFTEEQYKDFVKKHYANNSAKQQKLLLTEIPEKMVARQMNDTRYISKYISEILSKIVRSDEKDEGVNSKNIIPCTGKITTALKQDWGLNDVWNELILPRFERMNQLTQTELFTSYNDRFQKNLPTVPMEYSQGFQKKRIDHRHHAMDALVIACATREHINYMNNQHALDKSKDKKEKQQSRIDLRTILCEKKNNNWQFKKPWGTFTQEAKETLEHIVVSFKQNLRVINKATN

SEQ ID NO: 8325 - protein, 1168 aa, unidentified
  REGION 1..1168: note = Description of Unknown: Cas Enzyme sequence
MPLETEEFQGADDVLQNSGSKGQSITTRCIFIHPSRSYCSNVSHFAVQQYVGNSSDCSNGSQLFHLHVNAFFRYIAVVVYEIAEKQMTAFKPNPLNYILGLDIGIASVGWAMVEIDDKENPVRLIDLGVRVFERAEVPQPGAPPAAAGRWARSVRRLTRRRAHRLLRARRLLKHEGVLKPEDFDENGFIKLLPNTPWQLRAAALDRRLAPLEWAAVLLHLVKHRGYLSQRKNEEQTADKELGALLKGVADNTHALQAGNFRTPAELALNKFEKESGHIRNQRGDYSHTFSRKDLQAELVLLFEKQKEFGNPYVSDDLKNSIENLLMTQRPALSGDAIQKMLGHCTFEPAEPKAAKNTYTAERFIWLTKLNNLRILNQGNERPLTDAERTTLMDEPYKKSKLTYAQARKLLGLDDTAFFKGLRYGKDNAESATLMEMKAYHAISRALEKEGLKDKKSPLSLSPELQDEIGTAFSLFKTDEEITGRLKGCLQPEILDALLKHISFDKFVQISLKALRQIVPLMEQGRRYDEACAEIYGDHYGEKNSEEMLYLPPIPADEIRNPVVLRALSQARKVINGVVRRYGSPVRIHIETAREVGKSFKDRKEIEKRQEENRKDREKAAAKFREYFPNFVGEPKSKDILKLRLYEQQHGKCLYSGKEIDLGRLNEKGYVEIDHALPFSRTWDDSFNNKVLVLGRENQNKGNRTPYEYFNGKDNSREWQEFKARVETSRFPHSKKQRVLLQKFDEGEFKKRNLNDTRYINRFLCKFVAGHMRLMDNRETRVFASNGQITNLLRGFWGLRKVRAENDRHHALDAVVVACSTVAMQQKITGFVRYKEMNAFDGKTIDKETGEVLHQKTHFPQPWEFFAQEVMIRIFGKPDGKPEFEEADTPEKLRALLAEKLPSRPEAVHEYVMPLFVSRAPNRKRSGQGHMETVKSAKRLNEGISVLRVPLTQLKLKDLEKMVNREREPKLYEALKARLEAHKDDPIKAFTEPFYKHDKAGNRTQQVKAVRIEQVQKTGVWVRNQNGIADNATMVRVDVFEKAGKYYLVPIYSWQVAKGILPDRAVVAYADEENWTIMDESFKFKFVLYANDLIKLTAKKNVFLGYFVSLNRATGAIDIRTHDTDSTKGKNGIFQSVGVKTALSFQKYQIDELGKEIKPCRLKKRPPVR

SEQ ID NO: 8326 - protein, 1189 aa, unidentified
  REGION 1..1189: note = Description of Unknown: Cas Enzyme sequence
MARKVLGLDLGVGSIGWCLITLDKDEKPQSILGMGSRIVPLSTDDATEFTQGKAITKNKMRTVARTIRKGMDRYQLRREALKKVLREHGMLPDESLIKLPLLELWELRARAATPGEQLSLTELGRVLLHINQKRGYKHAKADEAAEAEAEGKSKSKKEKEGYVAQVKGRYQALKEKGQTIGQHFAEELRANQQTASRGVYYTYRIKEQVYPREAYIEEYDSIMKVQRTFYPELLTDALIGRIRDRIIFYQRPLKSCKQLVSTCEFEKKERVVQVKRINKDGVEELVERTITIGPKVAPKSSPIFQVCKVWESIQNIRLYYPDGTERKLEQEEKQKLFDYLQKNDKLSLTALRKVLKIKPKEKLWCDKLLDKGIAGNTTVAILRKALKGYEQYEGLLRFDLTIRDGHKADEDGVIRPIVDESYQNEPLYKLWHILYSIEDRADMYRALVGQLEIKEEDLDDGLMDALYKIDFVKQGYGNKSAKFICKLLPHLQEGKMYSEAAEAAGVRHSDSMTAQERDERSLLETIPLLQKNALRQPVVEKILNQMINLVNALKREYGEIDEVRVELARELKMSREEREETTKSNNAREKENKAIAERIKEYGLTPTKSRIQKYRLWQESAESCIYCGKRVGVVQFLRGEEIEVEHIIPRSILFDDSMSNKVCACRSCNQEKGNRFAMEYIQSKGWEQSYIERVDSLFHAKNISYSKRQRLLMLPKDLPEDFIERHLRLSQYISREAQGILRKGIRLVSASEGSVTAKLRQLWGYDNILRDLNLERYRSMGETEVVTVEHRDGERTDERIKDWSKRKDHRHHAIDALVVACTRQSYIQRLNRVNAEADREEMDAFIREQQQKPTHSRGEKLSLLEHWLIRQPHFTTGEVKGEVDKILVSLRPGKRTISRGRNVYKRSGKTDVQRGVLIPRGALSEETIYGVIRVDGEDKVVCKYPLQSLKLKDVEYIVDEVLREKVRERIEQRGEKEAFAEPLYFDEAQTQEVRSVRCFTGKDQAKLIPLRYNDESEAVGFVAPGSNHHLALYRDVDGRLVESVVTFWQAISRIRYGLPAIVTHPREVMEQAFSIPDLPEEVLGALPKSRWRLMEVLRINDMFLIGMKDREIQAAIEGEDYSALSRYLYRVQKLTTHDYVFRYHLETTLDGKDNVGDIPSSYRIASQKRYQELNPRKVKIDLLGRISLA

SEQ ID NO: 8327 - protein, 933 aa, unidentified
  REGION 1..933: note = Description of Unknown: Cas Enzyme sequence
MEALRERIMTGPGEILDDDITPGQAMAQVALTHRITMRGPEGILGKLHQSDNANEIRKICDRQGISSDVCKQLLRAVFKAESPRGSAVSRVARDPLPGQNSFRRAPKCDPEFQRFRIISIVANLRISEATGEDRPLTVDERRRVVTFLLEDPRDDLTWVDVAEKLEVPRQALRGTARLTADGERSAAQPPLNVTDQIMRKTKINALKTWWAEADAERQGAMVRYLYEGLEDSECAEIIAELPEEDQAKLDSLHLPAGRAAYSRESLTALSDHMLATTDDLHEARKQLFGVDDSWTPPTDPVGAPVGNPSVDRTLKAVARYLAAVENVWGKPEVIQVEHVRDGFASERAARERDRANNRRYEVNQRAIKEIQQSYGMEGHVRPGDVMRHHAITLQDSACLYCGGTIGYHTSQLDHIVPQAGTGSNNHRENLVAVCERCNRSKSNTPFAVWAQTCGIPGVGVKEAIGRVRGWRNRPGGMSSGDLKRLKKEVIARLQRTQEDPEIDARSMESVAWMANELRHRIAAAYPDADVMVYRGAITAAARKAAGIDSRINLIGEKGRKDRIDRRHHAVDASVVALMEASVAKTLAERSSLRGEQRLTGKEQTWKQYTGSTVGAREHFEMWRGRMLHLTELFNERLAEDKVYVTQNIRLRLSDGNAHTVNPSKLVSHRLGDGLTVQQIDRACTPALWCALTREKDFDEKNGLPAREDRAIRVHGHEIKSSDYIQVFSKRKKTDSDRDETPFGAIAVRGGFVEIGPSIHHARIYRVEGKKPVYAMLRVFTHDLLSQRHGDLFSAVIPPQSISMRCAEPKLRKAITTGNATYLGWVVVGDELEINVDSFTKYAIGRFLEDFPNTTRWRICGYDTNSKLTLKPIVLAAEGLENPSSAVNEIVELKGWRVAINVLTKVHPTVVRRDALGRPRYSSRSNLPTSWTIE

SEQ ID NO: 8328 - protein, 921 aa, unidentified
  REGION 1..921: note = Description of Unknown: Cas Enzyme sequence
VMRVQQDDGKGGRQLVERRVKFGPKVSPKSSPLFQLCRIYEAVNNIRLTRPDGSPRDITPEERAKIVAHLQSNASLSFAALKKLLKEKALIADQLTSKSGLKGNSTRVALASALQPYPQYHHLLDMELETRMMTVQLTDEETGEVTEREVAVVTDSYVRQPLYRLWHILYSIEEREAMRRALITQLGMKEEDLDGGLLDQLYRLDFVKPGYGNKSAKFICKLLPQLQQGLGYSEACAAVGYRHSNSPTSEEITERTLLDKIPLLQRNELRQPLVEKILNQMINLVNALKAEYGVDEVRVELARELKMSREERERMAEGNRRREKENKAIAEKIQKCGLYPTKSRIRKYMLWEEAGHQCLYCGQSIEEEQCLREGGMEVEHIIPKSVLYDDSYGNKTCACRRCNKEKGNRTALEYIRAKGWEAEYMERINGLLDKKAISYSKHQRLRWLKEDIPSDYLERQLRLTQYISRQAMAILQQGIRRVSASEGGVTARLRSLWGYDDILHTLNLDRYDSMGETERVSREGETTEKLRIKDWSKRKDHRHHAIDALVVASTRQGYIQRLNRVSSESEREAMSGEIEMQKVTKTDKLSLLERWLTQRPHLSVRAVSDKVAEILISYRPGKRVVTRGRNIYLCHGKKCVQSGLLVPRGPLSKETVYGQITVNGEPQIVCKYDLHSLKAKDVDYVVDLALRKRLKELLAQRGGKEKEAFAGDVYMDEAGTQGPIRSVRCFTGLDRDKMKAVKYDEQGEAVGFVSPRNNHHLAIYRTPKGKLVESIVTFWDAVDRARYGIPLVITHPREVMEQVLQRGDIPESVLSLLPPSDWVFVDSLQQDEMVIIGLSDEELQRAFEAQDYRKLSEHLYRVQKMSSSYYVFRYHLETSVADDKNTAGRIPKFHRVQSLKAYEEKNIRRVRVDLLGRISLL

SEQ ID NO: 8329 - protein, 1391 aa, unidentified
  REGION 1..1391: note = Description of Unknown: Cas Enzyme sequence
MVHKTWYLGLDIGSASVGWAAADTEYKIIRKNKKRLWGVRLFEEATTAEDRRGYRSSRRRLARRKWRLNLLEELFASEVKKMDENFFLRLKESQYHYEDKTHKVPYAIFNDKEYTDKDYYKDYPTIYHLRSKLMTEKTPDIRKVFLAIHHIIKNRGHFLLQGQSFKDGNLNNLIKELLELDILNVGFEVTEEVVGKIADISLEKKTLTDKVNDLKKLYPKEKQLLEVFRLIFGGKTSLNKLFAIDEYKELDASIKSVSLKEKIYEEVRHDYEQVLSNYIELLDLAKLVYDSIILSDIKKEGKTLSESKVELFEKHRDDLLKLKNLVKNDSKLSDDKKVELYASIFKEDKDKGTNYVNYIRKSEEGKGCNYEDFKKFLVKELEKLEESSVKAEIIKDLELEQFLPLQRTKDNSVVPYQIYKEELVKILDNAAKYHNFLDEKDESGYSIREKVIQLLEFRIPYYVGPLNSSKKAKEGGFAWSVRNKGYEDTPVTPWNYSKVIDENASAEKFITNLTNKCTYLKGEDVLPKSSLLYSEFALLNELNALKYDGNRISLEARNTIIEKLFKQQGKKVTKTSIKNLLKAEGYIDGKGEITGIDITVKNDLKSYRDFKKILENKFNSEHVENIILWITLYGESRKLIKAKIESVYGDVYSKDEITKMSRLVYKDWGRFSRKLLTEVVSKKVYNEETGECLNIIGAMRQNNILFMELLADRFDYSQQIVEFNKDLKEDVTEITPEILDNLYVSPAVRRSIWQTIRIVEELKKIIGCAPAKIFVETTRSNQGKKEPTDSRKKQLELAYKAVKKDVKELEKEIEELKFDTLNNRLSSEEPSKLKAKKLYLYYTQLGRCMYSGKPITFKDLNTKKYDIDHIYPQSKVKDDGFTNTVLVERELNAKKGDRYPLGSDFQTPNNRRFWKFLKEKGLITDEKYNRLVRTEEFSDEELSGFIARQLVETSQSVKAVASILGELNPETSICYSKAENVSRFRKDFGKIKDGNSKSNNNEQLVKVREINNFHHAKDSYLNVVVGNVYDTKFTRNVFNFIKDKKDGRKYSLNKVFYENVSDSKTVAWEMDKTIYQVEKVMNNNNILVTRRTSEQKGGLFDATVYKAKVAAKAKDGVYYPLKTSNSVVKDVAKYGGFTKIKIAYYSIFEYVLVNKKGEEKITRIIPIPIFISQNIKDDNTLVKFGRSQINLKSGEEIKDFRLKYRKLCIGDKICLEGYPYFVGGKTSDYFVYDSAVQVLIDKENEKYIKELVKFTNWKKDNKDGELSKNITRKKNTDLYYALLQKMKTPELINKKPNKYQEFEKEKTIHKFNNLNEEEQSKVLLEMLNLLTDMKTVYDLKLINITATRGKQNFDLTSLKEFTIVEQSVTGFYEKEITIIGDKGNDMKNNNS

SEQ ID NO: 8330 - protein, 929 aa, unidentified
  REGION 1..929: note = Description of Unknown: Cas Enzyme sequence
FQLCRLYEAVNNIRLTYPDNSPRPLTNEERAKLVAYLQGCETLQEKKPTKRPSKKPKKETCPEVNLDSLKQVLQIEEELRADKLLESGITGDTTRIALATILQPYEQYHHLLTMELETRPMKVQTTDEATGEITEHEVAVLTDSYTRQPLYRLWHILYSIEERDAMRKALITQLGMSEEDLDGGLLDQLYRLDFVKPGYGNKSAKFMCKLLPQLHQGLGYSEACAAVGYRHSGSLTREEIAERPLLPQIPLLQRNELRQPMVEKILNQMINLVNTLQAEYGIDEVRIELARELKMSREERERISRSNGTRKTKNDAVAKYIQEYGLYPTKTLIRKYLLWEEADRRCMYCGKEISLSQCLNGDEMEVEHIIPKSILYDDSFGNKTCACRQCNKEKGNMTALEYIRTKGWEKEHRDRLDKLREEAKKQEKATQKKKKKEVQKQTISYSKYQRLLWLKKDIPTDFLERQLRLTQYISRQAMSILQQGIRRVAASEGGVTARLRSLWGYDDILHSLNLDRYESMGETELVPKHPNSEEDESMKCRITDWSKRKDHRHHAIDALVVACTRQGYIQRLNRLSSEADREEMRHETELRKEPTADKLSLLERWLSQRPHFSVQDVSDKVAEILISYPKPKRTHTWGRNRYKKKTADGKEKTCIQTRVLVPRGELMEASLYGKIISDGEERIVKRYPLHDLKGTVVDPRLRELITQRKQGSTTEAKGAPLYLDAEKKQEVRSVRCYVTQPAVDKAIPLCFNEQGKAVTFAKSGSNHHVAIYRTPKGELTESLVSFWDAVDRARYGLPLIIKHPKEVAEQVLQRDDIPEKVLRLLPPADYEFVESFQQNEMVIVGLSDEELQRAVDQQDYRTLSEHLYRVQKMASLYYVFRYHLETSVSDNKNTTGRIPKFHRVSSFKAYEEKKIHKVRIDLLGRITLL

SEQ ID NO: 8331 - protein, 1071 aa, unidentified
  REGION 1..1071: note = Description of Unknown: Cas Enzyme sequence
NFFLRLKESQYHYEDKTHKVPYAIFNDKDYTDKDYYKEYPTIYHLRAKLMSEENPDIRKVFLAIHHILKNRGHFLLQGQSFKDGNLNNLIKELLKLDILHIGFDVTEEIVSKIATISLEKKTLTDKVNDLKKLYPKEKQLLEVFRLIFGGKTSLDKLFAIDEYKELDASVKSVSFKEKIYEEVRHDYEQVLSNYIELLDLAKLVYDSIILSDIKKEGKTLSESKVELYNKHRDDLTKLKKLVKNDTKLSEDKKVEIYAEIFKEDKDKGTNYVNYIRKSEEGKGCNYEDFKKFLVKELARLEESAAKDEILRDLELEIFLPLQRTKDNSVVPYQIHKEELVKILDNAVKYHSFIDEKDESGYSVKEKVIQLLEFRIPYYVGPLNSSKKAKEDGFAWSVRNKGYENKPVTPWNYEKVIDESASAEKFITNLTNKCTYLKGEDVLPKSSLLYSEFSLLNELNALKYDGNRISLEARNVIIEKLFKQQGKKVTKTSIKNLLKAEGYIDGKGEITGIDITVKNDLKSYRDFKKILKDKFNTEHVENIILWITLYGESRKLIKAKIEAVYGDIYSKEEIAKMSRLVYKDWGRFSRKLLTELVSKKLYNEETGECLNIIGAMRQNNILFMELLADRFDYSQQIIDYNKELQKEVTEITPEILDDLYVSPSVKRSIWQTVRIVEELKKIIGCAPTKIFVETTRSNQEKKKPTDSRKKQLELFYKAVKKDVKELEKEVGSLNFDKLNERLSSVEPSKLKAKKLYLYYTQLGRCMYSGETIDITQLNTTAYDIDHIYPQSKVKDDGFTNTVLVKREYNAAKTDRYPLGSDIQTPSNRKFWKFLKEKGLITDEKYNRLVRTEEFSDEELTGFIARQLVETSQSVKAVASILGELNPETSICYSKAENVSSFRQNFGKIKDGNRKSDNTEQLIKVREINDYHHAKDAYLNVVVGNVYDTKFTRNVFNFIKDKKDGRKYSLNNVFYENVSNSNTVAWEMNKTVYQVEKVMNNNNILVTRRTSEQKGGLFNATIYKAKVASKAKEGVYYPLKTSNPIVKDVTKYGGYTSIGIAYYSIFEYILVSK

SEQ ID NO: 8332 - protein, 1102 aa, unidentified
  REGION 1..1102: note = Description of Unknown: Cas Enzyme sequence
MTKIKDDLRYRVGIDVGLKSIGFCAVEVDENDQPLRLLNSMVFVHDAGVDPNENKAAKSRKLTAGVARRTQRRTAQNKHRLAELDRVLTEKLHWPLPNLEDFEDPYEPWRTRAELVEHYIKDDAERAEALAIAIRHIARHRGWRNPYLSVDSLLTPQEPSEFLRGLNERVTQALGREFPADATPGQLICAYIDSPKYAETQGIRGDAGILSGKLHQFDNVGEIRKICEVQRLDHDVFKLLVRHVFAAKSPRGGSSGLVGNDQLPGQGGRRAEKAHPEFQLFRIVSVLTNLRVREAGVERCLTPEELSGLADFLLDAGLKQQVTWADLADNLGIERSDLRGTARPSVDGEPALRFPPTDVTTEKIMASKVKWLKDWWDKADSERRGFMVDALSNSGGSTGDNDIDDEVAELLEAATEDEQAELEKIQLPQGRAAYSLDSLRRLTKRMLEDGVDLHTARKEEFNVDDDWRPEPEPIEAPVGNPAVDRVLKQVSRWLRMATDRWGEPAVINIEHTRDGLGSEKVARELLREGQRRQDLNQKNLVEIAQQLGIPVKDKRSALIKYAAIQRQNSMCLYCGAEIGFTTAEMDHIVPRALSGSTNDRANLAAVCRTCNHQKGAVPFAVWATSGEAHAGVSLEDAIKRVRLWQRGPGMSPKQHKAFQREVIARLNSRKPDEEFDGRSMESVAWMAVELRTRIEGYYRKLNSDSVPKIGIYRGQLTAEARKASGFENRVNLIGGKGKTRFDRRHHAMDALVIAMMNQSVSQTLALRVNMRESQRITGQEETWKIFYGKPGQASERFEKWREGMLRAVELFNIELAKNAIPFHENVRLRVGSSKVHDDTVRKFIHAKLGEALSVAMIDRAETPALWTALTRLPDFDPKDGLPEDPSREIYIHGKKITADEQLNFFNSPSACLKVRGGYVEIGSSIHHARVYRIDGKKTAYAMVRVFATDLVKMTHEDVFTTPLKPSTISMRTAEPRIREALADGTATQIGWLVEGDELQIETEKYSSGQIGELFNEYPQLTNWRAAGFMSTIQPRLKPLHLSKEGFNEDSSEAVRKMVDRPGWLPAINMLLTSGEVRVIRRNCLGEQRTKSDSSLPTSQLLR

SEQ ID NO: 8333 - protein, 1195 aa, unidentified
  REGION 1..1195: note = Description of Unknown: Cas Enzyme sequence
MLMSKHVLGLDLGVGSIGWCLIALDAQGDPAEILGMGSRVVPLNNATDAADFSIGKAFTANQERTARRTMRRGFARYQLRRYRLRRELEKVGMLPDAALIQLPLLELWELRERAATAGERLTLPELGRVLCHINQKRGYRHVKSDAAAIVGDEGEKKKDSNSAYLAGIRANDEKLQDEHKTVGQYFAEQLRQNQSESPTGGISYRIKDQIFSRQRYIDEYDQIMAAQRVHYPDILTDAFIRMLRDEVIFMQRPLKSCKHLVSLCEFEKQEKVMRVQQDDGKGGRQLVERKVKFGPKVAPKSSPLFQLCRIYEAVNNIRLTRPDGSPRDITREERAKIVAHLQSSASLSFAALKKLLKEKALIADQLTTKSGLKGNSTRVALAAALQPYSQYHHLLDMELETRMMTVQLTDEETGEVTEREVAVVTDSYVRQPLYRLWHILYSIEERDAMRRALITQLGMKEEDLDGGLLDQLYRLDFVKPGYGNKSAKFICKLLPQLQQGLGYSEACAAVGYRHSNSPTSEEITERTLLEKIPLLQRNELRQPLVEKILNQMINLVNALKAEYGVDEVRVELARELKMSREERERMTRQNGERKKANDKVAEKIQKCGLFPTKSRIRKYRLWEEAGRQCLYCGRSIEEEQCLNGDDMEVEHIIPKSVLYDDSYGNKTCACHECNQTKGNRTALEYIRAKGREAEYMKRINDLLKEKKISYSKHQRLRWLKEDIPSDFLERQLRLTQYISRQAMAILQQGIRRVSASEGGVTARLRSLWGYGKILHTLNLDRYDSMGETERVSREGETTEKLHITNWSKRMDHRHHAIDALVVACTRQSYIQRLNRLSSEFGREDKKKEDQEAQEQQATETGRLSSLERWLTQRPHFSVRTVSDKVAEILISYRLGQRVVTRGRNIYRKKMADGREVTCVQRGVLVPRGELMEASLYGKILSQGRERIVKRYPLHDLKGEVVDPRLRELIAEYNQEITSKVKAKGAPLYLDAAEKQEVRSVRCYVDKPSVAKAIPIRFDECGRAITFVKSGNNHHLALYRTPQGKLEESIVSFWDAVDRARYGIPLVITRPREVMEQVLQRGDVPESVLSLLPPSDWVFVDSLQPDEMVIIGLSDEELQRALEVQDYRKLSEHLYRVQKVSSLYYVFRYHLETSVADDKNTSGRIPKFHRVRSLADYEKRNIRKVRVDLLGRISLL

SEQ ID NO: 8334 - protein, 905 aa, unidentified
  REGION 1..905: note = Description of Unknown: Cas Enzyme sequence
MKKQQFSDYYLGFDIGTNSVGWCVTDLNYNVLRFNKKDMWGSRLFSEAKTAAERRVQRNSRRRLKRRKWRLNLLEEIFSDEILKIDSNFFRRLKESTLWFEDKSSKEKFTLFNDDNYKDYDFYRQYPTIFHLRNELIKNPEKKDIRLVYLALHSIFKSRGHFLFEGQNLEEVENFEILYNNLIAFLEDNDIYKNIDSSYIGNLENIICDSKKGLKDKEKEFKEIFNSDKQLVAFFKLSVGSSVSLNDLFDTDKYKKGEVEKEKISFREQIYEDDKPIYYSILGEKIEFLDIAKNFYDFMILKNILADSQYISEAKVKLYEEHKRDLKNLKREELVELAADIRKALLNRLTNYPKGGHVGPNFGVVEMTIALHYVFNSPIDKIVFDVSHQAYPHKILTGRKDGFLYEDKFKTVNGYTDQDESEHDFFRVGHTSTSVSLATGLAKARDLRGAKENIIALIGDGSLSGGLAYEGLSNAAEQGGNLIIIANDNDQSIAENHGGLYKNLRELRESNGEAPNNFFKSLGLDYKYVADGHDINKLIEVFEEVKDIDHPIVLHIHTIKGKGLPYAEKDREPWHYNANFDPRTGEPKTKPEPKEEFGTITFDFLTDKMEKDPTVIFINAGVPMGFGFTKDRREKLDKLRKQYVDVGIAEEHATTFSSGMATNGAKPVFGVISTFVQRTYDQISHDIAINKAPTVTLVFGGTLKGMNDVTHLGYFDIPMISNIPNIVYLAPTTKEEYLAMLDWAIDQNENPVFIKVPGGAVQHSEIDVDKDYSNLNSYKVVEKGKDVAIVGLGEFFALGKEVKELLKEKDGIDATLINPRFISGLDENLLNELKQNHKLVVTLESGQKEGGFGTKISSFYGTSDMKVLNVGAKKEFTDEVPYDVFFEENRLTKEQIVEDILMAIK

SEQ ID NO: 8335 - protein, 1363 aa, unidentified
  REGION 1..1363: note = Description of Unknown: Cas Enzyme sequence
MKKQQFSDYYLGFDIGTNSVGWCVTDLNYNILKFNKKDMWGSRLFDEAKTAMERRIQRNTRRRLKRRKWRLNLLEEFFSEEILKMDSNFFRRLKESQLWLEDKSIKENFTLFNDDNYKDYDFYKQYPTIFHLRNELVKNPKKKDIRLVFLAIHSIFKNRGHFLFEGQNLEEIKNFETLFNNLISFLEDNNINKKIDKNNMERLKEIICSPKKSIKEKEIKEMFGSDKQLVSFFKLCVGYNVSLNNLFETDEYEKEKISFKEQIYEEVKPTYYSLLGEKIEFLDIAKSFYDFMILTNILDNRTYISDAKVKKYEEHKEDLKNLKYFLKKYAKDDYKKIFTKNEEKLKNYTAYIGLNKVNNKKEVLKEKKIKIDELSKLIKDCLSKIDNIDSADKTIYMELLNKAEQNTLLPKLRITDNGTLPYQVHEIELKKILENQAKHYEFLNNKEDGITVKDKILMTFKFKIPYYVGTLNFYHKNKSKNSWVVRKEKGKILAWNFDKKVDIERSAEEFIKRMTNKCTYLNGEDVIPNDSFLYSEYVILNELNKIRINGKFLNVENKQKVIDNLFKKQKRITEKAFKEFLLKNNIIDNIKEIEGILGSFNSNYNSYIKFETIFGNKLDLELYKEISENSILWKCLYGDDKKIFEKKIKSIYGDILTEEEIKNINSLKFNSWGRLSKKLLTKIEFSNLETGEHYSSIMDALRKTNYNLMELMTPKFDIEKSIDNENKETNNFSYKELIENSYVSPSIKRAIFQTIKIYEEIKKITGKIPKKVFIEMARGGDETMKNKKIPARQEQIKKLYDNCKKEVSNFSIDIKGLKETLKSYSNNDLKQKKLYLYFLQLGKCLYSGEKIDLNTLLKNNDIYDIDHIYPRSKIVKDDNFDNLALVLKTENAKKSDKFPLNENIQTKMKKFWYFLKENNFISAEKYKRLTETSQVELKGFLARQLVSVRQSTKEIGKILQQIEPKIKIVYSKAEIATSFREMFDFTKVRELNDSHHAKDAYLNIVAGNVYNTKFTEKPYRYLQDTKENYDVKKIYIYNIKNAWDKEKSLEIVKKNMEKNTINITRFIQEEKGQLFNLTIKKKGKSTNEIVPIRPKCYTGNNEKLNEKYGYFQSLEPAYFLFVEHKEKNKLTRSFERITMVDVNKIKEKSDLIEYLIKIKGLIEPKIIKKIYKKQCILIDGFPYLLTGLTSDKNLELKNNKPLYLEKEYEKILKNSIRFYEDNFGNSEEKYKYIFLKKKDRFEKQETITSVKERYNTQFDKMYDKFLEKLNSKEYKKYMNSQKYQILLEKKKDFLKLNLLDKAYTLRAFLKLFTNETNGDFSKLKLSATLGRLNGKSSNAISKNELYLFEESITGLFAKKIKLN

SEQ ID NO: 8336 - protein, 1135 aa, unidentified
  REGION 1..1135: note = Description of Unknown: Cas Enzyme sequence
MMNGLVLGLDIGISSVGVGIIKKDTGEIIHANSRLFPAATADNNVVRRSSRQARRLTRRKRHRAIRLHDLFEDYALLTDFSKVSINLNPYKLRVEGMNIQLTTEELFIALKNIIKRRGISYLDDASEDGGTVSSDYSKAVEENRKLLSEQTPGQIQLERFEKYGQVRGDFTVVENGEKRRLINVFSTSAYRKEAERILRKQQEFNNKITDDFIEDYLSILTGKRKYYHGPGNEKSRTDYGRFRTDGTTLDNIFGILIGKCTFYPDEYRTSKASYTSQEFNLLNDLNNLTVPTETKKLSEEQKKTIVEYAKTAKTLGASTLLKYIAKMVDASVDQIHGYRIDPNKKPEMHTFDVYRKMQSLETFNVNEMPREVLDELAHILTLNTEREGIEEAISAKLKDTFSQDQVLELVQFRKNNSSLFSKGWHNFSLKLMLELMPELYATSEEQMTILTRLGKQKSKETSKRTKYIDEKEITEEIYNPVVAKSVRQAIKIINEATKQYGFFDNIVIEMARENNEEEAKKDYIKRQKANLDEKNAAMEKAAFQYNGKKELPDSIFHGHKELATKIRLWHQQGEKCLYTGKNIPISDLIQNQYKYEIDHILPLSLSFDDSLSNKVLVLATANQEKGQRTPFQALDSMDDAWSYHEFKSYVKDSKLLGNKKKEYLLTEEDISKIEVKQKFIERNLVDTRYSSRVVLNALQDFYKEHQFDTTISVVRGQFTSQLRRKWGLEKSRETYHHHAVDALIIAASSQLRLWKKQNNPLISYKEGQFVDSETGEILSLSDDEYKELVFKAPYDHFVDTLRSKIFEDSILFSYQVDSKLNRKISDATIYATRKAKLDKEKKEYTYTLGKIKDIYDLGTKTPSKTGFYKFLDLYNKDKSQFLMFQKDRKTWDEVIEKIMEQYRPFKEYDKTGKLVDFNPFEKYRQENGPIRKYSKKGNGPEIKSLKYYDILLGKHKNITPEGSRNTVALLSLNPWRADVYYNPETRKYEFLGLKYADLPFEEGGVYGISTETYNELREKEGIGKNSEFKFTLYKNDLILIKDTETNCQQFFRFWSRTGKDNPKSFEKHKIELKPYEKARFEKGEELEVLGKVPPSSNQLQKNMQIENLSIYKVKTDVLGNKHFIKKEGDEPKLKF

SEQ ID NO: 8337 - protein, 928 aa, unidentified
  REGION 1..928: note = Description of Unknown: Cas Enzyme sequence
MEKQEYYLGLDMGTSSVGWAVTNTKYELLRKKGKDMWGIREFEEASSAAERRTHRINRRRRQRQVVRLGLLKSYFSEEIDKIDPDFFIRLENSKYFLEDKDDRVRTKNGVFNDDDYKDVDYYRQYPTIFHLRQALLDIGKTGEKFDVRLVYLALANMFKHRGHFLLNAEGDALSTEQVDIVYQEILDRLENDYEIIIEHKPIQQVIDIIGNTDNGRKKKHEELQELFGIVKKEKSSNELLKCLCGLSVNAKLIFDTNTEEKATLCFNDFSYTDKIPELMEQLTEEEYALIEQLKSIYDYAVLAGTLKGYDYLSCARVELYENHKKDLKLLKALYRKYKTEEEYNRMFRSNADGTYSAYVNSLNSEDAIFKSDEVFEGSKYRRNMKGRKLEDIYSTIKKAFKDITDDKDVSFVLEQIEKEQFLPKQLTGANGVIPNQVHKKEMERILKNAENSLPFLKEKDESELSVSERIIQLFTFQIPYYVGPIGENSKTGWVVRKEGGKVLPWNINDKIDMSATSEAFIGNLIRTCTYIQDEKVLPKASLAYERYCVLNEINNLCIDGERIDTKLKQQIYKDCFMKGKRVTKKQLCSYLVAQNAIQSEEQVTGIDKTINNSLSSYGKMYAIFGERIKEDAILAAAEDIIYWGTIFGDSKKMLKQRLKKYVEEEIIDENQLKRILGYKFKDWGRFSKALLTLNGCDKSTGEIITLRQAMWEYSLNFMELINSEEFTFKEELEKHTTAAMKSLSEFTYEDLEDSYFSVPVKRMIWQTLLVVREIEKVMGYAPKRIFVEMTRTDEEKGDKGRKESRGNQLLELYKSIKNTESHNWKEEIATADKDGKLRSKKLFLYYMQMGRDMYTGEEIDLGRLYDDNLYDIDHIYPRHYVKDDSIMNNLVLVNKRANQDIKKDLYPIPEQIKANPKVRELWDTLHKQ

SEQ ID NO: 8338 - protein, 1141 aa, unidentified
  REGION 1..1141: note = Description of Unknown: Cas Enzyme sequence
MYVRCDTMCPMTTSSENVPGIRYRVGIDVGLNSIGFCAVRVDLHDRPLELLNSMVFVHDSGVDPNQKDKHDTRKYVGGDARRTRRLYKVRRQRLFNLDKLLSRELGWPLPEMASFDDPHEPWHVRARLLDGYIPEEGKRKEWLSIAMRHMARHRGWRNPYAKVETLLQPAEPSDFLKGLNDRISKSLGKIFPADATPGQLVDAYLAHPDYVNRAGTPKVRGPEGILAGKLHQSDNAGEIRRICEMQRIDPSVCDRLIRAVFEAKFPKGARRLVGHDELPGQSRHVRAEKAHPAFQKFRIVSVLANLRIREGRTERPLTPEELQRLTDFLLIAGLKQEVTWQDLADKLGIERSDLRGTAKASFDGAPVLRNPPTDVTAEKILACKVKWLREWWKDADAEQRGYLVDALSHSGGSEDEADTNDEIAELLEQATAEERVACEEVSLPQGRAAYSLDSLRRLTDRMLRDGVDLHTARRLEFNVGDDWKPAVEPIGAPTGNPAVDRVLKQVSRWLHAATERWGEPTVINIEHTREGLGSEKVARELIQANKRQRKSNIKAAEEIAARLKLSGRVRRSDRIRYFALQRQNCQCLYCGTDITFMTAEMDHIVPRADGSSTNDRSNLAAVCRTCNHMKGANPFAVWASSDRANAGVSLKGALERVKFWVRDNGMSSKQFKQLQREVSARLKSRKPDEEFDGRSMESVAWMAVELRTRIEGFYRTRDEESVPSVGVYRGQLTAEARKASGFESRVNLIGGRGKTRFDRRHHAMDALVIALMNPSVSCTLALRVNMRDAQRLAGREETWKNFYGKPGEASRRFESWRQSMLLASELFNSALSANAIPFLENKRLRANSSAMHEATQFSFSHAKPIKKGSKILKEKGEQRMLGAAMSVDLIDRAETPALWTALTRCPDFDPKNGLPANPERTITVNGTHVGPTELLNFFGSTSACLKVRGGYVKLANSIHHARIYRIGGKKTTYAMVRVFQVDLLHLKDRKLLKDGNLFEAPLKPSSISIRTADKKIRRALAEGTAKQIGWLVEGDELQIDTSKYTGGLIEDVLTQYPEAVSWRVAGFADKSKLRLRPYLLSAEGLDEDAPQGMKELLEGRGWRPAVNVLFSPRSVVVVRRNCLGEQRKRLDSGLPITEVLR

SEQ ID NO: 8339 - protein, 1385 aa, unidentified
  REGION 1..1385: note = Description of Unknown: Cas Enzyme sequence
MKNFSDYFLGFDIGTNSVGWAVSDMQYKILKFNGKSMWGVHLFEDAKTAVERRMFRASRRRRQRVSQRKYLLREIFREEIEKIDKNFFERLDDSKFYQEDKKQNQKNTLFNDIDFKDADYNKKYPTINHLRSELVHKSEPHDIRLVFLAINNIIKNRGHFLFENQEFSQAPNFENILSEFLNILKDYDIDFGILNSSFKEIENILTSKENKTSKLKNLEKIMINETDKEAKKQQKAIIKLIIGSKVQLSDIFLDDSMKDLEISSISFAEITDDKLLLLRDILEDKMYIIEKAKSIYDYTILSDIIGNEQYISDAKIKIYDQHKEDLGTLKEEIIKKYNLDANEILKSDKIKDNYCYYIGKNAKGSSENIDKKCIQEDFCKFLKKKLENIEFKGEKERKLYEKICEYKAFPKQISKENSVIPYQLHLNELRQILKNAKNYLTFLSDKDEDGITNEEKILSIFKFKIPYYVGPLNSHSDFSWIQKNQHVKNQHVKIYPWNFEKVLDLEESAEKFIIRMTNTCSYMNDEDVLAKNSILYSKFNILNQLNNIKIDGEKINIDLKKSIFNDLFLNIDKVKKITKKSLSLYISSKTGLEKDKFEITGIDDSIEGDIRAIVDFRKILKHDLDEEIIDDIVSKIVILGDSKDLLKSYLKKHYSLFDNEQISDISKLSYNGWGRLSRKLLTYITHTDKNTGEVKNIINAMYDTNNNLSQLLSNEYDYAENIKIENEKNRTKNTLNDMMENMYISPAVKRSITRVVAITKEIVKITKKQPKKIFIEVAREVDKKEKKKRTVSRKDSIKELYKNCKLEQSYLIDELEKLKIKLENEDDGKLRDNRLYLYYTQLGHCMYSGEKIDISEIFTKYDIDHIYPQSKVKDDSIDNRVLVKRELNARKTDIYPIPSDIITQKARELWKILKQKGIISPEKYNRLSRSEDDKFSDSELSGFIARQIVETRQSTKAVAHILEEFYKESEVVYVKAENVSDFRYSDKGVERLKYKKKEEYDIEKYNEITDKYRIVKSRLVNDYHHAKDAYLNIVVGNVYHEKFTKSPKNFIKTGQKYSMNKIFDYPVIKNNYIVWDTENDHSLKDVISQVEKNNILYTRYSTISNGGFFDQNILKKGKGQYPIKTSDDRLKNIDKYGAYNSIKGAYFILVEYTEISKKKEERVRIIEYVPIYLAKEIEKNPCILDNYLINTLGYKDPQILLRKIKMGSLFDVDGFKMNLSARTNYQLTFKNAQQLVLSTELYQYAVKIEKYIEKNRQEGNILPISEKYQKISKEKNIILYDELLNKLKNTVYSKKLSSQIDIFEKGKEKFVNLDIVKQCEFLYNALKLFGNSPSGKDLSLIGGSKNSGILLISSKLKNSNKIEIINQSVTGLFERRVNLKICGVQ

SEQ ID NO: 8340 - protein, 956 aa, unidentified
  REGION 1..956: note = Description of Unknown: Cas Enzyme sequence
MDKELNKKEPYSIGLDIGTSSIGWAVIGDDCKLRRYKHQNMWGAHLFKEADKAATRRSFRSSRRRLARRKRRITLLQQIFDDEIQKIDPQFYLRLSESMLHLGDKNSALELDANILFADHSFTDKSYREKYPTIYHLRSDLFHNTDRQDIRLVYLALHHIIKYRGNFLVEGGVDSVISSFDNQNLQKFMDFIGADERAAEEIKNILLDRSKSRSARKSDIDKQTQLTPSTKEAIKAVVGLKWDAGKLFEDSSLDAKGEFSSKDYEEQRDAIATAIGDENYELVATLESVYQWTVFSQFIRKDSCLSDIMIERYNNYRQDLSDLKALFHKFLSKDDYKSFFHGDTAEFELYNSHKSKNSIDDLYKSIKKRLGNIAKDDLRYQRFEKRAELGEFLARQRIRDNGAIPHQIHQYELEKIIDNQAQYYPFLAQNRDKIISIFTFKLPYYIGPLKTGGNFAWSVKKKDGVIYPWNYDEMIDDEASAEKFIDRMRNHCTYLPDEEVLPKNSLLYQEYEVRNELKNITVNGERLGIGVQNDIVDKLFTVESSVTRKKLVDYLYKNQIYDTDSLAIEGFSNEKGFNSSRKSYIDFTQKIGIKITPGNQQAIEEVIKWITLFEDKKILAKKIRREYGNIFNEEQISKILRLNYGGWGRLSRKLLDGITACVQGNELTVIETMRRYKHNFMQIVQSDQYEFKKVIDKILSANQCAEITYDDIKNLAGSPGIKRALWRSVRIIDEIVDTIGYEPKLISIEMARNEGEKVSTNSRKSQLEKMYKELIGDNADYNKSVIKPQLAKYKEKLNKKKYYLYFLQNGKCAYTGKPLDIENDLRECEIDHIIPRSLTKDDSLDNTVLVIRNENQRKEDDYPISDDIKKRMTTIWRSLKNAKLMSPTKFQRLTSQKKLSEDRIAGFVKRQLVETRQITKHLARMLHEKYVDSSTDIFTIRAGMGSEYRDCHDLPK

SEQ ID NO: 8341 - protein, 940 aa, unidentified
  REGION 1..940: note = Description of Unknown: Cas Enzyme sequence
NKANITHSWLDDKERSYRLWHLLYSVESKEEAEGALRKLNDNDDFVNAFLKVKPFKKEYGAYSEKAIKKLLAVMRIGDSWNEGNICEQTRNRTHKIINGEIDEKIKERMSRTFTQLSDFQGLPEWLACYVVYGRHSEASDIKRWRTPESLMAYINGFKQHSLRNPIVEQCILETLRTVHDIWKEAGHIDEIHVELGRNMKSTSEQRARTSKKILQNENTNLRIKSLLMELKNAKEVENVRPYSPMQQEILRIYEEGALQELTTDDAQYPEIYKISQMAQPSANELLKYRLWLEQKYCSPYTGRPISLSKLFTSAYQIEHIIPQSRYFDDSFTNKVICEAEVNLLKSNMLGYEFIKKHSGEIVHCTKIGDVKILDEKEYYNFVTEHYVNNKYKKGRLLLEDIPQEFINRQMNDSRYISKIVMTILSNIVRGEDEQEVKSKFVVPCTGGITDRLKQDWGLHDVWNRLVYPRFERLNKLTQSEAFGRWENKEGKQVFQTSVPLELQRGFSKKRIDHRHHAMDALVIACASRNIINYLNNESAENQEKREDLRKKLCDKNRVIRKPWGSFTQDAQAALEDIVVSFKNYVRVINKATNYYEKYGRNGKKGTTEQKGRDMWAIRKPLHKETVFGHVNLRRKVTVKLKDAINNIPAICDKALRDYINDLIAKKYNSKQILAHFKDKNYRLNMKSVDKVEVWQFSDEKEEMVATRKPLDTSFDVKRIATITDIGIQKILLNYLSTKNNDPNIAFTPESIAEMNKHIVEYNNGKQHQPILKVRVSEPMGAKYKVGETGNKTKKFVEAQKGTNLYFAIYEDKEGNCTYNTFPLHKVAKRLKQGLSPVPDKNKQEDPLRFYLSPNDLVYVPTEEEKLSNDCKLNKKRIYKMVSSTGNECYFLPYTISNVIYNKVEFESLNKMGRALTGEMIKAICWKIEVDRLGNILKIIK

SEQ ID NO: 8342 - protein, 920 aa, unidentified
  REGION 1..920: note = Description of Unknown: Cas Enzyme sequence
MRIQQDDGKGGRQLVERRVKFGPKVAPKSSPLFQLCRIYEAVNNIRLIRPDGSPRDITPEERAKIVAHLQSSASLSFAALKKLLKEKALIADQLTSKSGLKGNSTRVALTAALQPYPQYHHLLDMELETRMMTVQLTDEETGEVTEREVAVVTDSYVRQPLYRLWHILYSIEERDAMRRALITQLGMKEEDLDGGLLDQLYRLDFVKPGYGNKSAKFICKLLPQLQQGLGYSEACAAVGYRHSNSPTSEEITERTLLVKIPLLQRNELRQPLVEKILNQMINLVNALKVEYGVDEVRVELARELKMSREERERMAEGNRRREKENKAIAEKIRECGLFPTKSRIRKYMLWEEAGEQCLYCGQILTLSQCLNGDDMEVEHIIPKSVLYDDSYGNKTCACRRCNKEKGNRTALEYIRAKGWEAEYVERINGLLDKKAISYSKHQRLRWLKEDIPSDFLERQLRLTQYISRQAMAILQQGIRRVSASEGGVTARLRSLWGYDDILHTLNLDRYDSMGETERVSREGETTEKLRIKDWSKRKDHRHHAIDALVVASTRQGYIQRLNRVSSESEREAMSGEIEMQKVTKIDKLSLLERWLTQRPHLSVRAVSDKVAEILISYRPGKRVVTRGRNIYLRHGKKCVQSGLLVPRGPLSKETVYGQITVNGEPQIVCKYDLHSLKAKDVDYVVDLALRKRLKELLAQHGGKEKEAFAGDVYMDEAGTQGPIRSVRCFTGLDRGKMKAVKYDEQGDAVGFVSPRNNHHLAIYRTPKGKLEESIVTFWDAVDRARYGIPLVITYPREVMEQVLQRGDIPEAIQNLLPSSDWVFVDSLQQDEMVIIGLSDEELQRALEAQDYRKLSEHLYRVQAISSRDYYFRYHLETSVSDMRNSSGYIPKFYRIRSLKDYEKRNLRKVRVDLLGRISLL

SEQ ID NO: 8343 - protein, 1480 aa, unidentified
  REGION 1..1480: note = Description of Unknown: Cas Enzyme sequence
MKTILGLDLGTNSIGWAKVCVDDNGNYTREIKLGSRIIPMSQDTLSNFDKGVTESPTAARTGFRGIRRIRERALQRRERLHRVLHVMGFLPPHYENAIGWNREEATTYGKFLDNAEPKLAWEKQEDGSMRFLFMDSFYEMIADFAKYQPGIVADGRKIPLDWTLYYLRKKALTQAIRKEELAWILLNFNQKRGYYQLRGEEDEENPTKREEYYELKVVGVEAAEEGKGGNTWYNVTLENGWIYRRQSKIELNDWTGKIRQFIVTTEYEKDGITIKKDKNGEVKRSLRAPNENDWGLRKKRTESLLEESGKTVGTFIYDHILSEPADKIRGNFVRTIERKFYKKELEAILREQSKHHKELKKQDTLIACIKELYPNNKPHQDSLMKKDMAYLLITDLIFYQRPLKSKKSLIADCPYEYYEYIIKETGEIKRQAIKCIAKSNPYYQEFRLWQFIINLRLFNRTNDKEVTSEYLSSMEDYTRLFTYLNDRKDINQETLLKDFCKQKKVKMGMEKEFPIRWNYIEDKEKKYPCNETRHELLAALGKAGIDHSWLDDKELFYRLWHLLYSVESKEEAEGALRKLNDNDDFVNAFLKVKPFKKEYGAYSEKAIKKLLAVMRMGNLWNETDICEQTRDRIQNIIKGDIDEKIKDRMGRTFCLLSDFQGLPEWLACYVVYGRHSEATDIQWWTKPENLMAYINGFKQHSLRNPIVEQCILETLRTVHDIWKEAGHIDEIHIELGRSMKSTADQRARMSKNILQNENTNLRIKSLLMELKNAKEFENVHPYSPMQQEILRIYEEGALQELTKEDDQYPEISKISQMAQPSAKELLKYRLWLDQKYCSPYTGKPISLSKLFTSAYQIEHIIPQSRYFDDSFSNKVICEAEVNQLKSNMLGYEFIKKHSGEIVHCTMVGDVKILDTKEYYNFVTEHYANNRRKKENLLLEDIPQEFLNRQMNDSRYISKKVMALLSNIVREEGEQEAKSKFVIACSGGITDRLKHDWGLNDVWNSIVYPRFERLNKLTNTENFGRWENKEGKQVFQTSVPLELQRGFSKKRIDHRHHAMDALVIACASNNIINYLNNDSAKSQEKREDLRKKLCDKNRIIRKPWETFTQDARIALEDVVVSFKNYVRVINKATNYYEKYDKNGKKEIAEQKGQDMWAIRKPMHKETVFGQVNLRRKVTVKLKDALEKIPAICDKELRDYINILVAKQFNKKQILAHFKSINYRLNMKSVDKVDVWQFSNEKEPMVATRKSVDTSFDAKRIATITDTGIQKILRNYLNAKDNDPNIAFTPEGIAEMNKHITEYNNGKQHQPILKVRVSEPKGAKYQVGETGNKTSKFVEAQKGTNLYFAIYEDKEGNRSYNTIPLNEVIERLKQGLSPAEDLNKQGEKLKFYLSPNDLVYVPTEEEKLSGECKLNKGRIYKMVSSTGNECYFIPYTVSNVIFNKVEFESLNKMGRALTGEMIKAVCWKLEVDRLGNILKIIK

SEQ ID NO: 8344 - protein, 1133 aa, unidentified
  REGION 1..1133: note = Description of Unknown: Cas Enzyme sequence
MSDLVLGLDIGIGSVGVGILNKVTGEIIHKNSRIFPAAQAENNVVRRTNRQGRRLTRRKKHRRVRLNHLFEESGLITDFTKVSINLNPYQIRVKGLIDELSNEELFIALKNMVKHRGISYLDDASDDGNSSVGDYAQIVKENSKQLETKTPGQIQLERYQKYGQLRGDFTVEEDGKKHRLINVFPTSAYRAEALRILQTQQEFNPQITDEFINRYLEILTGKRKYYHGPGNEKSRTDYGRYRTSGETLDNIFGILIGKCTFYPEEFRAAKASYTAQEFNLLNDLNNLTVPTETKKLSEEQKNQIINYVKNEKAMGPAKLFKYIAKLLSCDVADIKGYRIDKSDKAEIHTFEAYRKMKTLETLDVKKMVREELDKLAYVLTLNTEKEGIQEAIEHEFADGTFNQEQVDELVQFRKANSSIFGKSWHNFSVKLMMELIPELYATSEEQMTILKRLGKQKTTSSSNKTKYIDEKQLTEEIYNPVVAKSVRQAIKIVNAAIKEYGDFDNIVIEMARETNEDDEKKAIQKIQKANKDEKDAAMLKAANQYNGKAELPHSVFHGHKQLATKIRLWHQQGERCLYTGKTISIHDLINNPNQFEIDHILPLSITFDDSLANKVLVYATANQEKGQRTPYQALDSMDDAWSFRELKAFVRDSKALSNKKKEYLLTEEDISKFDVRKKFIERNLVDTRYASRVVLNALQEHFRAHKTDTKVSVVRGQFTSQLRRHWGIEKTRDTYHHHAVDALIIAASSQLNLWKKQKNTLVSYSEDQLLDIETGELISDDEYKESVFKAPYQHFVDTLKSKEFEDSILFSYQVDSKFNRKISDATIYATRQAKVGKDKKDETYVLGKIKDIYSQTGYDAFIKIYKKDKSKFLMYRHDPQTFEKVIEPILENYPNKELNEKGKEVPCNPFLKYKEDHGYIRKYSKKGNGPEIKSLKYYDSKLGNHIDITPKNSNNKVVLQSVSPWRADVYFNKTTGKYEILGLKYADLKFEKGTGTYKISEEKYNDIKIKEGVDSDSEFKFTLYKNDLLLIKDTETKEQQLFRFLSRTMPNVKHYVELKPYDKQKFDDNEELIKILGIVAKGGQCKKGVSKPNISIYKIRTDVLGNQHIIKNEGDKPKLDFYKKCCNYSYHIL

SEQ ID NO: 8345 - protein, 1181 aa, unidentified
  REGION 1..1181: note = Description of Unknown: Cas Enzyme sequence
MENKVWYLGLDIGTASVGWAATDTEYKIIRKNKKRLWGVRLFEEATTAQERRTYRSNRRRLARRKWRLNLLEELFSEEIAKVDPSFFLKLKESKYHYEDKTYKLPYTIFNEKDYTDKDYYKEYPTIYHLRSSLMTEKEPDIRKVFLAIHHILKNRGHFLLQGQSFKDGNINNLIKELLELDILHHDIEVNDEIVENIKNIAIEKKNLTEKVNGLKKLFPKEKQLLEVFRVILGGKSSLDKIFAIEEYKELDASVKSISFKEKVYEEVRHDYEQILSNYIELLDLAKLVYDSIILSDVKKEGKTLSESKVELFEKHKDDFMKLKALVKNDSKLTEEKRDDLYRIIFKEDNDKGTNYVNYIKDSKEGKGCSYEDFKKFLVKELAKLEDSEEKNSILADLELETFLPLQRTKDNSVVPYQIHREELIKILDNAEKYHSFLKEKDESGYTVKEKIIQLLEFRIPYYVGPLNSQKKANEGGYAWSVRNKGEEKTPVTPWNYSKVIDESASAEKFITNLTNKCTYLKGEEVLPKHSLLYSEFALLNELNALRYDGNRISIEARNTIIEKLFKEQGKKVTKKSIKELLKAEGYINGKGEITGIDITVKNDLKSYRDFKKILGDKFNTEHVENIILWITLYGESRKLIKAKIEAIYGDKYTKEEIAKMSRLTVTEITPEILEDLYVSPAVKRSIWQTIRIVEELKKIIGCAPAKIFVETTRSNTADKKPTDSRKKQLEAVYKNIKDKEIQELEKEINSTIDFSIKKDRLSAVEPSKLKAKKLYLYYTQLGRCMYSGESIDINELFDNNKYDIDHIYPQSKVKDDSFTNTVLVKKVSNAEKTDKYPLGLDIQTKENKRFWKFLKEKKLITEEKYNRLVRTEEFSDEELSGFIARQLVETSQSVKAVANVLDELLNNMFYTDVRNSNTIAWEMDKTVHQVDKVMNNNNILVTRRTSEQKGALYNATVYKAKVAAKAKEGTYYPLKTSDKIINDVTKYGGFTSIGIAYYSIFEYILQTNKGEEKITRIIPIPIYISQNIIDDNTIIEYAKKQIILKSNEKLKDFKLKYKKLSIGNLINLDDYIYVIGGKTGDRFYYDAAVQVVIDKNSELYIKELSKYQNWKKENKDGLLWESITAEKNINLYNTLVEKMNTGIFIKKKPNKYNELNSEEIRNNFISISEEEQGKVLLEILN

SEQ ID NO: 8346 - protein, 1095 aa, unidentified
  REGION 1..1095: note = Description of Unknown: Cas Enzyme sequence
LSFAEVITDKVTKFIRNENVTATFVEKICKTLECNLDGIMEIDDKENPIRLIDLGVRVFERAEVPKTGDSLAAARRAARSIRRLIRRRAHRLLRTRRLLKHEGVLKPEDFDENGFIKLLPNTPWQLRAAALDRKLTPLEWAAVLLHLVKHRGYLSQRKNEEQTADKELGDLLKGVADNTHALQTGDFRTPAELALNKFEKESGHIRNQRGDYSHTFSRKDLQAELVLLFEKQKEFGNPYVSDDLKNGIENLLMTQRPALSGDAIQKMLGHCTFEPAEPKAAKNTYTAERFIWLTKLNNLRILNQGSERPLTDTERTTLMDEPYKKSKLTYARVRKLLGLDDTAFFKGLRYGKDNAESTTLMEMKAYHAISRALEKEGLKDKKSPLNLSPELQDEIGTAFSLFKTDEDITGRLKDCLQPEILDALLKHISFDKFVQISLKALRRIVPLMEQGKRYDEACAEIYGDHYGEKNSEEMLYLPPIPADEIRNPVVLRALSQARKVINSVVRRYGSPVRIHIETAREVGKSFKDRKEIEKRQEENRKDREKAAAKFREYFPNFVGEPKSKDILKLRLYEQQHGKCLYSGKEIDLGRLNEKGYVEIDHALPFSRTWDDSFNNKVLVLGSENQNKGNRTPYEYLNGKDNSREWLEFKARVETSRFPHSKKQRILLQKFDEEGFKERNLNDTRYVNRFLCQFVADHMQLTGKGKRRVFASNGQITNLLRGFWGLRKVRVENDRHHALDAVVVACSTVAMQQRITRFVRYKEMNAFDGKTIDEETGEVLHQKTHFPQPWDFFAQEVMIRVFGKPGGKPEFEEADTPEKLRALLAEQVSSRPQAVHEYVAPLFVSRAPNRKMSGQGHMETVKSPKRLDEGMSVLRVPLTQLKLKDLEKMVNREREPKLYEALKARLEAHKDDPAKAFAEPFYKQDKAGNPTQQVKAVRIEQVQKTGVWVRNQNGIADNATMVRVDVFEKAGKYYLVPIYSWQVAKGILPDRAVVQGRDEEDWTVMDDSFEFKFVLYANDLIKLTAKKNEFLGYFVSLNRATGAIDIRTHDTDSTKGKNGIFQSVGVKTALSFQKYHIDELGKEIRPCHLKKRPPVR

SEQ ID NO: 8347 - protein, 1413 aa, unidentified
  REGION 1..1413: note = Description of Unknown: Cas Enzyme sequence
MEDKRPYYIGIDLGTNSVGWAVTDEDYNILKFKKKNLWGARLFEKGETAQARREKRSLRRRLKRRVHRIKLLQDIFKDEIAKVDNKFFLRLNESKYYKEDKDESLLTDDTLFADVNYNDKDYHKEYPTIFHLRKDLMESDDKKDIRLIYLALHHVIKNRGNFLHEGSIENITDFKKSFEKLNEYLKDNDYPIFKEDDFDKIEEIISNKELKPSEKEKQFKTFIEDKQLIEVLKGIVGLSCNLTKLFDDESILNDQEKSLSIKLGEKEYDILRSEIEPIINENIELIDRIKGLYDWSIINDILKNSSTLSEYRVKLYEEHKEDLAKLKYFIKNYGTSEEYFKAFKDINEKENYVAYIGLNKTYIGLNKKGKKKEVVNKISVGEDPLKTVNNYFKKVLDKYKNEIKEEDKEIYDNIINKLNESNCLKKIRTNVNGTIPYQLHKKELEKIIENASKYYSFLNDKDDNGYITKDKIIKIMEFKIPYYVGPLNPYHKDISGHAWIEKKSNEKILPWNFEEVVDTTKTAEKFIIRMTNKCTYLLGEDVLPKASLLYQKFMLLNELNNMKIRGDYIAKGLKDEFIEGLFKKKSRVSIKDLCNYYEYKYQVKLDKKDISGLDITFKSNLSSYVTFSKIFEGHNIELNPYNDMIENIIKYKTIYGDNKDIFEKKIRKDYFQYLTEENIKAIKNLNFSGFGNLSKKLLLEIPGTNKDTGESFENIMAALESTNDNLSTILTFSEKRYDFMKTVDEINKGYDKKELTYENIMNERYISPAVKKSTWQAIKIIEEIIKIKGYLPEKVFLETTREEQTDKKRTTSRKEQLKALYKNIKEEYFINSKERLENFTEDKLRDDKLYLYYQQLGKSMYSDKIIDLDDLLNNNTKYDIDHIYPYSQSGDDSINNRVLVLKDENNVKQDSYPLSEEIRIKNASRWKMLRDKNLISEEKYKRLTRNTPLTDEELSNFVARQIVETSQSIKILKDVLEEYYENIDVNMIKVSVSKKMRMALGIRKIRELNNFHHAHDAYIAILSGDIYTKRFTKDIYNYFKDNKLSSQERKARRDYNLNGFFTHVVYAKKFTPKKSIKNEVIIEKNRLWSPLRIPEIVEMMDTSNILITRKIEESHGNFYDETLYRKTEQNSSMRSLKEGRLADISKYGGYNSLSTAYFFIVKFKEKSKEKVQILSLPVIDMKKIKTENDLKNYCIDKLKLEEPEILINKMRLNTKITCENHEYRITGKGNGGERFVLNNNIELYIKNNKVTDLYHILKYLDKYNKLSKKYLKNKELVFETEEEKDFFEKTELKIRKYYEKGDWFVIDEDMLNNMYLLLQEKCSGVYKNMKYNLKDVFINSKDIFYNLDFKDKVEIIKEVLKMFNTTAETPNFEKIGYTKKSGRISIGYNITDKKFYIHNESITGVFENKIRVK

SEQ ID NO: 8348 - protein, 1108 aa, unidentified
  REGION 1..1108: note = Description of Unknown: Cas Enzyme sequence
SNDEDVDALREACPDDSIELFNRLCDVYSAYVLQGLLSYAPGETISVNMVEKYEQYGKDLALLKELVRRYASKSYDSFFRGPTYPDTNIYDASKAKGYTKYNLGTSKLSYDDFSKEVKSLLGKTDAVNDERYQSMMEAFDKQQFLRRLKTSDNGSIYYQLHFEELQAILKNQGRFYPFLKTDEKKIESLVSFRIPYYVGPLSSRNAAVDQHGKQRFAWAERKPGQEDTPITPWNWDSVIDRNKSAEKFIKRMTGMCTYLQGEEVLPRCSLLYEEFCVLNELNGLRLTIDGDREHRLDTAQREGIVHDLFHHKRSVSYKQIEDWIIREEGFRYPHISGGQGVSGLESKMGSYIFFCKDVFGVDELDRKDYDMVEEIILWNTLFEDRRILKEKLVQKYGEQAGGPLSDEQIKRICKKRFTGWGRLSEKFLVGLKVKTDIGPKSIMDVLREGDPNSDSRRGHAMVMMEALRDENLGFQKRVDEFNRNYFEANGKLVEINELPGSPAIRRSLNQAMRIVDEIAKIAGHAPANIFIEVTRDDDERKKGRRTTRRYDELKKALEAFKSDDPEIWREICETAPKDLDERLTLYFMQRGKCLYSGRPIDMNRLAESGLYEVDHIIPRAYIKDDSFENKALVYREENQRKTDALLIDQGVRRKMHDYWNMLHGAKLIGDKKYNNLMRSTISEQTMKGFVARQLVETSQMVKLVQSMLEVRYPETKIVPVKASISHNLREAAGFIKCREANDFHHAHDAYLALRVGMFIQKRHPGVYENPIGLTRAMRKYAQSQAEIFRSTHHLPGSAGFIVNSFMSSGFDKETGEIFKDDWDAEAEVEGIRRALNYRQCFISRMPYEDTGVFWDATIYSPRCGKNLGLPLKRHLDPKKYGSYSGKNYAYFFVYKEMDKRGKEDYQLAGVPIFLLSQLKYGESKLEDYARKLAVEKKRIFVGIEVWHILHDQLVEVRGDRLAVTGEEVMKNAHQLAFTQVEMELIKKLIENKNSNSSCNKRRITQDILNIIKSQANSVNCKLMSESIDILTIEKNFKSVPFEQQRDILLGIIRAYRGGRQSRPIDLSCLGGAKNAGRLRPARTKLPSDFYIIDQSVTGMFERRTRIGL

SEQ ID NO: 8349 - protein, 1365 aa, unidentified
  REGION 1..1365: note = Description of Unknown: Cas Enzyme sequence
IGTNSVGWAVITDDYKVPSKKMKVLGNTDKHFIKKNLIGALLFDEGTTAEDRRLKRTARRRYTRRKNRLRYLQEIFFEEMSKLDSGFFHRLDDSFLIPEDKRGSKYPIFATLAEEKEYHKQFPTIYHLRKQLADSKEKADLRLIYLVLAHMIKYRGHFLYEEAFDIKNNDIQKIFNEFISIYDNTFEGSSLSGQNAQIEAIFTDKISKSAKRERVLRLFPDEKSTGLFSEFLKLIVGNQADFKKHFDLEEKAPLQFSKDTYDEDLENLLGQIGDDFADLFLVAKKLYDAILLSGILTVTDPSTKAPLSASMIERYENHQKDLAALKQFIKANLPEKYDEVFSDQSKDGYAGYIDGKTTQETFYKYIKNLLSKFEGTDYFLDKIEREDFLRKQRTFDNGSIPHQIHLQEMNAILRRQGEHYPFLKDNKEKIEKILTFRIPYYVGPLARGNRDFAWLTRNSDQAIRPWNFEEIVDKASSAEDFINKMTNYDLYLPEEKVLPKHSLLYETFAVYNELTKVKFIAEGLRDYQFLDSGQKKQIVNQLFKEKRKVTEKDIIHYLHTVDGYDGIELKGIEKQFNASLSTYHDLLKIIKDKEFMDDPKNEEILENIVHTLTIFEDREMIKQHLAQYASIFDEKVIKALTRRHYTGWGKLSAKLINGIHDKKSGKTILDYLIDDGYSNRNFMQLINDDGLSFKEIIQKAQVVGKTDDVKQVVQELPGSPAIKKGILQSIKIVDELVKVMGHAPESIVIEMARENQTTGRGKKNSQQRYKRIEDALKNLAPGLDSNILKEHPTDNIQLQNDRLFLYYLQNGKDMYTGEALDINQLSNYDIDHIIPQAFIKDDSLDNRVLTSSKDNRGKSDNVPSLEVVQKRKAFLQQLLDSKLISERKFNNLTKAERGGLDERDKVGFIKRQLVETRQITKHVAQILDARFNTEVTEKDKQNRIVKIITLKSNLVSNFRKEFRLYKVREINDYHHAHDAYLNAVVAKAILKKYPKLEPEFVYGDYQKYDLKRYISRFKDPKEVEKATEKYFFYSNLLNFFKEEVHYADGTIVNRENIEYSKDTGEIAWNKEKDFATIKKVLSYPQVNIVKKTEEQTVGQNGGLFDNNIVSKEKVVDASKLIPIKSGLSPEKYGGYARPTIAYSVLVIAYIEKGKTKKLKRIKEMVGITIQDKKKFEANPIAYLEECGYKNINPNLIIKLPKYSLFEFNGGQRRLLASSIELQKGNELILPYHFTALLYHAQRINKFSEPIHKQYVEAHQNEFKELLTIIISLSKKYIQKPNVESLLHQAFEQADNDIYQLSESFISLLKLTSFGAPGAFKFLGVEISQSSVRYKPNSQFLDTTLIHQSITGLYETRIDLSKLGED

SEQ ID NO: 8350 - protein, 976 aa, unidentified
  REGION 1..976: note = Description of Unknown: Cas Enzyme sequence
PVFQEFRIWQNLNNVLLIDNDTNGKRPLDEGERNLLYEELSIKAKLSKTEALKILNKKGKQWDLNYKELEGNRTQAILFDCYNRIITLTGHEECDFKKIKASEIRHYVSTIFKSLGFNTEILYFDSSLEKHELEKQPMYQLWNLLYSYESDNSRTGNEALLRKLETTFGFPEEYATVLCDVVFEEDYGNLSVKAMRNILSHLQAGYNYSNACKKAGYKHSRHSLTTEELDQKVYKGKLELLPKNSLRNPVVEKILNQMINVINAIIDEYGKPDEIRIEMARELKSSAAERENATRAISQSNTENQHIREILEKEFALSYISRNDIIKYKLYEELKPNGFKTLYSDTYIPKDKLFSKDFDIEHIIPKARLFDDSFSNKTLEARDINLAKSSKTAFDFIKEKYGEQGAEAYKKKLDMLLDNDVISKAKYNKLLMAEADIPSDFINRDLRNTQYIARKACEILGELVRTVTPTTGEITNRLREDWQLVDVMKELNFEKYEKLGLTEIVEDRDGRKIKRIKDWTKRNDHRHHAMDALAIAFTKPSFIQYLNNLNARSNKGDSIYAIENKELHYEEGKLRFNAPIPVNEFRAEAKRHLSAILVSIKAKNKVMTQNVNKIKTKHGIIKKIQLTPRGPLHNETIYGTKMRPIIKMVKVGAALDEATINKVSSPAIREALLKRLNEYSGNAKKAFTGKNTLDKNPIYLNVERTKVVPALVKTVEWENSHPTRKPITPDLKVDKVIDKGIRDILKARLEEFNGDAKKAFSNLEENPIYLDQTKKIALKRVSIEGVLSAIPLHTLKNQAGKPITGKDGKPVLGNYVQTSNNHHIAFYYDENGNLQDYAVSFFEAAERKSQGVPIIDKDYNRDKGWRFLFTMKQNEYFVFPNEATGFIPSEVDLTDEANYSIISPNLYRVQKMSRIEKGTSVSRDYWFRHHLETILNDDSRLKNSAFKRINSLKPLEGIIKVRINSIGKIVAVGEYD

SEQ ID NO: 8351 - protein, 1391 aa, unidentified
  REGION 1..1391: note = Description of Unknown: Cas Enzyme sequence
MENIQYYIGLDVGTNSVGWAVTDTSYNLLRAKGKDMWGARLFEKANTAAERRTKRTSRRRSEREKARKAMLKELFADEINKVDPSFFIRLEESKFFLDDRSENNRQRYSLFNDATFTDKDYYEKYKTIFHLRSALINSDEKFDVRLVFLAILNLFSHRGHFLNASLKGDGDIQGMDVFYNDLYEFCEEFEIDLPQISNIDNFEKILSQKGKSRTKILEELSEELSISKKEKIKYAILKLICGMKIKVADIYSDEDIQDEDKKKDFGFRESNYEERALEVKEIIGDEYFDLVERAKSVHDMGVLSNIIGNSKYLCEARVEAYDNHHKDLLKIKELLKKYDKKAYTDMFRKMTDKNYSAYVGSVNSNIAKERRSVDNRKIEDLYEYIKKIALKNISDDNEDKIEILKKIETGEFLKKQLTASNGVIPNQLQSRELRAILKKAESYLPFLKEKGEKNLTISEMIIQLFEFQIPYYVGPLDKNPKKDKNANSWAVIPSGGRILPWNFEDKVDVKASAEEFIKKMLRKCTYLSEEYTLPKQSLLYEKFMVLNEINNIKVDGEKISVEAKQRIYKDLFMKGKKVSQKAIKQELISLNIMNKDSVLSGIDTVCNAYLSSIAKFRGVFDEDVNNQSIIDMVEDIIFWGTIYSDEKKFVKEKIEEKYGDKIDKDKIKRILGFKFSNWGNLSKSFLELEGADVGTGEVRSIIQSLWETNFNLMELLSSRFTYMDELEKRVKKLEKALNQWTIEDLDDMYLSSPVKRMIWQSMKIVDEIQTVIGYAPKRIFVEMTRSEGEKVRTKSRKDRLKELYNGIKEDSKQWVKELDAKDESYFRSKKMYLYYLQKGRCMYSGEVIELDKLMDDNLYDIDHIYPRSFVKDDSLDNLVLVKKEINNRKQNDPITPQIQASCQGFWKILHEQGFISNEKYSRLTRKTQEFSDEEKLSFINRQIVETGQATKCMAQILQKSMGEDVDVVFSKARLVSEFRHKFDLFKSRLINDFHHANDAYLNIVVGNSYFVKFTRNPANFIKDARKNPDNPAYKYHMDRFFERDVKSKSEVAWIGQSEGNAGTIAIVKKTMAKNSPLITKKVEEGHGKITNETIVGVKEIIFGRKKVEKSDKTPKKPNVEAYRPIKTSDERLCNILRYGGRTSISISGYCLVEYVKKRKTIRSLEAIPVYLGRKDSLSEEKLLNYFRYNLNDGGKDSVSDIRLCLPFISTNSLVKIDGYLYYLGGKNDDRIQLYNAYQLKMKKEEVEYIRKIEKAVSMSKFDEIDREKNPVLTEEKNIELYNKIQDKFENTVFSKRMSLVKYNKKDLSFGDFLKNKKSKFEEIDLEKQCKVLYNIIFNLSNLKEVDLSDIGGSKSTGKCRCKKNITNYKEFKLIQQSITGLYSCEKDLMTI

SEQ ID NO: 8352 - protein, 1526 aa, unidentified
  REGION 1..1526: note = Description of Unknown: Cas Enzyme sequence
MKNILGLDLGTNSVGWALISVDANGKLVKKIRLGSRIIPMSQDVLGKFDSGVTVSQTAERTEYRSHRRLLERALLRRERLHRVLQLLGFLPEHYAACIGWDRNDNATYAKFLPETEPKLAWRKADDGEHRFIFMQSFDEMLEDFKESQPSLLANGKRIPLDWTLYYLRTKALTKPIAKEELAWILLNFNQKRGYYQLRGEEDEEIPSKRVEYHELKVVKVEATDEGKGGNIWYNVLLENGWVYRRQSKYPLDKWLGLTLPFIVTTNLETDGVTPKRDKDGNEKRSISLPKEDDWTLLKKRTEDHLEKSGLTVGAFIYQHLLANPSDKVRGQLVRTIDRKYYKRELQAIIAKQMEFHPELRDAELLKACAEELYRNNGEHRAQLMAKDFKHLLVEDILFYQRPLKSKKSLISNCPYEIRQYINKETGEIKDVNVKCIAKSNPYFQEFRLWQWISNLRLLRQIDGQDVTADYIKGNGDKERLFDLLNNQGEIKQEHILRDFLKLKKPKGGEFPLRWNYVDDKVYPANETRHAMNRAIKAMNAEKEEKEAIGQLLVQPAVEYMLWNLLYSITDRNELTSALRRFALAHGISSVDAFVEAFLKVKPFKKEYGAYSEKATKKLLQVMRVGKYWCGDELADPAKRTKGNKQAVYDEMANRGICKQTLQNIDNIIEENIDERLKGALINPQRPLTALSHFQGLSVSDACYVVYGRHSEVAEIVKWKDAGELNTFINNFKQHSMRNPIVEQCVLETLRTVRDVWKQEGQIDEIHVELGRNMKRTAEQRARDTQAIQRNENTNMRISLLLTELKNDPSISDVRPYSPSQRELLKIYEEGALETLTDKDEDIAKISRLAQPSSSELRRYKLWLDQKYVSPYTGRPIPLAKLFTPAYEIEHIIPQSRYFDNSFSNKVICEAEVNTLKSNNLGMEFIKKFGGKTKGILDEDAYKLHVMTNYAHNPAKRSKLLMEDLPTDFNSRQLNDTRYISKTVMALLSNVVREEGERETRSKHVVVCTGGVTDTLKKDWGLHDVWHNLVYPRFIRLNNLTGTQNFGYWRALDEENKKQGEDSKKVFQITLPPECQRGSVKKRIDHRHHAMDALVIACASADIVNYLNNQSAASPNAHQDLRRLLCDVKRRIRKPWPTFTQDAQAALEDLVVSFKNTVRVVNKASNTYLRYDKDGKKKRFKQEGEGLKAIRKPMHKETYYGEVNLIRKEMLPLKRALEDVNAIVDKELRANIKALLRDGFNLQQVLANFKAKDFKFNKRDIKKVEVYVSSAKSTPMVATRKPLDTSFNAKRIADITDTGIQKILLNYLKANGNSPEQAFTPEGIAYLNEHIAEYNNGKPHQPILKVRVSEVMGAKFAVGQTGSKKTKFVEAQSGTNLYFAIYEDKDGKRNFETIALNVSAERLKTGQTPVPETNGAGIPLKFYLSPNDLVYVPTDEDRAAAHPSIDKRRIYKMVSATDVNCFFLPFEVASTIYNKVEFESMNKMGRAIDIMEYSDNYDVSTINKQMIKDVCWKLEVDRLGNITKIVR

SEQ ID NO: 8353 - protein, 1165 aa, unidentified
  REGION 1..1165: note = Description of Unknown: Cas Enzyme sequence
IFTDKISKSAKRERVLKLFPDEKSTGLFSEFLKLIVGNQADFKKHFDLEEKAPLQFSKDTYDEDLENLLVQIGDDFADLFLVAKKLYDAILLSGILTVTDPSTKAPLSASMIDRYENHQKDLAALKQFIKTNLPEKYDEVFSDQSKDGYAGYIDGKTTQEAFYKYIKNLLSKLEGADYFLDKIEREDFLRKQRTFDNGSIPHQIHLQEMNAIIRRQGEHYPFLQENKEKIEKILTFRIPYYVGPLARGNRDFAWLTRNSDQAIRPWNFEEIVDKARSAEDFINKMTNYDLYLPEEKVLPKHSLLYETFAVYNELTKVKFIAEGLRDYQFLDSGQKQQIVTQLFKEKRKVTEKDIIQYLHNVDSYDGIELKGIEKQFNASLSTYHDLLKIIKDKEFMDDSKNEAILENIVHTLTIFEDREMIKQRLAHYASIFDEKVIKALTRRHYTGWGKLSAKLINGIYDKQSKKTILDYLIDDGEINRNFMQLINDDGLSFKEIIQKAQVVGKTNDVKQVVQELPGSPAIKKGILQSIKLVDELVKVMGHAPESIVIEMARENQTTARGKKNSQQRYKRIEDALKNLAHGLDSNILKEHPTDNIQLQNDRLFLYYLQNGKDMYTGKSLDINQLSSCDIDHIIPQAFIKDDSLDNRVLTSSKDNRGKSDNVPSLEIVQKRKAFWQQLLDSKLISERKFNNLTKAERGGLDERDKVGFIKRQLVETRQITKHVAQILDARFNTEVTEKDKKDRSVKIITLKSNLVSNFRKEFRLYKVREINDYHHAHDPYLNAVVAKAILKKYPKLEPEFVYGDYQKYDLKRYISRTKDPKEVEKATEKYFFYSNLLNFFKEEVHYADGTIVKRENIEYSKDTGEIAWNKEKDFATIKKVLSLPQVNIVKKTEEQTVGQNGGLFDNNIVSKKKVVDASKLTPIKSGLSPEKYGGYARPTIAYSVLVIADIEKGKAKKLKRIKEMVGITVQDKKKFEANPIAYLEECGYKNINPNLIIKLPKYSLFEFNNGQRRLLASSIELQKGNELIVPYHFTALLYHAQRINKISEPIHKQYVETHQSEFKELLTAIISLSKKYIQKPNVESLLQQAFDQSDKDIYQLSESFISLLKLISFGAPGTFKFLGVEISQSNVRYQSVSSCFNATLIHQSITGLYETRIDLSKLGED

SEQ ID NO: 8354 - protein, 1074 aa, unidentified
  REGION 1..1074: note = Description of Unknown: Cas Enzyme sequence
MNKYIIGIDLGINNVGWSIINSETKEIEKCGVRLFSPSEKADERRGYRAARRLKKRKKNREEDILKILNKINFPNKSIDSTLIYKRNKGLSQQIEKQDITNIICYYATHRGYIPFGDEERELVDLQGKLACQHYLNLYENSGQYRALNEVVDHNEIVREYDEIIKEQIKYYPELKEVSDKIKEIISRKRKFWEGPGSIKSFTKYGRFKNKEDVRLYKESGNEKYLYEELIKKCQIYINEKVVSKSNYYYEEYKLLNDFINTKIKDIEDITRQDCIEEVENRKGTEKLYKLNLKGLELIIDYCKNNLNLRWDSIYKKLFNITKENLVGYRINKTSEPDFSTLNTYRKVKKCFKEFDSTWIDNIDEYNEIIHILATAPGIIEIRKMIEKSEIIKYLFSEEEYKKLKDLKGKLVKDQSLTYGEFSEKGLKRAINDMKNLLENYQYVSKKYNYQEEMNEYIVKEYKDTDGILKLPTQFVDEIIASPQVKKSLKQAIKVINAIIDEKEDYPEVIAIESTKEMNTKEKAKELTLEQALNEKRRVKAKEELERYFDDEYITEINIEKAMLYMELDGRCPYCNQAFKGGMNSIINSNLEIEHILPISKTKDDGYNNKTLSCNKCNAEKKDRSPYQWKKNNFKEFSNRINNLKISDDKKKHFLEERDLNLYSIKFIQRNLRDTAYGTKELVNQIHMFNKIIKDRLNNVEPIKTLSTPGQLTSNIRKKYNISKDRDEKFHHAVDASIVASIAATSYIGKKIIESQNDKKFWLDEDKKKALEELEIRNVKISTVEKLKAINSDNDIYKSNQVSKDPYKSFQKSPNISKYLKINDIYYKVSQINNIYEPNASEIKNLKKILGESKELHSMIEDNNKKMYNLLKEIFKTYGEMTEKNNPFANYCIEINGIQKEEFDYKKHGIKQENGPLIKKLRYYSKVNNPELINKKNIDKKDNTYIGLDGVGQYCTKIYWDRNNNEFIFMPIYLTSIDLSTKKINKNSSTYKYYYNTYLKGKNYQFITDVYNGDLIEVEKKDTIIKNYVSCYHKGAHNCIELKNKGSFNVSDKAFKIIDTDYLGNEKIRLTWPKK

SEQ ID NO: 8355 - protein, 1185 aa, unidentified
  REGION 1..1185: note = Description of Unknown: Cas Enzyme sequence
MKYIKHILGLDIGSNSIGWALIQLFFEEKQGKIIATGSRIIPMDQGLLGDFEKGNSVSQTAERTFYRCARKLRARHLLRRERLHRVLHILGFLPTHYDKQIDFSKRYGKFVDNTEPKIAYNEGKFLFMDSFQEMLSDFKSHQPDLFYTKKNGEESKIPYDWTIYYLRKKALSQKISKEELAWIILNFNQKRGYYQLRGEEEAENPNKEVAYYSLMVTDVTAEVPNKKGEIWYSIQLENGWVYRRTSKIPLDDWKGKVRDFIVTTELEEDGSVKRDKEGKEKRSFRAPDENDWNLLKKKTEQDISTSRKTVGCYIYDHILQNPNEKIKGKLVRTIERKYYKEELKAILEKQIALQSELFTDQLFADCIRELYSKNEAQQRNLAARDFIHLFVEDIIFYQRPLRSQKSTIANCSLESRFYIDKDSHTRKEAPLKVCPKSNPYYQEFRVLQWLQNLKIYEIDSDQEVTHEFIKTLEDKQQLFDFLMAQKEIDCEELLKYFLSLTYPNAKEKTLKSELKKWKDTYRWNYVYDIGEKSSKKYPMNETRYDLKRYLEKVANLPDDFLSSEVEYLLWHLIYSVTDKVAYEKGLKKFAQKHHLDKDSFVESFKKFKPYPSEYGSFSEKAIRKLLPLMRFGSYWDFNHIDKNTQKRIEDLITGVENEEIRTILREKAEKYQLEKETDFQDLPLWLAQYIVYNRHAEASSLEKWTSVNDLETYLNEFKQHSLRNPIVEQVVMETLRVVRDIWQQYGQGQASFFNEIHIELGRELKKTAKEREKLSKQNQKNEDINLSIKEKLKELEKYNTRAYSITHQEKYKLWLEQKHISPYTGQIISPENLFTDNYEIEHIIPQSRFFDDSLSNKVVCESIVNKAPYKDRQLGLEFIKNQGGRIVKELSKENKTIKIFTEEQYRTFIKEHYSNNPEKTKKLLLEEIPEKMVARQMNDTCYISKFISEILSKIVRSDEQDEGVHSKNVILCTGKITSILRQDWGLNDIWDNLILPRFERMNNLLQKEKFTIYSIEKQKKIPVVPINDQFKSFQKKRIDHRHHAMDAIIIACTTREHINYINNQHALEKEKDKKEKQEERDKLREKLCIKKYNKGSEGNYSWIFKKPWDTFTQEVRVALEDIVVSFKQNLRVINKATNYYERWVEENGKYIKKMVKQEGTNWAIRKPLHEETISGKIYLDREKIT

SEQ ID NO: 8356 - protein, 1188 aa, unidentified
  REGION 1..1188: note = Description of Unknown: Cas Enzyme sequence
MARKVLGLDLGVGSIGWCLITLDKDEKPQSILGMGSRIVPLSTDDATEFTQGKAITKNKMRTVARTIRKGMDRYQLRREALKKVLREYGMLPDESLIKLPLLELWELRARAATRGEQLSLAELGRVLLHINQKRGYKHAKADEAAEAEAEGKSKKEKEGYVAQVKGRYQALKEKGQTIGQHFAEELRANQQTAPRGVYYTYRIKEQVYPREAYIEEYDSIMAVQREFYPEILTDELIQRIRDRIIFYQRPLKSCKQLVSTCEFEKKERVVQVKRINKDGVEELVERTITIGPKVAPKSSPIFQVCKVWESIQNIRLYYPDGTERVLEQEEKQKLFDYLQKNDKLNLTTLRKVLKIKPKEKLWCDKLLEKGIAGNTTLAILRKALKGYEQYEGLLRFDLTIRDGHKADEDGVIRPIVDESYQNEPLYKLWHILYSIEDRADMYRALVGQLKIKREDLDDGLMDALYKIDFVKQGYGNKSAKFICKLLPHLQEGKMYSEAAEAAGVRHSDSMTAQERDERSLLEEIPLLQKNALRQPVVEKILNQMINLVNALKREHGEIDEVRVELARELKMSREEREETTKSNNAREKENEAIAKRIAEYGLTPTKSRIQKYRLWQESDECCIYCGKHVDVVQFLRGEEIEVEHIIPRSILFDDSMSNKVCACRSCNQEKGNRFAMEYIQSKGWEQSYIERVNSLFHDKKISYSKRQRLLMLPKDLPEDFIERHLRLSQYISREAQGILRKGIRLVSASEGGVTAKLRQLWGYDNILRDLNLDRYRSMGETEVVTVEHRDGERTDERIKDWSKRKDHRHHAIDALVVACTQQRYIQRLNRVNAEADREEMDVFIREQQQKPTHSKGEKLSLLENWLIRQPHFTTGEVTSHVEGILVSLRSGKRTISRGRNIYKRSGKTEVQRGVLIPRGALSEETIYGVIQVNGEDKVVCKYPLQSLKAKDVEYIVDEALRKKVRERIKQRGEKEAFAEPLYLDEAQTQEVRSVRCFTGKDQAKLIPLRYNDESEAVGFVAPGSNHHLALYRDVDGRLVESVVTFWQAISRIRYGLPAIVTHPREVIEQALSIPELPEEVLGALPKSRWRLMEVLRINDMFLIGMKDEEIKAAIEGEDYPMLSRHLYRVQNLSSMFYVFRYHLETEVKDNKNDTGVIPKFYRIKSLGRYQKLNPRKVKIDLLGRISLA

SEQ ID NO: 8357 - protein, 1432 aa, unidentified
  REGION 1..1432: note = Description of Unknown: Cas Enzyme sequence
MKNILGLDLGTTSISFAHIVEDENKQKSEIKELGVRIVSLTTDEQSDFEKGKSITTNANRTLKHGARLNLDRYKQRRKYLIDLLQKANLITPSSILAENGKDTTHSTWQLRAKAVTERVEKEEFARILLAINKKRGYKSSRKAKTEDEGQAIDGMAIAKRLYDENLTPGQLSLQLLQQNKKLLPDFYRSDLQREFDLVWNFQKQFYPDILTDSFYKELQGKGKDATSKAFSKRYHFDTAENKGSKESVRLQAYQWRAEAVSKQLSKEEVAYVLTEINNNLNNASGYLGAISDRSKELYFNRQTVGQYLYAQLQENRHNSLKNKVFYRQDYLDEFERIWETQASFHKELTEELKKQIRDVVIFYQRKPKSQKGLISFCEFESKEIEIEKNGKTITKTIGARVVPKSSPLFQEFKIWQILNNVICKRKGIRKKKVSAKTTQLDLLNESSQTIFSLDMECKQLLFDELNLKGDLKSDKVLKLLGYSPQEWEINYNQLEGNRTQKALYEAYLKIVEMEAHDVKDILQIKSTKDDWSLDESPLSASEIRESVKAIFQALGICTKILYFDPLLPVKEFEKQDSYQLWHLLYSYESDDSTSGNETLYRILEKKYAFKREHARILANVALQDDYGSLSTKAIRKIYPYIKENQYSKACELAGYKHSKLSLTTEELEARELKNIIPLLKKNALRNPIVEKILNQMINVVNALIEKNSERDAEGKITKYFHFDEIRIELARELKKNAQKRYEMTQNINKAKLEHQKISEILQKQFGIKNPTKSDIIRYRLYKELEHNGYKELYTNAPIARDMLFSKNIEIEHIVPKARVFDDSFSNKTLTFHRINSDKGEYTAFDYITSLNSEEELNQYLTRVENAYKTKSISPAKYKNLLKKASEIGDDFINRDLRDTQYIAKKAKEILFQVTKNVLSTSGSITDRLREDWGLVDVMKELNMPKYQSLGLTEIIECRDGRKVEVIKDWTKRNDHRHHAMDALTVAFTKPSYIQYLNHLNARKDENNKLYTDILGIERKETTKIHDENGNEKRVFIEPIPNFRQVAKKHLEEIFISHKAKNKVVTKNVNKPAGTDKQQITLTPRGQLHKETIYGKYQYYINKEEKVGVKFDERTIAKVSNPLYREALLKRLQANDNDPKKAFTGKNALSKKPIYLDEAKTKTLPEKVNLTYLEEDFSVRKKIVPKNPTSKEFVPNLTSIEKVVDEGVKHILIERLRAYNNDPEKAFVDLEKNPIWLNKEKGIAIKRVTISGVSNAQPLHIGKDHLGKTTLNKEGKEIPVDYVSTGNNHHVAIYRDKEGNLQEQIVSFFEAVVRTQQGLPIIDKTYKQAEGWQFMFTMKQNEMFVFPNETTGFNPAEIDLLDPKNKKLISPNLFRVQKIATKDYFFRHHLETNVETDNVLKNTTWKREGLSGLKDIVKVRINHLGDIVSIGEY

SEQ ID NO: 8358 - protein, 1420 aa, unidentified
  REGION 1..1420: note = Description of Unknown: Cas Enzyme sequence
MLLQELFAEEIAKIDAGFFMRLKESALYKKDKTDKQKNALFNDKDFDDQAYYKLYPTIHHLIKALIEDSAETDVRLLYLACHSIIKRRGHFLFEGRDFNSENQFDISISELFEYLREDMEIEFEADIESVKNILKDKSRKISDKQRELSRLFAFEKSDKQKKAVTYLLSGGTAQFADLFNDESLKDAETKNISFSKVNFDEKADELASLLGERFTLLLKAKAVYDCSVLSEIIGDEQYLSFAKVNTYKKHKTDLTLLKKIMKKFHKDKYKNVFMEVSKIGLYYRYIGKYITKDKEDVIVKDVISQEEFYTQLKSILNDIKISESDIEYKSILDEIEKGSFLDQSDIVKHKSDLRKLKNILKKYDKDKSKLVFSNIFVKGNYCSYAGVCKTKNKKLIIEEAASQDVFYDYLKKLLNDKEAAESDLEYKTVLNEIDLGTFLPKQTDKKNSNIPYQLRTAELEKLLETACKHFPFLTKKDNKGLTVKEKIVMLLTFKIPYYIGPINDTHKKCFPDRCWVVKKENTKKEKITPWNFYDYIDKEKTAEAFITVRTNKCTYLIGEDVLPRYSLLYSEYTVLNELNNLKININGSEICTVELKRRIYDGLFKKKKKVSQATIRNFLIIEGLCKKDDRVVLSGIDEKCTSSLTSYLDLKKIIGDKIDEYSVQKILEDVIRLLTVYDEGDGRKIAEAKIKKEYPKAFTDEQLKQIMRLRFSGWGRLSRKLLESVTAALPGFSEKINIITALRETNLNLMELLSKQYGFTPAIEKINTGFDDGNKNCFSYKNIVDDLFLSPSVKRMLWQTLRIVHEVVKVVGRAPKKVFIEMARGAEAEQGRTQSRQTILQKLYENCKEDAGNWITKDEFDKTSKHIQEEDNLKLRSDKLYLYYTQLGRCMYCGKRIEINEVFNTKLYDIDHIYPQSKIKDDSLTNRVLVCGPCNKAKEDKYPVPESARQKQTPFWQYLQSKGFISLEKLTRLTRTAELSEKELSSFIARQLVETRQATKVAGQVLKKLFPDTEIVYVKARNVSDFRDKFGLIKCREINDMHHAHDAYLNIVAGNVYHTQFTSNPWNFIKENKEGYNFKHLFEREVKRNNKVAWIPDVTISCVRSVLKKNTPIYTRHSYCKKGGLFDQTIMKKGKGQFPLKAEGALQRIEDYGGYNKVAAAYYVLVEYTEKGKNVRSLETVPLYLLSRSKKDKKVIADYLSKQLQCPYKIIIPRIKVNALLKVNGFPCHLTAKNGNTLSLRSAVQFCCKNEDALFFNRILKYNTVMTLYEKQKDFKAYDDYTLRMYVKDELRNEKKKTDISENDFETSLRNKTVEMYDGLLRRYETSIYRLRPNSAAFDSLKKGRDKFKALSVEGQLKMLEEVLKLFRTVNENCDFSLIEGVKNAGKMTMGKKVSNRNSCILIYQSVTGIFEKRIDLLKL

SEQ ID NO: 8359 - protein, 1103 aa, unidentified
  REGION 1..1103: note = Description of Unknown: Cas Enzyme sequence
MGIIIKPVITEKTTALTEKTAERYVFRVSPDANKVEIKKAIEALYQVKVESVNTVNYSGKRKARYTKSGLIRGKVAAFKKAIVTLEKGQTIGQHFAEELRANKQTASRGVYYTYRIKEQVYPREAYIEEYDRIMKEQRTFYPELLTDALIGRIRDRIIFYQRPLKSCKQLVSTCEFEKKERVVQVKRINKDGVEELVERTITIGPKVAPKSSPIFQVCKVWESIQNIRLYYPDGTERKLEQEEKQKLFDYLQKNDKLSLTALRKVLKIKPKDKLWCDKLLDKGIAGNTTTAILRKALKGYEQYEGLLRFDLTIRDGHKADEDGVIRPIVDESYQNEPLYKLWHILYSIEDRKEMRRALVGQLGIKEEDLDDGLMDALYKIDFVKQGYGNKSAKFICKLLPHLQEGKMYSEAAEAAGVRHSDSMTAQERDERSLLEEIPLLQKNALRQPVVEKILNQMINLVNALKREYGEIDEVRVELARELKMSREEREETTKSNNAREKKNKDIAERIKEYKEYNVTPTKSRIQKYRLWKESDECCIYCGKHFGIEQFLRGEEIEVEHIIPRSILFDDSMSNKACACRSCNQEKGNRFAMEYIQSKGREQSYIERVNSLFHDKKISYSKRQRLLMLPKDLPEDFIERHLRLSQYISREAQGILRKGIRLVSASEGSVTAKLRQLWGYDNILRDLNLDRYRSMGETEVVTVEHRDGERTDERIKDWSKRKDHRHHAIDALVVACTRQSYIQRLNRVNAEPDREEMDAFIKEQQQKPTHSKGEKLSLLENWLIRQPHFTTGEVMKHAEGILVSLRPGKRTISRGRNIYKRSGKTDVQRGVLIPRGALSEETIYGVIRVDGEDKVVCKYPLQSLKLKDVEYIVDKELRDKVRKRIDQRGEKEAFAEPLYLDEAQTQEVRSVRCFTGKDQAKLIPLRYNDESEAVGFVAPGSNHHLALYRDERGNLVESVVTFWQAISRIRYGLPAIVTHPREVMEQALSIPELPEEILGALPESGLRLMEVLRINDMFLIGMKDEEIKAAIEGEDYPTLSRHLYRVQKLTTHDYMFRYHLETTLDGKDNVGEIPKSYRVQSLKIYRELNPRKVKIDLLGRISLA

SEQ ID NO: 8360 - protein, 1335 aa, unidentified
  REGION 1..1335: note = Description of Unknown: Cas Enzyme sequence
MKQPYSIGLDIGTNSVGWAVINEDFSLRRHKHQNMWGAHLFNEAQKAITRRSFRSSRRRLARRKRRITLLQQIFNDEIQKVDPNFYLRLSESILHIGDKNSALELDANILFADHSFTDKSYREKYPTIYHLRSELFHSTDRQDIRLVYLALHHIIKYRGNFLIEGGVDNVVSSFDSQNLQKFMEFIGADESMAKKVKAILLDRSLSRSVRKSDIIKLLQPTPDNKKIVSEAVGAVIGLEWNANKLFEDDSLEVKGKFSNKNYEEQRDEIAAAIGDDRHELVETLESVYQWTVFSQFIRKDSCLSDIMVEKYDVYRQDLSDLKSLFHEFLPKESYKSFFHGDAAEFEQYNTHKYSLEDLYKSIKNHLGNVAKEDPRYQRFEKRAELGEFLARQRIRDNGAIPHQIHQYELERIIDNQAQYYPLLAQNRDKIISIFTFKLPYYIGPLKTGGDFAWSVKKKDGVIYPWNFDEMIDDEASAEQFIDRMRNHCTYLPDEEVLPKNSLLYQEYEVRNELKNVTVNGERLSPDIQNRIVDELFTKEPSVTHKKFIKYLYDSQIYNTTSLIISGTAKEKSFASSRKSYIDFTQKVGVSIIPKNQRAIEEIIKWITLFEDKKILAKKLRKYSNIFNESQLRTILKLSYSGWGRLSRELLDGIIAHTPYGELTVIETMRHSKDNFMQIVQSDRYEFKKIIDDILSANQHTEITYDDIKKLAGSPGIKRALWRSVRIIDEIVDIIGYEPKLISIEMARNEDEKVRTKSRYSQLEKMYKDLYGKEYNKSDIKSQLADYKDKLDRKKYYLYFLQNGKCAYTGDPLDIENDLRDSEIDHILPRSLTKDDSLDNTVLVLRKENQRKLDDYPISPDIQNHMRPIWMSLKNAKLMSQLKFQRLTSQRQLSEDRIAGFVNRQLVETRQITKHLARMLTEKYHNSSTEVFTIRAGMNSEYRHIHDLPKCREVNDLHHAKDAYLAAVLAQYIKVRYPRLDKAFIYGEYMKFKSKKQTDADRSSFILSSMKYDFTNTETGEIIWQGKTAQDVIDRTMRYNDCLITRKTKIGDDQFYDQTIYGKNSGKTMIAKKANLPVGKYGGYSGEKAAYFAAINYLKQVRNKDVSVNEIVSVPAQIYTLEKTKPGSINEYLHNNYRQATILLSKIPINQKIEYDGNEQFVVGSKEVTNAKQLKLPYGIEYAIAIALKQGIPHVTISEEQAADDNKLQRKRNKQIEKRDKVIDGVEKFWGIYADKLANQYQQFGNAGPNAQSSLVEYSKLPLDDKIKVINLVLKATHAGSGRVDMSKEFPQLGLSSRFGRMDNKALDPTKLTFVYESITGLHRRKLDGKTLEQGR

SEQ ID NO: 8361 - protein, 1282 aa, unidentified
  REGION 1..1282: note = Description of Unknown: Cas Enzyme sequence
VIGFTEHWNQYLDAIPAQLQDLYFREEYVKLYETESEKVCCFVYQDGDSIMLFPFLRRAFHYKGNIYFDFETAYGYGGPVSNDHDETFMTAAFEAMLTDFATHQPVFVSEGKKVPYDWTLYYLRKKALTEEISKEELAWIILNFNQKRGYYQLRGEEEEEQSNKLVEFYALRVVKVEATDDKKGKDTWYNVHLENGWIYRRTSNIPLDWEGKVKEFIVTTDLNEDGTPKLDKYGEVKRSFRAPKEDDWTLIKKKTESDIANSHKTLGCYIYDALLQNPNQKIKGRLVRTVERKFYKEELRLILEKQLSFHPELQDRDLYRACIDALYVSNEAHKNNISGRDFVYLFIDDIIFYQRPLKTKKSLIDNCPYEKNQYMDRETGEVKQAPIKCIAKSHPLFQEFRLWQFISNIRIYQRERVMDDGKLETDVDVTPDFLKTEDDYTTLFEWLNDRKEVDQKAFLKNPQFGLKKTFTEYRWNYVEDKSYPCNETRNAILNGLQKAGVSADFLSREVEEALWHILYSVEDKIEIESALRKFASKHDLDDRFADVFKKLPPFRKEYGAYSAKAIKKLLPLMRMGKYWELSNIDDKTKERIDKIITGEWDENIHNRVREKAIKLSDITDFKGLPLWLSCYVVYNRHSEARAIAKWESPEDIDSYLRLFRQHSLRNPIVEQVITETLRTVRDIWKRIGQIDEIHVELGREIKNPADKRAKMTAQIVENENTNLRIKALLAEFINSEYEIENVRPYSPGQQEILRIYEDTVLNSVEEIPEDISAVLKKFRESDLKKRPTKSEFLRYKLWLEQKYRSPYTGDIIPLGKLFTSAYEIEHIIPQSRYFDDSFSNKVICEAEVNKLKSNELGYEFIKNHHGQYVEIGFGKVVQIFSIEAYEKFVKANYSGIGSKMKRLLMDDIPETFIERQLNDSRYISKVVKSLLSNIVREKDSNGEYEPEAISKNVIVCTGSVTDRLKRDWGVNDVWNSIIYPRFERLNELTGSQQFGCWENKEGKRVFQTAVPLEMQKGFSKKRIDHRHHAMDAIVIACAIRNHINYLSNESASKKAKISRIDLQRLLCTKCRTDDNGNYKWIVKKPWPAFTQDIRKALENITVSFKQNLRVINKTTNYYVHFDESGKKVLEKQINGDSWAIRKPMHKDTVFGKVNLQKVKEVRLSLALDTPKMIVDKKLKEKVLQLYSYKYDKKRIDKYFKENASLWKDLNLSKVAVYYFTNDSTEPLVAVRKPLDTSFNAKKIKESVTDTGIQKILLNHLSNNQDNPNLAFSPDGIDEMNRN

SEQ ID NO: 8362 - protein, 1102 aa, unidentified
  REGION 1..1102: note = Description of Unknown: Cas Enzyme sequence
MDPKELKYVVGLDIGITSVGWATLLLDSQDEPVRILDLNSRIFDKAEVPKTGASLAAPRRMARGVRRRLRRRKFRLHRVRQYILRHHILDKAGLECLYKPKTDIDIFALRTAGLDRLLEPEEWARILLYMAKHRGFKSNRKSASDASDDGDMLDAIRKNKEVLSKYRSVGEMFDKDEKFSDHKRNKGGSYEFTVARSMLVDEIKLLFEKQRDFGLAFAEKDAEEEYIELFSAQRNFDEGPGGDSPYGGNQIEKMIGLCTFEGKNGEKRAPKASYAFMATNLWQKINQIRIIEKGTERPLTAEEAGKIDEKAWKKEAMTYKDIRSEISLGDEASFKGLPYKWTETDKEETESKVKFSLVKEYHTLRKVLDKVEKNRILQLSHDDIDNIAYIFSVYKNDDKIREALEETDLDSKDIDVLIEHLGTFSKFGHLSLKACYKILPYLEQGMVYSDACTAAGYDFRKSAQGSIADIPNPVVKRAISQTMKVLKAIKQKYGCPPVEIHIEMARELAKSFDERQKMTKSIEENQSHNERIKERLQKEFNVPYPSGQDIVKLKLYEEQNETCAYSQKHIDAAKLFHDPNYAEVDHIIPYSRSFDDTYNNKVLVLTAENRQKGNRTPMEYLSGDEARKKQFVAWVKSDIKKPRKRENLLREKFTADAENDWKARHLQDTQYISRFMLNYLQNNYELTPGNTDRRRRIIPVNGAVTAYVRKRLGISKIRENGDLHHAVDAAVIAAVTQGVVNSVSRYSKRHELQYHVDEHGNCVDLVTGELMGDAFKENHKIKGFPEPWAQFRAELEARVSENAAEAIRILNLPTYSPDEEIKTPFVSRMVRHKTTGQAHEDTVRGKSNVADNVYVKKVALTELKLKDGEIEGYYNPSSDRLLYEALKKRLEQFGGKGKDAFKEPFHKPKADGSTGPIVKKCKVLDKINLAVQVHGGKGATANANGSMIRVDIFKVQEKNGKHSYYSVPIYVADTVKAELPKKAVYRRPYDEWPEMKEADFAFSFYPNDVVYIGGKEIKMNIMPGCTLATENHVKNDFFYYKGLDIATGAMIVINHDGTYKQRGVGIKQLPLIEKYEVSVLGDLVKAPYRQRETFKRKVHGSK

SEQ ID NO: 8363 - protein, 957 aa, unidentified
  REGION 1..957: note = Description of Unknown: Cas Enzyme sequence
VELRKESVQMLQIKSRAASQVTFDTDYNVPDAKPDVGRLIQSKGDISMDEVRLSEGKAFISGNLNVDILYVGEENQKVSSLGAKLSFDETLNLEGIASGDKMCLKWEIEDLSVHMIHSRKLNIKAIVTFYAVVDEMAGIQLPVEISEEGISVKRKKVRLMSLMVHKKDTMRIKDEVTLVSNKPNIEQLLWYTIDVRGMDLRPEDNVVRARGELSVFVLYSGEDEENPLQWAEYVLPFNTEVECTGCMGEMIPNIGFSVMHQSIEVKPDSDGEERVMSVDTVLELDMKLYREEEHDLILDVYSPLKECIPQGKEMCLESLLVRNDSKCRVSDRIELKESQGKILQICHSQGRVKVEKTKIVENGIQADGIVFMKILYITGNDEMPFYSVDGMIPFSHIIEANGINEDSIFFLQADLEQLSTSMIDSNEIEVKAVISLNVLVLQCENRMIISKVEERPLDMEKIQAMPGITVYVVKNGDSMWDIAKRFYTTVEEICELNELEEDRVVPGMPLLLVKKVDNAKKTDVYPLDRETQAKMHGFWQLLLSKNLISKVKYQRLIRTTPLTDEELGAFISRQLVETRQSTKAVAKIMEQLYDKEQTEIVYVKAALASDFRHTYDMLKCREVNDFHHAKDAYLNVVVGNVYNVRCTHNLRNFIRGLQENGPRGYSMNAMFKWDIPGAWVAENGELQKTQTKSLEIVKQMMAKNNIRYTRYAFCQHGGLFDQMPVKKGKGQIPLKQDGPKSDMTKYGAYNKAMSKYFALISYLDKKGKEVRQLVPIDAVTEKVYLADPDEYVSNCVGVPAKVLIPCIKYNACLSFDGFRMHLSSKSGNQLGYKPAMQLVLSYEQEKYVRNITKYLSQNKDRPLNKYDGITPDKNIALFDTLVDKMSNSILSLRFGDMGAKIVDKREAFCVLTPEEQCVVLAEVLKILHANVMRGDLTNIKLAKTAGALVSNMKLSEI

SEQ ID NO: 8364 - protein, 91 aa, unidentified
  REGION 1..91: note = Description of Unknown: Cas Enzyme sequence
MKYGIGLDCGINSVGYSVMELGIDDEPRKIEMLSSRIFTAAENAKDGSSLAAPRRDSRGLRRTTRRHNHRIFRIKHLLIQNNIVTPRRNRC

SEQ ID NO: 8365 - protein, 957 aa, unidentified
  REGION 1..957: note = Description of Unknown: Cas Enzyme sequence
LAQRRGFKSNRKADEKKDKEAGKLLTAIEDNKKRIENNNYRTVGEMLYKDPEYSDHKRNKGEAYKNTVSRAMIEKEMKMIFSAQRDFGMPFATKEIEEKYLDIALSQRPFDLGPGRGPENCRSPYYSENLIGDRMGKCVFYPEETRAAKATYSFQYFTLLQNINSIKLTDEFGNKRFLTADERKEIKNLCFKKVTMNYASIRKALSLPESIKFNTVSYGDKDPAEVEKKTKFEYLKPYHQIKKALGDAIITLSTDELDEIGRILTVFKNDQKIIEALGKANIDKSLYEPLLTLPSFSKTGHLSVKALKKIIPFLENGDIYSDACKNAGFDHRGHLGEKTMFLPAKDPRLDDITNPVVRRAVSQTIKVVNTIIRQMGCSPTYINIELARELSKSFNERNEIKKQNQANEERNNKIIEEIQENFHIKPNGQDIIKLKLWHEQNGIDPYSIKNIEYSRLFETGYVDIDHIIPYSISFDDSYSNKILTFAKENRQKGNRIPMDYLSDNKKGPYQVWVNSNIKGYKKRQNLFKQKLTKEDTDGFKERNLNDTKYLSKFLYNYINDSLLFEDYSTDKKLHVMSVNGAVTAYMRKRWGIKKIREDGDLHHAVDATVIACVTRGMVKQISNYANRRETIYDDVDLSTGELKADRFPMPYPTFRKELECRATIDDKNRLKEELIKLPNYTYDDAERAKPCFVSRMQNHKATGSIHEQTIRSGKVEGYTISKVPLTKLKLEKDKSGIQNYYNPKDDALLYNALYKRLLEFGGNAEKAFADGFHKPKSDGTPGPIVKKVKIIEKSTNTLPVRNGGVANNDNGSMIRIDVFYVDGDGYYFVPIYVKDTIKAELPSGACVPYKPNKKMDDRDFIFSLYPNDLIKIKSKKDITLSVSQKDSTLQQSICKKEIFLYYKSAGITTASISVISHDNSYCVKNLGIKSLLSIEKYVVDPIGNIHKVKKEKRMGFR

SEQ ID NO: 8366 - protein, 1166 aa, unidentified
  REGION 1..1166: note = Description of Unknown: Cas Enzyme sequence
VISSFDNQNLQKFMDFIGADESIAKKVKAILLDRSLSRSVRKSDIIKLLQPTLDNKKIVSEAVGAVIGLKWNANKLFEDDSLEAKGEFSNKNYEEQRDEIAAAIGDDRYELVETLESVYQWTVFSQFIRKDSCLSDIMVEKYDDYRQDLSDLKSLFHEFLPKESYKSFFHGDAAEFEQYNTHKYSLEDLYKSIKNHLGNVAKEDPRYQRFEKRAELGEFLARQRIRDNGAIPHQIHQYELERIIDNQAQYYPFLAQNRDKIISIFTFKLPYYIGPLKTGGNFAWSVKKKDGVIYPWNFDEMIDDEASAEKFIDRMRNNCTYLPDEEVLPKNSLLYQEYEVRNELKNVTVNGERLSPDIQNHIVDELFNKEPSVTHKKLIKYLYDNQICNTTSFVISGTAKEKSFASSRKSYIDFTQKVGTPITPKNQQAIEEIIKWITLFEDKKILAKKLQKYSDIFNESQLRTILKLNYSGWGRLSSKLLDGITAHTRYGEMTVIETMRRCSDNFMQIIQSDQYEFKKIIDDILSLDQRTEITYDDIKNLAGSPGIKRALWRSVRIIDEIVDIIGYEPKLISIEMARNEDEKVRTKSRYGQLEKMYKDLYGKAYTKSDIKSQLAEYKDKLDKKKYYLYFLQNGKCAYTGDPLDIENDLRDSEIDHILPRSLTKDDSLDNTVLVLRKENQRKLDDYPIAPDIQNHMRPIWTSLKNAKLMSQLKFQRLTSQKQLSEDRVAGFVNRQLVETRQITKHLARMLTEKYHDSATEVFTIRAGMSSEYRRIHDLPKCREVNDLHHAKDAYLAAVLAQYIKIRYPKLDKTFVYGEYMKFKSKKQTNTDRSSFILASMSYDLTNTETGEIIWQSRITHDVIDRTMKYNDCLITKKTEIGDNQFYDQTIYGKNSGATMITRKANLPVDKYGGYSGRKAAYFMAIRYLKQVRNKDVFVNEIISVPTQIYTLEKTKPGSINEYLRNNYRQATILLSKIPINQKIEYDSNEQFVVGSSEVTNAKQLKLPYDIEYAAAIALKQGIPRITISEEQAEKDNNLRNKRAKQIERRDRVMSGVEKFWEIYTDKLTNQYQQFGSAVEKAKAANSDYQAMSVEDKIKVIRLVLVTTHAGSGRVDMKKSFPKLGLPDGFGRMKDKNLNPTKLTFVYESITGLHYRKLDGKLLEQDQ

SEQ ID NO: 8367 - protein, 1094 aa, unidentified
  REGION 1..1094: note = Description of Unknown: Cas Enzyme sequence
GGGTGGGAAPAGRCLTLPELGRVLCHINQKRGYRHVKSDAAAIVGDEGEKKKDSNSAYLAGIRANDEKLQDEHKTVGQYFAEQLRRSQSESPTGGISYRIKDQIFSRQRYIDEYDQIMAAQRVYYPDILTDAFIRMLRDEVIFMQRPLKSCKHLVSLCEFEKQEKVMRVQQDDGKGGRQLVERRVKFGPKVAPKSSPLFQLCRIYEAVNNIRLTRPDGSPRDITPEERAKIVAHLQSSASLSFAALKKLLKEKVLIADQLTTKSGLKGDSTRVALAAALQPYPQYHHLLDMELETRMMTVQLTDEETGEVTEREVAVVTDSYVRQPLYRLWHMLYSIEERDAMRRALITQLGMTEEDLDGGLLDQLYRLDFVKPGYGNKSAKFICKLLPQLQQGLGYSEACAAVGYRHSNSPTSEEITERTLLEKIPLLQRNELRQPLVEKILNQMINLVNALKAEYGIDKVRVELARELKMSREERERMTIQNDKRKEANDEVAEKIQKSGLYPTKSRIRKYRLWVEAGRQCLYCGQSIEEEQCLREGGMEVEHIIPKSVLYDDSYGNKTCACRRCNKEKGNRTALEYIRAKGWEAEYMERINGLLNEKKISYSKHQRLRWLKEDIPSDFLERQLRLTQYISRQAMAILQQGIRRVSASEGGVTARLRSLWGYDDILHTLNLDRYDSMGETERVSREGETTEKLCIKDWSKRKDHRHHAIDALVVASTRQGYIQRLNRVSSESEREAMSGEIEVQKATKTDKLSLLERWLTQRPHLSVRTVSDKVAEILISYRPGKRVVTRGRNIYRKKTADGREVTCVQRGVLVPRGELMEASLYGKILSQGRERIVKRYPLHALKGEVVDPRLRELIAEYNQEITSKVKAKGAPLYLDAAEKQEVRSVRCYVTQPSVAKAIPIRFDERGRAITFVQSGSNHHLAIYRTPKGELVESIVSFWDAVNRARYGLPLIIKYPRKAMEQVIQREDIPESVLSLLPPADYEFVEVFQQNEMVVVGLPEEELRRAVDMQDYRTLSEHLYRLKGISSNDYEFYYHLDADETDSSKKKKKKVRNTSGRMPRIYRIRGIGSLQKKNVHKVCVDLLGRISLL

SEQ ID NO: 8368 - protein, 1343 aa, unidentified
  REGION 1..1343: note = Description of Unknown: Cas Enzyme sequence
MNQDYFLGLDMGTGSLGWAVTNDKYEVLRNHGKSLWGVRLFENANTAEERRSFRTARRRLDRRNWRLGVLQELFAEEISKIDQGFYLRMKESKYYPEDKRDLEGKCPEFPYALFVDADFTDKDYHKQFPTIYHLRKMLMETEETPDIRLIYLAFHHMMKHRGHFLFSGNINEIKEFKAVFLQLIENIKAEELDFELPIEEECLFVEEVLKDRDSTKNSKKTKLWKKLGAKSACEKGILNLIVGGKVKLSDIFGNGDLDECEKPAISFADNGYDDYIGVVEAELGELYYIIESAKAVYDWAMLADILKDSQSISEAKVKIYEKHKEDLAYLKEIVKKYLSKEEYNKVFVDTDARSCNYCAYVGMAKKNGKKVDLQGKQCNREEFYDFLKKNVLGKLKDLGAEEAEYLEGEINKDTFLPKQVNKDNGVIPYQVHQYELEKIIENLADRIPLLRENGEKIKQLFAFHIPYYVGPLNKNGDAEYNKFSWAVRKSDEKVYPWNFSEVIDVEESAEKFIRRMTNKCTYLYGEDVLPKDSLLYSKFMVLNELNNLRLNGEKISVELKQKIYEEVFQRYRKVTRKKLKNYLIREGITGKNVEISGIDGDFKASLTAYHDFKEKLTGAELSQKDKEGIISDIVLFGDDKKLLKKRIDKRFSNLTDKQKKSICTMSYKGWGRLSKKFLEEIVAPAPETGEVWNIITALWETNDNLMQLLSREYSYVEAIEEFNCGKKAVELSYKTVEELYASPAVKRQIWQTLKVVKEIEKVMGGKPKRVFVEMAREKQESKRTESRKKQLQDLYKVCKNEERDWLAELGNYEDHQLRSDKLYLYYTQKGRCMYSGEVIPIEELWDNTKYDIDHIYPQSKTMDDSLNNRVLVKKVYNANKSDTYPIAKEIREARGSFWRALLDGGFITKEKYSRLVRKEEFTANELAGFIERQIVETRQGTKAVAEILKQALPETEIVYVKAKTVSQFRQMYQKDPVFIKVREMNDLHHAKDAYLNIVVGNTYYVKFTKNAVWFVKENPGRTYNLEKMFTGKYDVERNGEIAWETGGQGTIATVKKQMSKNNILVSRKAYEVKGGLFDQQILKKGKGQIAIKGSDDRLSNIEKYGGYNKATDAYFMLVKSKDKKGNEMRTIEFVPLYLKNMIEQSEDVAIAYFRQERALKEPEILIKKIKTDTLFKIDGFKMWLSGRTGSQLIFKNANQLLLSAEDSQTLKKIIKFNLRRKENKNAGITEKDGINENILLQLYDTFLWKLQNAIYGIRLSAQIKTLEEKRDIFLKLTLEEKSLVLYEILHMFQCQSCSANLKAIGGPSSAGILVMNYNITKCNQISIINQSPTGIYEQEIDLL

SEQ ID NO: 8369 - protein, 1070 aa, unidentified
  REGION 1..1070: note = Description of Unknown: Cas Enzyme sequence
FESEYNISLDEEVVCQLFLSYFQKMFFIDESLFMKCVKKDSYVEKSYHLLSDFIDQISVKYQIEIENKDNLIWHLHNTAHLYRQELSTEFILFDQKGNTIRNFQNIFPKFVSDVKKEGKTLSESKVELFEKHKTDLTKLKALVKNDSKLSEEKRDELYRIIFKEDDDKGTNYVNYIKDSKEGKGCSYEEFKKFLVKELAKLEESEEKNEILKELELETFLPLQRTKDNSVVPYQIHREELIKILENAEKYYSFLKEKDESGYTVKEKIIKLLEFRIPYYVGPLNSHKKANEGGYAWSVRNKGEENTPVTPWNYSKVIDESASAEKFITNLTNKCTYLKGEEVLPKHSLLYSEFALLNELNALRYDGNRISIEARNAIIEKLFKEQGKKVTKKSIKELLKAEGYINGKGEITGIDITVKNDLKSYRDFKKILGDKFNTEHVENIILWITLYGESRKLIKAKIEAIYGDKYTKEEIAKMSRLPYKDWGRFSRKLLTEIVSEKLFNEETGECLNIINAMRNNNILFMELLADRFDYMKQIEDFNKTLQKEVTEITPEILEDLYVSPAVKRSIWQTIRIVEELKKIIGCAPSKIFVETTRSNTADKKPTDSRKKQLEVVYKNIKDKEIQELEKEINSTIDFSIKKDRLIAVEPSKLKAKKLYLYYTQLGRCMYSGESIDINELFDNNKYDIDHIYPQSKVKDDSFTNTVLVKKENNAEKTDKYPLGQDIQTKENKRFWKFLKEKKLITEEKYNRLVRTEEFSDEELSGFIARQLVETSQSVKAVASVLGELNPETAICYSKAENVSAFRQNFGKIKDGNRKSKNTGQLIKVREINDYHHAKDAYLNVVVGNVFDVRFTRNAYNFIKDKKDGRKYSLNNMFYTDVRNSNTIAWEMDKTVHQVDKVMNNNNILVTRRIAEKKGELYNATRHKAKKVKKAKGIGYVPFKSSDNVLKNIFDYGGFNSVNIAYFSIVRYLLINKKGEINIIKIIPIPIYIENSLQSKEDLFNYIKKQVDDTENGKVKNIEIIYEKLREKTLLRLNNFKYISGGKSGSRIYCDSALQILLPEEPEKYIKT

SEQ ID NO: 8370 - protein, 1155 aa, unidentified
  REGION 1..1155: note = Description of Unknown: Cas Enzyme sequence
MAVTLPKDDVRYKVGIDVGLNSIGFCAVEVDDDDQPIRLLNSLVFRHDAGVDPSAQKSSLTRKKISGVARRNRRANRETKKRLVALDRLLSEELGWPLPNLESYPDPHEPWHARAWLLEGYIADDVKRKEMLSIAMRHIARHRGWRNPYMKPASLASLPYPSEFLTKLNQDVSRVIGKEFAAEATQGQLVDAFILGSSSLATTPALQVLEESEKNSGENNLRDIILGKVRGDKGVIGGKLHQSDNAEEIRRICSAQKISQEQVQRLIEAVFKAKNPREVGAAYKLIGHDELPGQEKYIRAERAHPAFQKFNIVATLANLRIDEAGSKRRLSSKELQTLTNYLSNVGTKDEITWFDVAEKLKIERSDLQGTARASYDGQAALKYPPIDVTSVSIKKSKVKALKDWWKQALEDQRGQLIDYLSNSGGSDTPQTDDELDALTKLIQNFNEKDLEELEKISLPAGRAAYSLNSLTKLTELMLEEGIDLHEARKRLFNIGDDWKPTPEPINSPVGNPAVDRVLKQVARWIDMSTERWGIPVSVNIEHVRGGLTSNKVAKKIIKENQARREKKDKVREKLAKQPGLSGGAKDNLIKKQFAIQRQNSQCLYCGTKLEFEEAEMDHIVPRTNGGSNNRRTNLAAVCKDCNLSKSNTPFAIWVSSDKVGPKVSWEGVKERVNSLLLEKANLPGDYDDDSLIEFYSKNESKKFRKEIIARLESKKPEEEFDGRSLESVAWMAVELHGRVLGYYESLLKNTGREVPRVGVYRGAITAEARKASGFENRVRLLGWEGKTRLDRRHHAMDALFIALMNQSVSKLLSWRMQLRDSQRISGMQETWKEFHGSDRDDNRHWEAWAKAMRIAVELFNNALEKDEVHFSENKRLGISLAKTHDDTIKSLCSYALGGAFSVELIDRAETPALWTVLTKQPDFDVKNGLPADSTRHITVNGKHFGPTDKVNFFTSDAPAIKVRGGFAGIGDTIHHARIYRIDGKKTTYAMVRVFQTDLRRMKHKDLFTEPLKPSTISMRTASKTIRKALADGSATQIGWLVEGDEIRIKTDRYTSFTIGKLLKKYPEASSWRVCGFPTPSKVRLKPNLISKEGLNEKYFDSDTLEAGRKIIDHPGWIVEINTLLEKGMVTVIRRNTLGEERWVSRAHLPVSVNLS

SEQ ID NO: 8371 - protein, 1065 aa, unidentified
  REGION 1..1065: note = Description of Unknown: Cas Enzyme sequence
FASDNDWDSIAGELNENAEIFYSMKNIYSWIIVESFLDYEDNLGEKEDKTISKAFIMKYDKYHEDLVKLKNVYKKYLDIIQYDKMFRKYEADNYYSYNGKLSEIEKSKKCSNEELCKRIKKDLKRFENEADVLEIFNDISNENYLIKLNTRDNGEIPYQLHEKELKKILENQSKYYNNIKENKDKILSLLTFRIPYYVGPLSTNSKWAWMQTKRDESIRPWNFDEIVDKDATAEEFIKRMTNKCTYLINEDVIPKESLLYSKYKVLNEINGIKINSNQISKDVKIRILELFHQNGYVHKKDIEAIYNQDGIKIETIEGLNANNGKLNSNMQSYKNFSKIIGNVEENNEMIEELIYWITIFEDKSILKRKIEQKYSDKINKEQINKIIKLKYSGWSRLSKKLLIGLKSKENNETIMDKLINTNMNFKQIITSDKFGFKEQLEEELKKTLGKKQGNITYDDISEIQTSPANKKGIWQAILVVKEIINILKHEPENIYIEFARSDETKGVMTKKKLEKIEQQYKEISDFAKNNKRLLEELNKVKNQTKNINERLYLYFKQMGKCMYTGNRLDIESLSLYQIDHIIPESYIKDDSIDNKVLVLSKENQRKLDDLTLKDEIIDKMKDLWNYLERNKLISESKYKRLIRKNMFSNDDEKIKFISRQLVETRQITKYVRGLLETAYPNINIFGLKAYITNLFRKKYKIYKIRNLNDCHHAQDAYIMCLVGGVFKKAKLFEYEEIKKFLKFEKNKSVEEKNKDLKEKYGIIIRILNKYINEYEINKKFEYKDYLISKKIEEQTGTFYNQNAIKKANIKDCKLSLKENKNPLKYGGYSSEKQAYYTIYEYKDKKGKDEYRMQGIPIKYAYDIKKGKLLLEEYLKNKCNENQEEFIRILKSKIFKHQIFLDENNELQQIVNDSEYRNMKQLFLSKKEIIDLYSILNEKNREELDEEKIQTIAVESYKIILNKMINEFKGIDDIEEKGILNNGKFEALDIEEKIKTLDNLLTCISKSYVNLANIGLGTEESRKILNKPFGKKHLDNMTFIDQSVTGFYERRYRVDELANNNSQKTM

SEQ ID NO: 8372 - protein, 1282 aa, unidentified
  REGION 1..1282: note = Description of Unknown: Cas Enzyme sequence
MENKVWYLGLDIGTASVGWAVTDTEYKIIRKNKKRLWGVRLFEEATTAQERRTYRSNRRRLARRKWRLNLLEELFSEEIAKVDPNFFLKLKESKYHYEDKSHKLPFTIFNDKDYTDKDYYKEYPTIYHLRSSLMIEKEPDIRKVFLAIHHILKNRGHFLLQGQSFKDGNINNLIKELLELDILHHDLEVNDEIVENIKNIAIEKKNLTEKVNGLKKLFPKEKQLLEVFRVILGGKSSLDKIFAIEEYKELDVSVKSISFKEKVYEEVRHDYEQILSNYIELLDLAKLVYDSIILSDVKKEGKTLSESKVELFEKHKTDLTKLKALVKNDSKLSEEKRDELYRIIFKEDDDKGTNYVNYIKDSKEGKGCSYEEFKKFLVKELAKLEESEEKNEILKELELETFLPLQRTKDNSVVPYQIHREELIKILENAEKYYSFLKEKDESGYTVKEKIIKLLEFRIPYYVGPLNSHKKANEGGYAWSVRNKGEEKTPVTPWNYSKVIDETASAEKFITNLTNKCTYLKGEEVLPKHSLLYSEFALLNELNALRYDGNRISVEARNTIIEKLFKEQGKKVTKKSIKELLKAEGYINGKGEITGIDITVKNDLKSYRDFKKILGDKFNTEHVENIILWITLYGESRKLIKAKIEAIYGDKYTKEEIAKMSRLPYKDWGRFSRKLLTEIVSEKLFNEETGECLNIINAMRNNNILFMELLADRFDYMKQIEDFNKTLQKEVTEITPEILEDLYVSPAVKRSIWQTIRIVEELKKIIGCAPSKIFVETTRSNTADKKPTDSRKKQLEVVYKNIKDKEIQELEKEINSTIDFSIKKDRLIAVEPSKLKAKKLYLYYTQLGRCMYSGESIDINELFDNNKYDIDHIYPQSKVKDDSFTNTVLVKKVSNAEKTDKYPLGLDIQTKENKKFWKFLKEKKLITEEKYNRLVRTEEFSDEELSGFIARQLVETSQSVKAVATVLGELNPEIAICYSKAENVSAFRQNFGKIKEGNRKSKNTEQLIKVREINDYHHAKDAYLNVVVGNVFDVRFTRNAYNFIKDRKDGRKYSLNNMFYTDVRNSNTIAWEMDKTVHQVDKVMNNNNILVTRRIAEKKGELYNATRHKAKKVKKAKGIGYVPFKSSDNVLKNIFDYGGFNSVNIAYFSIVRYLLINKKGEINIIKIIPIPIYIENSLQSKEDLFNYIKKQVDDTENGKVKNIEIIYEKLREKTLLRLNNFKYISGGKSGSRIYCDSALQILLPEEPEKYIKTIFKFKNWKNENKNGNLWENLSKEENYKLY

SEQ ID NO: 8373 - protein, 1194 aa, unidentified
  REGION 1..1194: note = Description of Unknown: Cas Enzyme sequence
MLMSKHVLGLDLGVGSIGWCLIALDAQGDPAEILGMGSRVVPLTNLGDDKAFSKGEAFTANQKRTARRTMRRGFARYQLRRYRLRRELEKVGMLPDAALIQLPLLELWELRKRAATAGERLTLPELGRVLCHINQKRGYRHVKSDAAAIVGDEGEKKKKDSNSAYLAGIRANDEKLQAEHKTVGQYFAEQLRQNQSESPTGGISYRIKDQIFSRQRYIDEYDQIMAAQRVHYPDILTDEFIRMLRDEVIFMQRPLKSCKHLVSLCEFEKQERVMRVQQDDGKGGRQLVERRVKFGPKVAPKSSPLFQLCRIYEAVNNIRLTRPDGSPRDITPEERAKIVAHLQSSASLSFAALKKLLKEKALIADQLTTKSGLKGNSTRVALASALQPYPQYHHLLDMELETRMMTVQLTDEETGEVTEREVAVVTDSYVRQPLYRLWHILYSIEERDAMRRALITQLGMTEEDLDGGLLDQLYRLDFVKPGYGNKSAKFICKLLPQLQQGLGYSEACAAVGYRHSNSPTSEEIAERTLLEKIPLLQRNELRQPLVEKILNQMINLVNALKAEYGVDEVRVELARELKMSREERERMTRQNGERKKANDKVAEKIQKCGLFPTKSRIRKYRLWEEAGHQCLYCGRSIDEKQCLNGDDMEVEHIIPKSVLYDDSYGNKTCACRRCNKEKGNRTALEYIRAKGWEDEYMERINERLKAKKISYSKYQRLRWLKEDIPSDFLERQLRLTQYISRQAMAILQQGIRRVSVSEGGVTARLRSLWGYDDILHTLNLDRYDSMGETERVSREGETTEKLRIKDWSKRKDHRHHAIDALVVASTRQGYIQRLNRVSSESEREAMSGEIEMQKATKTDKLSLLELWLTQRPHLSVRTVSAKVAEILISYRPGRRVVTRGRNIYRKKTADGREVSCVQRGVLVPRGELMEASLYGRIISQGRERIVKRYPLHDLKGEVVDPRLRELITTYNQELKSREKGAPIPPLCLDKDKRQEVRSVRCYVDKPSVSSAIPIRFDERGTAITFVQSGNNHHLAVYRTPLGVLEESIVSFWDAVDRARYGIPLVITHPREVMEQVLQRGDIPESVLKSLPPSDWMFVESLQQDEMVAIGLSDEELQSAIEAQDYRKLSEHLYRVQSLSSKYYVFRYHLETSVKDRKNTSGRIPKFHRVRNLPDYEKRNVRKVRVDLLGRISLL

SEQ ID NO: 8374 - protein, 935 aa, unidentified
  REGION 1..935: note = Description of Unknown: Cas Enzyme sequence
NLYEIRVRGLSNKLSPDELIAAIIQLAKHRGIFYLSPEDLATEDGSNQSSADIIRTNENKLKDGIYPCHVQLEKLNTTGKVRGIENKFTHGSYRSELIKLLEVQSSFYPKLKGIMDEVLCIYDSKREYYEGPGSYKSPTPYGSYQLDESGNVIKINLIDKMRGTCTYFPDELRAPKWSYSACLFNLLNDLNNLTIQGVKITEVQKQELISEYVNKGKSVTIPAIAKVCSAKKEDIFGFRIDKSEKPIFTKFEGYNELLKIAKSVNEEDAIEGKKLLVDDISEILTKEKSIDVRERKLVDDLNLSTSLAKEIAKSGGFTTYHSLSFKAINLILDDLLKTSKNQMELFTEAGIKPYNHKFSQNYQLSANLSDWIVSPVVKRSINETIKVFNALRKYLKTQNGDDTEFSDVVVELAREKNSQEKKDLIKKIQKANEEKRYKIMELVKNRKLTSAEFERINLLLEQDFKCAYSLAPIELSDVFKAGLLEVDHIIPLSISLSDAQSNKVLVYQGENQAKGQRSPFQYFSSGKAKITFERFKEYVTKSLNFSNAKKRNLLYLGNPVEDMKGFIDRNLVDTRYASRETYNLLKSFFDYHNINTKVKVINGSATSYFRKKAYLSKNREETYAHHAQDAMIIAGFANTKLMKFFSKIGAFSESLNNKDSIVEVDGNIINSETGEVLEQELFDKSENVSNYIQFLKRIESIEPLYSHKVDRKPNRALYDQQIKATRSFVEDNKEVTYIITKYNDIYNTGTGNSGSKLKKMILESPDKLLMYHHDYKTFEIFLKIVEQYVEESNPFAAYKEDHGPIRKYSKKGNGPIIESVKFREKQLGSHRVNTKQQGNNKSVFLKIKSWSKEFILAGMAVLDRESLQEGLTKLKMRNLWGLWQERERKKKRFVNLKCEFLILKRQSKLLKKRLKLYWSTWKNCRRNIKNFPVFL

SEQ ID NO: 8375 - protein, 1190 aa, unidentified
  REGION 1..1190: note = Description of Unknown: Cas Enzyme sequence
MGKKVLGLDLGVGSIGWCLITLDKDEKPQSILGMGSRIVPLSADDATEFTQGKAITKNKMRTVARTIRKGMDRYQLRREALKKVLREHGMLPDEALIKLPLLELWELRARAATPGEQLSLTELGRVLLHINQKRGYKHAKADEAAEAETESKAKKEKESYVAQVKGRYQALKEKGQTIGQHFAGELRANQQTAPRGTYYTYRIKKQVYPREAYIEEYDRIMAAQRVFYPELLTDALIGRIRDRIIFYQRPLKSCKQLVSFCEFEKKEKVIRVKHTNKEGVQELVEKTITIGPKVAPKSSPIFQVCKVWESIHNIRLYHPDGTERKFEQEEKQKLFDYLQKNDKLTLKNLYKTLGIKDKDEEEELWCDKLLEKGIAGNTTAAILRKALKGYEQYEGLLSFNLTTRDSHEVDKDGVIRPIIDESYQNEPLYKLWHILYSIEDRAEMRSALIGQLGIKAEDLDNGLMDALYKIDFVKQGYGNKSAKFICKLLPHLQEGKMYSEAAEAAGIRHSDSMTAQERDERSLLDEIPLLQKNALRQPVVEKILNQMINLVNALKREHGEIDEVRVELARELKMSREEREKTTKNNSSREKENKAIAEKIKEYSITPTKSRIQKYRLWQESAESCIYCGRRVDVVQFLRGEETEVEHIIPRSILFDDSMSNKVCACRSCNQEKGNRFAMEYIQSKGWEQDYIERVDSLFQGKTISYSKRQRLLMLPKDLPEDFIERHLRLSQYIAREAQGILRKGIRLVSASEGGVTAKLRQLWGYDNILRDLNLDRYRSMGETEVVTVEHRDGQRTDERIKDWSKRKDHRHHAIDALVVACTRQSYIQRLNRVNAEADRQEMDAFIKEQQQVHKLSKKEKLSLLEHWLIRQPHFTTKEVMKHVEEILISFRPGKRTVTRGRNVYKRSGKTDVQRDVLIPRGALSEETIYGVISVDGENKVVCKYPLQGLKAKDVDYIVDKALQEVVRERISQYGEKQAFAEPLYLDEAKTQEVRSVRCFTGKDQSKLVPLRYNVEGEAVGFVAPGNNHHLALYKDDDGNVVESIVTFWQAVERARYGLPIVVVNPREVMEKALAIPELPESVLKALPASNLRLMEVLRMNDMFLIGMKNGEIQAAIEGEDYPTLSRHLYRVQKLATHDYVFRYHLETTLDGKDNVGEIPKSYRAQSLKAYVKLNPRKVKIDLLGRVSLV

SEQ ID NO: 8376 - protein, 1422 aa, unidentified
  REGION 1..1422: note = Description of Unknown: Cas Enzyme sequence
MTQKILGLDLGTNSIGSSVRNLDLSDDLKGQLEFFSSDIFRSSVDKGSNGREYSLSAQRSAHRRSRGLNEARRRKLWATLDLLIKHGFCPMSPNSLIKWRTYDKHKGFSREYPIDDKVFNAWILLDFDGDGKPDYSSPFQLRRELVTRQFDFDQPIERYKLGRALYHIAQHRGFKSSKGETLSQQETDSKKPSTNEFNDVAGEMKASEEKLSKGLTTYMKENNLLTVGAAFAQLEDEGVRVRNNNDYRAIRSQFQQEIETIFKFQQGLSVKKELYERLVSEKKNIGTIFYKRPLRSQRGNVGKCTLERTKPRCAVGHPLFEKFRAWTLINNIKVRMPESEKAEQLPMKLRMELYCDCFLAFVRTDFKFEDIRKYLEKRLGVHFSYNDKTINYKDSTSIAGCPITARFRKILGEDWESFRMDGKKQRQAHGKNNITYHKVSYTIDDIWHFCYDAEEPELVLSFAQDTLNWEKKKAEELVRVWSAIPQGYAMLSQKAIRNINKMLMLGLKYSDAVLLAKVPELLDISDEEILSITEDYHLLESKIGYEKRINGIVNSLIAKYKSAPEEDRFADHDYEYILDENDEKDIIKQIESNLGERTWCLMDANEQTEILQQVRDKYQNFFRSYERKFVESPKLGCYLKDYLIEKFPMVDEKQWEKLYHPSQIAIYHPIPTGRDHSDLRLGNPDIGAIKNPTVLKALNTLRKRVNQLLDEGIISPDETRVVVETARELNDANRKWALDTYNRIREDENKKIKNILAEFYPNRKDISAVDVDKARYVIDQRKEDYFIGAKTYNKDIKKYKLWLEQGGQCMYTGRTINLSNLFDPNAFDIEHTIPESLCFDSSDTNQTLCDAHYNRFIKKNHIPADMPNYDKAVIIDGKEYPAITSLLQRWVDRVERLIRNVEYWKGQARRAQNKDRKDQCMREMHLWSMELEYWKKKLERFTITEVTDGFKNSQLVDTRVITRHAVLYLKSIFPHVEVQRGDITAKFRKILGIQSVDEKKDRSLHSHHAIDATTLTIIPSSAKKERMLELFAKIEEINKMLSFSGNEERTGLKQELDGLKIQLNKEVKACRVGHNVSEIGTFINENIIVNHHVKNQALTPVRRRLRKNGQVVGGVNNPRWQTGDALRGEIHKASYYGAITQYKKDNDGKVQIEEGHLQINPEIKFVIRKELKFKKSAVDSGFASWEDFEKAIVDKDLFALMKGQFPEGTSFKDACEQGIYMIKKGKKGEADKKLYKIRHIRCYAHVKNALKIKEQTYKSEKEYKRYFYAAVGDLYTMCCYTGSKSRDFRIYSLYDVSCHRKSGIEDIPEFIADKKGNRLKLDYKLNVGDMILLYKDNPEELFDLDNVNLNKLLYKIIGFENDGLRVKMVNHLLANEVKGESVKDYTNLPDVIRCGVKTIKFLIMGENRDFVIKNGKINFNHR

SEQ ID NO: 8377 - protein, 1391 aa, unidentified
  REGION 1..1391: note = Description of Unknown: Cas Enzyme sequence
MKRILGLDLGTTSIGWAFVNESEKDDENSSIIKTGVRVVPLTTDEEDDFKKGNSITINADRTLKRGARRNKFRYQIRRKNLINELKKINFINDKTQLAETGKNTTHELLSLRSMAVEKKLSKTEFARVLLSINKKRGYKSSRKANSSEEGELIDAMDITKILYKQNLTPGEYSYQLLKNGKKSLPDFYRSDLENEFDKVWNKQKVYHPEILTDSFYKKIKGKGKKNTSSLFWATYKFNTAEVKDIEDNIKNEKTIKLSKNEKKKLQAFKWRSDAISKKLDKDIVAFVVSEINNDIHKSSGYLSEISDRSKELHFNNFTVGQYLYNQISKNPNTSLKNQVFYRQDYLNEFNKIWDKQAEFYPELTKKLKYIIQNEIIFYQRRLKSQKGLISYCEFESWEQDVIIDGENKRKIVGHRVVPKSSPLFQEFKVWQNLNSIRITHIKTNEVYHVEEDSNTELFQKLNWTDKLTGKDILKELGLKPQDWKINFQRIEGNRTNNSLLDAYKEILKIEGYDNINLKKIDDYELIKILKQCFDEIGIDKQIFEFNATLSGKDFTKQKSYELWHLLYSYEDDFSRTGTESLEEKLKSNFGFKDEHLPYLINMPFQDDYGNLSARAIRKIMPYLQEGRIYPDACELAGYNHSNSLTTKQNEERTLKPKVEILKKNSLRNPVVEKILNQCINLVNAIIEDPQMGRPDEIRIELARELKNTQEQRDKMTKAIGKATKEHEKYREEIKAKFGLPHVSRNDLIKYKLYMELESNGYRTLYTNEYIKPEDLFSKKYDIEHIIPKSRLFDDSFSNKTLETRESNLDKGDETALDFVERKFGKEGLENYRNRVEELYKSGKIKGSKHVKLLMSLKDIPEDFLNRDLGTSAYIAKKASEILLDVTKSVSLTSGKITSKLREDWGLIQVLQELNWDKYEKVGLTYYKTNKDGKKLPRIKDWTKRNDHRHHAMDAITIAFTKPGMIQNLNNLNAKTNKEIFKLENKYTYKDERGKRKFIAPFANIREVSKEHLSQILISHKAKNKVTTKNKNKINVKGKNKFKYQTVETPRGQLHKETVYGKSKYYETKLEKVGGKFDKEHIYLVANQSYRNALLKRLEVFGNNPKKAFTGKNSLNKNPIYLNGTQETVPDKVKLVWLENRFTIRKEVTPDLKIDKVVDEGVKKALQKRLNDYNNKHKEAFTDLNKNPIWLNEEKGIKIKRVKITGVSSAEPLHHSKNHFGDENLNCDGNPIPTDYVSTGNNHHVAIYKDEKGNLQEEVVSFYEAVARKNAGFSIINKEHENGWKFLFTMKQNEMFVFPNEEKGFNPNKIDLSNPNNKALISENLFRVQKIATKNYMFCNHLHTMAITGDDLKNKKMLSGFIYHFIQTPDKLNNIVKVRLNHLGDIVQVGEN

SEQ ID NO: 8378 - protein, 1197 aa, unidentified
  REGION 1..1197: note = Description of Unknown: Cas Enzyme sequence
MSRKILGLDLGTNSIGWALIEQNFESKENRIIDLKSGKIIDLGSRIIPMSQDVLGNFDKGVSHSQTSERTSFRGVRRLRERHLLRRERLHRVLNILGFLPKHYSEQIDFEKRLGQFLVNSEPKLVYDNSNNFIFKKSFEEMLSDFAQYQPKLLINQKGESALVPYDWTIYYLRKKALTRRIEKEELAWLLLNFNQKRGYYQLRGEEEEANSNKLTEYYSLAVIDVVPDEPQKGKDEIWYNVILKNGWVYKRKSKISLSDWKGKTKEFVVTTNLNDDKTVKLKKDGTEDRSFRSPSEEDWTLVKTKTEQTIEKSGKMVGQYIYDLLLLNPKQKINGKLVRVIERKFYKEELKQILETQQKFHPELNDKELYNKCLGELYENNEAHKGNILSRDFAYLFLNDIIFYQRPLKSKKSLISECKYESRSYLLEGVKKTEPLKCIAKSHPLFQEFRLWQWIQNLNVFEKEKDTPIINDFLRNEDDFIKLFEFLNKRKEVDQKAILKHFNITEKTHRWNFVEDKSYPCNETRSQILIRLAKCENVPEGFLSKEKEEALWHILYSVNDKLELPKALESFAKKNNLGSDFTEQFKKFPPFKNEYGSYSAKAIKKLLPLMRMGKYWNEDAIHQQTKERINKILDGEYDVRIKDRVREKTINLKEINNFKGLPIWLTSYIVYNRHSEEGNIQKWKTADDLSNFLNPKMEGSFKQHSLRNPIVEQVITETLRVVKDIWVRFGNGTENYFDEIHIELGREMKNPADKRKSMTVKNTENENTNLRIKALLAELMNDSRVENVRPYSPSQQEILKIYEEGVLNSSIEVPEDISKISNTAQPSQNDLIRYKLWLEQKYRSPYTGAMIPLNKLFTPQYEIEHIIPQSRYFDDSFSNKVICEIEVNKDKDNQTSFEYIQNKKGSKIELSGGKFITLFNEVQYEDFVKTYYAKSYGKMKKLLMLDLPEKMIERQMNDTRYISKEVKNLLSKIVRQEKNDEGTTSNNVLSSNGQITNSLKTDWGLNDIWNEIIASRFERLNQMSGNDGKFGEVNINTNKFLPTVPLNLQKGFSKKRIDHRHHAMDALVIACLTRNHINYLNNQNAIEKGKNKEQKQKSREDLRFLLCDKKYNGGSGSSYKWTFKKPWPDFTKDSKDVLEKTIISFKQNLRVINKTVNKYQKWEMKNGKREKVLVTQTKGDSWAIRKPMHTPMPYGKK

SEQ ID NO: 8379 - protein, 1216 aa, unidentified
  REGION 1..1216: note = Description of Unknown: Cas Enzyme sequence
MKGKKILGLDLGTNSIGWAMVEEGDNNGNILGLGSRIVPMDSQMLLDFEKGKPTTKNVTRRQARGARRLLQRYKSRRNRLVQTLQQLGWIPTLQSTKEMHDFLSISPSRPGFILTQYELYELRDRALREIISVEELARILFHFNQRRGFLSNRKVKDADEEAANAAEQAAEEGEESVKGSVKTYETVEIVSVEEDNTGKKTMYQFTLADGRRGAAYQLIPFSKGQEVELLITEKNTKKWGQSFFFQLPKKMDWSYRKHHINQLIDQSGLTLGQFYYQELKRDPHFRTKDNIILRDKYVNEFNAIWDRQLALRTKVGREGEMVRDNTLKSIAELLYKNNQERQHVLLKKGLKYVFGEDIIFYQRPLKSQKDSISNCRFEPEKKVIPASHPLYQEFRILDKVNNLRVYTMKDDDATKDFMTESIRESIIEKLNLQKSVSPKVLKSLLIPKGKDSQYYLSENNEKRPLRGNDTLIDIANALDGDDMRSTILSDATKTEAIWHILYSLDKTKDVLHALMRPKNGFGIGETASKKLAAISYTSTYGAMSSRAIKKLLPLMRNGKDWSAEAINKHESIRERIEKILNGEVEDTISNRIREFVVAQGIVDITGFQGLPYWAAAYLVYGSHTQSASNIKWDDPKDIELLPKNYLRNPIVQQVVNETLQLVGDIWKKYGKIDEIRIELARELKNSAKERESISEAQLSNRALNDGIKKKLQELGQPITDSDKYRLWLDGLDRESIDKKEIDNYLKYLISDSKWKPAAADITKYKLWEEQLHLSPYTGKPIPLSALFGEQYQIDHIIPRQRFYDDSLSNKVVVESHVNKDKGTPGRNYTAWEYITNGPAVSGIIILGEDQYVDLINRIFRGGKRKKLLLKEIPADFVERQLKDTQYITKAVREELAKIVRMENVHTTTGGVTDHLREQWGIAHLFKELLLPRFESLEKKLNEKNEKEDKPNIKLVEKVFDENLKKHLLKLDGYSKRLDHRHHAADALVIACTKPAHIKRLNDLNKAYQNLKKEAKDAIQQGMQIKRRGGSWAFEKPWETFVEDARHELETCIVSIKNRNRLLTKGVNKHFVRDASTGKKIEVTQTKGNILSARGALHNPQPYGETRLVEKQPLPIVIKRYAQWLKEGKEDEAIRKNFKHQWQFKAIRNLFRDNSNDVKKVNSALKNTPLVKKDVLVEEFSMYAVRYVKRTGLSALTPSKMEAIANETLRREVKAHV

SEQ ID NO: 8380 - protein, 1187 aa, unidentified
  REGION 1..1187: note = Description of Unknown: Cas Enzyme sequence
MKNILGLDLGTNSIGWALIEQDFENKHGKILGMGSRIIPMSQDILGDFGKGNSVSQTAERTGYRSVRRLRERHLLRRERLHRVLNIIGFLPEHYATEIDFEKRQGKFKQEKEPKLAYQSFYNETSQKWRFEFVFKKSFEEMMADFRKHQPEILINKKGEPALVPYDWTIYYLRKKALSQKIEKEELAWILLNFNQKRGYYQLRDDDEEEENPNKLIEFHSLKVVDVIANEAQKGKTDIWYSLILENSWVYRRSSKMPLYDWKDKVYDFIVTTDLNDDGSVKTDKEGKEKRSFRAPGEEDWILLKKKTEQEIGQSKKTVGAYIYDTLLKNPKQKIKGKLIRTIERKFYKEELRGILKKQEEFHPELLSKDVYIDCIRELYQHNEAHQLQLSKKDITNLFIEDIIFYQRPLRSQKSSISNCTLEFRKYKDPVGIEHTQHLKAVPKSNPTYQEFRIWQWMYNLSIYKKEEDSNVTADFLNNTEDWEKLFEFLVKRKEVEQKPLLKYLLEQTGLKGKMLNAELEKYRRNYVEDKNYPCNETGTMIRTRLEKVKALPEGFHTREIELQLWHIIYSVTDKKEYESALKSFATKHKLDEETFIQGFMKFPPFKSEYGSFSEKAIKKLLPLMRTGKYWSWDAIDEKTKIKINNIINAVEDEEIKSIIRDKAEKHQLETEIDFQGLQLWLAQYIVYGRHSEAADLGKWNSVDDLEQYLKDFKQHSLRNPIVEQVITETLRVVKDIWNQYGNGSKDFFDEIHVELGKEMKNTKGERERLSKTISENENTNLRIKALIMELKDNTDGKLSVGNVRPYSPYQQEALKIYEEYVLNNEERYDTSRNEFVFDPIPDDILKISKTAQPSKSELMRYKLWLEQKYRSPYTGAMIPLSRLFTEDYQIEHIIPQSRYFDDSLSNKVICESAVNDLKDNQIGLAFINKHHGEKVPLGFGKVATIFEVTAYEEFVKHHYSKNRSKRNKLLLDEVPEKMIERQLNDTRYISKYISGLLSNIVRSESNDDGVNSKNVIPGNGKITNELKKDWGLNDVWNDLILPRFERMNQLTNSTSFTTWNENYQKFLPTVPLESSKGFSKKRIDHRHHALDALVIACATRDHINLLNNQSAKSETKRIDLQHKLRHKQPYFNEKENRQKDAFKEFYKPWESFTQDAKNALENIVVSFKQNLRVINKATNYYEKWKDK

SEQ ID NO: 8381 - protein, 1397 aa, unidentified
  REGION 1..1397: note = Description of Unknown: Cas Enzyme sequence
MKNIIGLDLGTTSVGWAFVKEAENSNEVSSIEKIGVRVNPLSTDEQSDFEKGKSISINADRTLKRGARRNLERYKQRRENLVAVLTEIKFIDSSTSLTEEDKNSTHATYKLRAKAATEQIDKTNFARVLLMINKKRGYKSSRKAKSEDEGQAIDGMAIAKILYEENLTPGQYSYSLLRVGKKHLPDYYRSDLQAEFEQVWRLQSLFYPQYLTEQFKKEITGKGQKATSAIFGKIYEFYPAENKGTREEKKLQAYEWRTKALSQQLDIKEVAFVFAEINNNLNNSSGYLGAISDRSKELFFKHETIGQYLYEQLQNNPHARLKNQVFYRQDYLDEFEIIWETQAKFYPELNAKIKADVRDIVIFYQRRLKSQKTLINFCELESRTLEVEIDGKKQMKVRGPRVIPKSCPLFQEFKIWQNLNHVEIKNLITKEVSILTLETKEQLFEVLNIKGNIPKREALALITDKPNEYDLNFSTLEGNRTNEVLYEAFLKMMLHDNEDIEAANFSASDLKENVLAFFYKEGIDKNILDFNSEIEGKGLEKQTSYRFWHLLYSYEGDNSNTGNDKLLEKLQNCYGFKRSQALLLANITLQPDYGNLSTKAIRKVLPFMKAGHPLSGDFDGNGLISAKILAGYRDSPSLTKEENEKRELKDNLKLLPKNSLRNPVVEKILNQMVNVINAIIAEPTLGKPDEIRIELARELKKSNDERKEMTTNINAAKIDHDKFRKILNMEFGVKNPTRNDIIRYKLYEELKNNGYKDLYTNTYIPKEKLFSKEFDIEHIIPQARLFDDSFSNKTIVPRQININKNERTAYDFILADYGGEILNEYVSRVEMLSKLKDGDKFSIGKAKYKKLLMKASEIGEGFIDRDLRDSQYIAKKAKQMLLEVCRTVSSTTGSVTAKLREDWDLVNVMQELNFDKYKKLGLTELAEKKDGSFKERIIDWTKRNDHRHHAMDALTVAFTKPSHVQYLNNLNARKDENNKKHSSIYGIEQKETYKDAANKRKFNYPLPHFRAEAKKHLESTLISFKAKNKVVTKNKNITKVNGKKKIKIELTPRGQLHKETVYGKLQQYNTREEKIGTKFDESFILKVAKPAYRLAILKRLKEFNNDAKTAFSGKNSLEKNPIFIDDDKTMVVPEKVKIVWLEDDYTIRKDINPDLKIEKVIDTGIRVILQKRLTEFKDNPKEAFSNLDKFPIWLNKEKGISIKRVTISGIKNAEALHNKKDHHGKEILNSNGQPIPIDFVSSGNNHHVAIYRDEKGALQDRIVSFYEAVERVNQGLPIIDKTLNQSEGWRFLFTMKQNEFFVFLTDKFDLTEIDLTNSANNQLISPNLFRVQTLSIVKYGNNTIRDFKFRHHFETNVEDKKELKNIAYIQIKSLAPLENIIKVRINHIGQIVKVGEY

SEQ ID NO: 8382 - protein, 1083 aa, unidentified
  REGION 1..1083: note = Description of Unknown: Cas Enzyme sequence
MSETVAYGLGLDQGVASIGWAVLKLNSAGETIGIERLGAHCFEAGTEGDIEGGRDESRAGPRRMARQLRKQYRRRVLRKKRLLRWLQELGMMPAGDISSAEGRDALLKALDEELRKTWEPDGSTDHRTKQLLPYRIRAAGLTRKLEPFEIGRALYHLAQRRGYLSNRKSQSASADPSENKNPAKAKKGSVVPATENPPAAGSAGNAGDAEAGQGKEDAGVVRAAIIELQRQMEGAACKTLAEYFTKLDPAGTLGDRLRGRWTAREMFLEEFGRLCQEQSKHHPNLSDENRRKLHRAIFFQRPLQSMSHLIGSCDLVPGEKRLALGHRMAQRFRFLQKVNDLEIRLPDFTRRTLTRDERDRLIAELDRRSHIAYSVLKTKAWFGLPKGSTFNLEEGDEKKILGNRTEAKCRAIFGDDRWEAMGEPDKDAVVQDLLLFEKPKALGNRGQKIWKLAPEQAEQLGDCVLEPGFAAHSKAALTKLLIRMEEGTPYGTARKEEFQRDDASTKVYDLLPPVEKSLGMLRNPTVTRALTELRKLVNAVVRKYGKPAWIRLELARDLKRARKQRERMGKEMRVREKARDEARGEIEAMPEVARASRADIERVMLARECGWTCPYTGRAFGMQDLVGKHPQVDIEHIWPVSRSLDDSFMNKTLCFTDENRIKGNRTPYEAYARASERWDQMIDRVKKFRGDDSSRRVKLEKFLAATIPDGFAERHLAETRKIGAASAEYLGLLYGGEIDGAHKRRVFVTTGGLTAHLRREWHLNGLLSDNGEKTREDHRHHAVDALVIALTDTRAVQVLQRAAEDASAVGRRLFAPVEEPWKDFVNEAREKVEAVNVSYRQNRRFAGKLHAETNYSKSIAPPKGATGDRRIRKVLAKLSEKEIPRIVDPKVRKAVEEQIKLLGLVPKGPAKQYSDFVDVKLHPFTLTKAGGKNWIHKVRITTSENPWPVGKGPRERFVSSTKGSNHHAVISKRPNGKWTDTVVPLMELRAAPRTAKRPHGGDSFTLAAGEFVLMRSTDDKERLLRVSKLSEGQIAMISHCDARKMDEIKGAKEVVYRTGSSLVRDGATKVSVTYLGELRRAGG

SEQ ID NO: 8383 - protein, 1263 aa, unidentified
  REGION 1..1263: note = Description of Unknown: Cas Enzyme sequence
EVGLLPPTAEAFKALLEGTDPWDLRRRGLRASLAAHEFGRVLLHLAQRRGALGLHIPDPDDVEAEGGGEDGKVKAAIGQVRAKMLAAKARTFGEFMAIERDRRVTPLGGDDNRPQDARIGNREYRDAIRNKRGSYEHCADRAMIRHEFAELWREQVERAPWAKKTLTDALRLALDDESGDSTWKHKGLLFGQRRQSWDLGTLGRCVLEPTERCAPHADMHASHYRVIETVNAIKVLQWGSGERALTVEEREKVIALLRGPLGVHESGKFKGQPKRSCSVTDIRIALGLGRGGKDKWPKLNLERDEDREINTDWFSRAIVHGVIGADVWSAMRPAVKEGFNRAILRHQPEDEGDAAKLKAGGLSWGGLDEGRADALVTAWKSRPKLENRLSMSRKAVLNILSIMDRRDANGAAQPWPVEGEAGGHAWLTQIAARKLIAEDAGFSDVSTGQPLDQHARRRYATGAKGLSARDRHYLKKHPHDLPPAPMLSNPVVRKAIHEVRRHIVEYVRTFECFPDEIRVELAREAKMGAKDADRALFRNRLRARIKNDIIAELSLDRVSFNQQRAALDRVVLAVQQAQRCPLCGKGGLTPRKAAAGEDCELAHILPRSRGGHNGHGNMVLSHTKCNREMMQSTPREYWAATLKSGFDEGMKIVESIYGDIHRPKPAETKKAEGDALWSCYFDFRDDARKLDQFAKDITDIKDMTSRQGAATKYAARQVMAYLADALYGGHGLPERGGQRKIFASDGQWTSRLRREWGLFFDPHGAKAGGLDNTEEHAALEKNRGDHRHHAIDAVVIALGNEQVRNQWDSRERAAGAAISYKSSTPPEEQIDAYRRAHPIDPPAPFKDRDDLRERVAHAVFGDVKDRSGFKRPIAHRPVKRKLIGALHEGTLFGPVLDGEGKLTRNYTAKKSVLKDLAPNHLRMPRKETPKEAIERLTLRRMDAVTEITEKEAKAWARAVVESKGYEPMLIDPPPAKSGIVRDLALRERLRDCIAEAGLDPDDFKDSDVQKLAAAGKFRQASGVPIRSFVLLRTMSEPVVIARKTPEYATGKMVYDPDPASQRAYLSGNNHHIEYRASTVIKGKKRTTTWTATIVSAYEASQRKLARLRAFKAAGVPKPDVFRDGKSSKAERAKLRQRWGPVIRAIEAEHPIVDRLDNEALGGAFVMSLAEGETVRMKHKDTGEPGYFVVAKLDKPAAVVLVPHWDARAAGERTDAEGKKVTDSARDQFSATAHDLRTLAVSDDPHAVKVRVSALGKVAVLELD

SEQ ID NO: 8384 - protein, 1093 aa, unidentified
  REGION 1..1093: note = Description of Unknown: Cas Enzyme sequence
FNEMVVEFRELHPNLFRNERGKEISIPYDWTIYYLRNKALTQKISKEELAWLLLNFNQKRGYYQLRGEEEEESSNKLVEFYALKVVDVQDSGERKGKDEIIFKVILENGLSFRRPSKLPPDWVGKVKEFIVTTEFDELGHIKKNKYGEDVRSFRAPKEDDWGLVKKKTEYEIGKSNKTVGSYIYHELLKNPAQKINGMLVRVVERKFYKEELKQIIETQQKEHPELQNTELYNACLEELYEHNDSHKKNIGQKDFVHLFLNDIIFYQRPLKSKKSLISNCKFETRSFMKDGKIELEPLKCVSRSHPLFQELRLWKFVNDLKIYQKSDRDDINVTGKFIKNGDDFIALFDWLSERKEVEQKDVLKYIGLKKDAENYRWNYVEDKKYPCNETHAQITSRLAKVKVVPENFLDKTTEEELWHILYSVTDKIQIETALKKFAKRKGLSDDFAEIFRKFPPFPSDYGSYSLKAIRKILPLMRAGKYWDESHIHPQTMDRIAKIITGEFDEKIQTRVRDKAIILTESHHFQGLPEWLASYIVYNRHSEDADAKKWKTVNDIESLSLHSLRNPIVEQVINETLKVVQDIWKQYGKGEENFFDEIHIELGREMKNPNDKRKAMTEKMNENENTNLRIKYLLAELANDPEFENVRPYSPPQQEILRIYEEGVLSAEQDRIPDDIAAIIKTKLPSSAELTRYKLWLQQKYRSPYTGKMIPLNKLFTRAYDIEHIIPQSRYFDDSLSNKVICEVEINSDKGNAMAYEYIQNNSGKKVELSNGKEVTLFTLEAFEDFVKTTYSSARGKMKKLLMDEIPQAFVERQLNDSRYISKVVKNLLSNIVREKDEQEAISKNVIACSGGVTSILKQDWGLNDVWNDIITHRFERLNEMDALANKVPFSTKFGEWTNKDGHRVFQTQVPLQLQKGFSKKRIDHRHHALDAVIIACASRNHINYLNNENALGKGPKEEKDKKRFDLKHALCFKKYNDDSKQNYKWVFHKPWDTFTQDTRDSLQQIVVSFKQNLRVINRTVNQHQAWREDETGISKKVMVKQTQGENWAVRKPMHKDTVSGSVKLQTIKTVQLSTALDDWEMIVNKDVRKQIKE

SEQ ID NO: 8385 - protein, 1005 aa, unidentified
  REGION 1..1005: note = Description of Unknown: Cas Enzyme sequence
FNKGLKNILSRLLEKSNLSQDFLNELIKSFSSFGGYTNDYGTYSEKAIKKMLPFLRLGKYWNPKNVEVILSKTNHEVKQKVLDKEDINGELDDFQGLWVSSACYLIYGRYSEVGEVQFWQTPYDIENYLKNEFRQHSLNNPTVEKILVETLHVVKDIWRYYGEEIGKDEDGRTIYNKLFDRIHIELGREMKKNNKQKERDDKQNKENRKANERIVELLRELKRNNASLQEKSPFQQEKLRILEESLLSSIEYDKDNTEYELSTGKITKKEIKEITTKEFSKISRSDFERYKLWLDQRYQSPYTGKFIKLSDLFDRKKYEIEHIFPQERITLNALYNKVICETEINKEKKAATGYGFISNSKSKKVFCSAHNELIAIISIHEYEELVKNNFSGRKREILLSKDIPEEFTNSQLNNSQYISKMAMKLLSNIVREKDEDTFRSKNVLATNGTITTTLKRHWHLNDTWNEIISPRFKRLNELTNSNLFGDYREINGHQVFINIVPEETNKNFDTKRIDHRHHALDALVIALTTENHVNYLNNISSQEDSEEKLKTRKGIKYQLINSKKGFNDEKEWYFLPPAQIKTKDGILEFEYQFKGLRSKIFKDIAQNALENTLASFKQKNRVIRQRWNKYLKSEDGKVNIVNQEGLREVTNYNVRKRLHEDTFYGKVKLQHKVITISLEKAINEEFDLFDTELSTEIEKSKQINDKSHKEIIEELGSKYPIVKVYEKFVATRFGNELESFANIASDKIIKVIESITDTGIQRILKNHLDKYKEEVDDKLKYDTENAFSSDGVKELNTNIVELNNGKFHHPVYKVRTGDAMGTKFPVSEEGQKGTKYVVTAGGSNAFCGFYQKGKERKFHIPTLRESVESLKQGYEPCPATHPEDSEFKLIFVLNPSDFVYVPTDEERENPNLVNFNTLKKEQFVRIYKFTDGSGTTMNFVPSNFANLLFNMPNKDQEKAGLSFQIQNEIGLGSPQSKNQNSLENIQIKSICWKLKIDRLGNLSKV

SEQ ID NO: 8386 - protein, 995 aa, unidentified
  REGION 1..995: note = Description of Unknown: Cas Enzyme sequence
MNKKILGLDLGTNSIGWALVNKEDDKANGSIIAAGSRILPMSQDILGKFDTGVSISQTAERTNFRGVRRLRERHLLRRERLHRVLNILNFLPDHYAAQIDFDRRLGQFIPETEPKLPYIFNKVNNKWEFIFKKSFNEMVKDFSIHQPQLLEDNKKIPYDWTIYYLRKKALTDRIEKEELAWLLLHFNQKRGYYQLRGEDEEETPNKLVEYYSLKVIDVIATDDKKGDEVWYNVHLENGWIYRRTSKVFLDWVAKIKEFIVTTDVNDDGTIKTDKEGKEKRSFRSPAENDWTLVKKKTEFDIEKSHKTVGTYIYDTLLEKPDQKIKGKLVRVIERKFYKAELEIILKTQQQFHTELQDTNLYQLCLEELYQNNDGHRSSIGTKDFVHLFLNDIIFYQRPLKSKKSLISNCKFESRTYIKDGVKQIEPLKCIASSHPLFQEYRLWQWLQNLRIIEKETDNVVTTKFLNTEDEWVNLYEWLNDRKEVDNKSLISYLVKPLKLKANDYRWNYVYDETNDTKKYPCNETKAQIKSRLAKCENIPIDFLTKEKEEALWHILYSVEDKFDIEKALKTFAAKNDLGDDFVDNFKKFPPFKKDYGAYSAKAIKKILPLLRMGKYWDENNFHQQTKERIGKLLSGEFDENIRIRVRDKAINLNTINDFSGLPQWLASYIVYDRHSEDGDIVKWKTAVDIEKLEQHSLRNPIVEQVINETLQVVKAIWLQHGNGEEGFFDEIHIELGREMKNPADKRKQMTNQISENENTNLRMKAMLMELMNEGDTENVRPYSPMQQEILKLYEEGVLNGIDVIDDDILKISKQAQPSSSDLKRYILWLQQKYRSPYTGEVIPLNKLFTREYDIEHIIPQSRYFDDSLSNKVICETAVNKDKDNLLGYEYIKGNYGKTIELSSGKHVKIFTVDAYEKFVKDNYSKSRSKMKKLLMEEIPEAFVQRQLNDSRYISKVVKNLMSNIVREHDEQEAISKNVIACNGAITSILKQDWGL

SEQ ID NO: 8387 - protein, 924 aa, unidentified
  REGION 1..924: note = Description of Unknown: Cas Enzyme sequence
MKKILGLDLGTNSIGWALVSKEENKILGIGSRIIPMGTDKLDYEKGAGITKNADRRTNRTIRKMNKRYKQRRNKLLFILNELGILPEQFQFKNGIPEPLKLQDLELLPIRKGTLQLNTLDHYELRVNALTKKIGIKDFAKILYQFNQLRGYAGGNNNEDGNKKRKNEADDDEVEKKKSYEVITQKVEVINVEQSVETFNGGKNKSETLYKFDVSILLNEEEVECWTKLQNLEEKKGKEEEFEIRIKRPKKGDITYELALPQKTNWKKHMEATEEALKTENLFIGQLLLKDLLNSKWTKIRNRVILRSRYQEEFDAIWEEQARHHLILDNCPKDVLVKIANYLYPGKSNSQNQLKTEALEGGLKYIIKEQVIYYQRPLKPQTELISKCQFEKEEKVLSTSHPIFQEFRCWKQINQLYITSKEGVYNEKKEKIIYKYKDRYLNLEQKNQIYAKLQNQKQIAFSDIAKIVGLKNDNTEYLNGLNIRAKLKGLDTLLSIKNVFKDVVNEDLFYKSVNKDNDLIIKIWDTLYNNSGNEYDIKSPKVSAVINILKSITDENITASLALKLAQNINYPRKYASLSAKAINNILPLMQLMPLSTNEKTKENFEKIKYGIETGELIEGIEPYMVDYIYNNPNIIETGGMMDSFAASLIYGKHTVSNVKPTITNYHDIKYNSNRNLRNPVVEQITNEALQVIKAIWKEYNLNPEQLEIRIELARDLKNSAAEREKIYKGQINNQKQNIRIKERLAEEKMLISDENILKYKLYEQQKYISPYSGDTLEISLFDEYQIDHIIPKSRLFDDSTANKVLVEGNLNQEKGNRTSWEYISQQNTRYKICSIEVFLEIVNTNYFGRKKKNLLLEKIPTDFIVRQIKETQYIALAVKTELAQIVGSNNVKSTTGEITSFLRSRWGLRKLFMELTESRFKQME

SEQ ID NO: 8388 - protein, 1264 aa, unidentified
  REGION 1..1264: note = Description of Unknown: Cas Enzyme sequence
QKRGYYQLRGEELDEGKDKVYVVLKVKSVTDTGEAIKGKQQYEILFDNGWNYSKTIDNPSAWEGKIKEFIVTNTTKNDGTIKRSFKTVDSTADWAAIKAKTEQDIDKTGMTVGSYIYKSLKLNPKEKIRGKLIKTIERKYYKNELAEILQQQASHHNEFNNESLYKSCIEHLYSKNDAHRHHISKNNLIYLLLEDIIFYQRPLKIKKSTRSDCKYETRQFTFFNPETKRKEQRVTPIKGTTKSHPLFQEFRLWQFVSNIKVINKELEFTDKENSKLINLDTVEERVALFEFLNEKKEVTETQILKYLVKRKLIEKTAVDQYRWNYDSESKYQCNTTRADLQSRLKKVVDIDSNYLTKDKEIGLWHIIYSVTDQAEFKKALENYAINNSLDNGSFVSAFKSIPPYDSSYSTLSLKAIKKLLPLMRMEKYWAKDCIDNNTKQRIESIITGEVDENISDRVRDKGIFINDISDCQSLPLWLASYIVYGRHSESSDLQQWSSPTDIDTYLKEFKQHSLRNPIVEQVVTETLRVVRDLWNHYGNGDKNYFNSIHLELGREMKNSSQKRKTMTAKMRGNQRSNELIKRILENLQQDNSTQFNVRSYSPSHQEILKLYEEGIRQNPNVSYNTVSEEEIDKIRRTPSPTYDQVSKYKLWLEQGYQSPYTGQMIPLSKLFSTDYEIEHVIPRSRYFDDSLSNKVICESDINKDKGNMTAYEYIQKKNGDIVDGHKLLTSDQYTNQCQSYFKGNRTKLNNLLSDDIPEGFINRQLNDSRYIAKYIKGLLSNIVREDGEQEVTSKHLIPIPGAITSKLKHDWGLNDKWNEIIAPRFKRMNQITDTEDYGYFDKSINSFRIQVPECIRQGFSKKRIDHRHHALDAITLACTTRDHVNYLNSLNSFRNNNSLKTKLLIKNSKGDYTKNFQLPWKTFPVDAKKSLNDIIVSFKQNRRVINKTNNKTWQWVKQSDNTYKKRLVKQTEGDTWAIRKSLHKETVAGKLDYIFTPKGKVATGVRKPISSITKEKDIKSIANADIRFILIKHANRYKTANHKTDYEKAFSQEGIDHLNSTIATLNNNKPHQPIYKAKFFEIGKKFAVGTSGNNPSKYVEAAKGTNLFFAVYWNESKNKRVYESIPFFEVVEHQKQVANLSNDQRSTVPIKAELGKFLFTLSPNDLVYVPQKDEEITNIYLNNVDPNRIYKMVSCTKTECHFIPNYSSKEIIKNENGTNNKSERIQGRLFQEYNGYDAKEYPMMKKIGIKLKVNRLGIITRITF

SEQ ID NO: 8389 - protein, 1093 aa, unidentified
  REGION 1..1093: note = Description of Unknown: Cas Enzyme sequence
SKDLIHIDALTLFRLRAKAAREPISLQELGRVLIHINQKRGFKSNRKAVDKEVETTEFYNKLNQSSEFLKGRTIGEAFYDEFKKYYDAAKDKRGLMPTVKHIPFKRDKYEDEFEKIWQIQSNEYTDILTPELKYEIKNRCIFYQRPLKSKKSELSKCEFEPNNRVVPKSSPFFQSFRIWQKVNDVTIVDDEGREFKLTDKDRKKLVSFLDIKEGTGQDEEQGIKADSVLVLLGYTPTKKYSIKKFQKLPTNQTKARLLKAFDDSNIRNKKLLEFDIFAKNPEDYDYYKLWHLLYSAEATGETTHLRDTLMKKFDLSEHQANTLIKVDLEDDYSRLSTKAIKKILRYLHEGYDYYHSCEQIEADLEADARKTGKPRGKSNYKNTASKTKEEAEKQEKREYLSEVKRNELRNPVVEKILNQVVNLVNEIIEVHGKPDEIVVELARDLKKSQKQRAAKKKKNDRNEASRKDATKEIKKQCKWMTHVSKKDIQRYLLWKESNRQSLYTGKMIQVCDLFGGERKYDIDHIIPKARMFDDSFLNKTLCESTINEEKGDSTADDYIKTRFGEEHHRQYIQRIKACKTMSPQKKKYLRMGVEQIPDDFINQHLANTRYISRETLKRLKQICNIVRPTTGQLTSHLRNIWGLNEVMYEAFRKSGDKSKKPNKRIDHRHHAVDALVVACTTNKIIYKLNTLNAREVRSERAWYIAPPWNTIKQDTKKALSNILISFKNRKRLGTIAKNKIKHPDKNYKPRATFTPRGSLHEDTIRGSIKWYEKRSIFDALEVIGTIQNETIKEELQEILNDHDGDIKQAKKFLKKNLPPSLDEASDKVTCVTTKYTKRINLAEVMTDKQKGVSAKGKTIKIIFDKKIRVKVEQRIAQYNGHYINAFTNYKENPLYLDELKQIPIYKVKIIDNITPIAVRPVYDHNGDIRLDDDGKPIYGNFTRPENNHTMAIYSNEKGELAFKKITFWEAIQRKNKKIPIVNPKPHEGWELITTLFKGEMFIIPDGNEEIDENFILNPDNYVLVSEHLYRVQKLSSSGNTPKLNFRHHLATTLDDPNTEIFLQSLKHLHGIFKVSINRLGMITDVQKIAPAKK

SEQ ID NO: 8390 - protein, 952 aa, unidentified
  REGION 1..952: note = Description of Unknown: Cas Enzyme sequence
MNTPPDLHLAFDVGHSSIGWAVLQSPDKAPPALLGCGAVIFPADDCLASQRRGFRRQRRHIRATRLRIARMKALLAHLEVLSIEQLDANRCAWPWLLAARVLRKGPLLTWAELWSVLRWYAHNRGYDGNKQWSRHEADAAALKDDTEKVEAARGLYAKYSTRTMAETWCALCGLDPLGVQKSVALPGKDRPKGQNAAFPREDIEREVRAILTAHRGHLPHLDDTNIAAFMEKWDAIPCPAIKLPGRFRGGLLFGQLVPRFENRIIARCPITYEHVYQRVLTESGDEEKAKHEAEKLAKVPAADCIEFFRYRWVMQIANILIQTADPKAPRRLSVEERKALDARMRERGALTKGEFAKAVEEITGKAPSNVKQMLLHPDADKALVVDPAQRELTRKDISPYFSTLPERLQKRLRGQLRRGARFTLGQIREQLAALGDPAAFDSTLTRETDGAETKRSKKTKLVTREDILSRTVQLDPVSGRAPHSREIMREAEQFILSTARHPAGEGGPLYRSDAIRAAQLQRAIDEQTNNHLVRHRLKLLERLHDDLIQIYVEGKDLEEKKQRVARLTIEVNAELKKLSGKTAKQIAQDLGLRLSNFKSVTEKLEKQLEGKGIAITPGLIRKARIAEDLGWTCPYTGKLYDVFDLVSRKVDKDHVVPRADRASDSLDSLVITFSSVNRMKGKRTAALFVEEEQGKAVRGEETLSIKPLTTFLNEVEALETFKGHDDDKRRKKNRKRLLQLRDYVEKEFTPGDLTQTSQLVRLGAQALERHYMAQKEKPVITSLPGSVTGAVRKSWRLLPLLKAANPAVIDLATGEVRTKTEIRDITHSHHALDACTLVFASLLLPRDGGAWELLVKRRLNPDEQKRARELFKSLVEFEQDGTMRLIDLPEPLKNQIRRKLAERRVVQHIPAEIRGLRAELNAWRVLRVEDGWVHLRQRMRAPDGTRVDKRAG

SEQ ID NO: 8391 - protein, 1496 aa, unidentified
  REGION 1..1496: note = Description of Unknown: Cas Enzyme sequence
MTKILGLDIGTNSIGGCLINLEEFGEKGNIEWMGSRIIPVDGEMLNKFNSGSSVETKAAFRRQKRGSRRLKQRYVLRRTRLIRVLKLLGWLNKEYPENFKAALEENQNFKFNINDIIPIEKKTIEEATEVLGVKNKDGTLSVSIDWVVYYLRKKALKEKISLNELVRIIYMMNQRRGFRSSRKDKKGDEEKKIDKWVEILKVDSIEEKQQEGSEKNFKKQFSKIYIIKAGKHTWEEKRINKPEWIGKELNFLITKETLKSGEEKFKFQQPKPDDWEMTKVALEQDIKNSKLNVGEYFFNHLVNDKNYRIRQQIIDRSLYQKEFEEIWNKQCEYYPELKDTSKLKDISLELYKHNEAKQKEIQTHNIYYLLTKDIIYYQRELKSQKHSIAECRYEKGRFSKEGKEFFKGYKVAPKSSPEFQEFRIWQDIHNIRILEKEKQIDGKIHIEYDVTKDFISIETKEKLFELFDKSYEVSESAILKVLDKKLLSTKTHIVNLFVSRDKLKGNETKAYFRKVFKKHNFEGDELLNDEKKFYKLWHIMYSISSSNIEISKKGIETALRNTNNGFNLSEEIIKELANQPEFENKQYAAYSSKAIKKLLHVMRCGKYWKQETINENTKERISKILTGEEDKNIDDRTREQIAKHELNVIADFQGLETSLACYVVYGIHSERKNDDKYTDYKDIDVMKLIPNNSLRNPIVEQIIRETLFVVKDLWQKFGQPDEIHIELGRELKKNEEERKKLSETGSKNFRDKERIKNLLIELINDGFPFETKPNPNSPIDVDKFRIYESSSGSNYFEYEKKMKSENTNWKPTNSEIKKYALWLEQKCCSPYTGNAISITKLFTNEYEIEHIIPRAKLKYDSMENLVICESEVNKEKGDKLASNFISESPKIFKRNGKEFTIKNYDEYVALCKSNFRGKKLKNLLCDEVPKDFISRQLNDTRYITRKVAELLYPIVKDKVGIIYSGGSITAELKREWGLTRVWKDLMRPRFERLEKIIDKKLIIKDSNDRNNYHLETPEPETDIKRIDHRHHALDALIIAATTREHIRYLNSLNSVDSEIELKDIKRKLVKGKIREFKLPWEGFNKEAKDKLNEIIISFKANNKVISKPKNKYLHWKYKEGKWIKELKPQKSDKKWLSVRKSMFKEPQGIIYLKEIEDKKTIDAVKIHIERQKSVNDETGKPKAYIYDKIIREQIKMLLSNLNNDTDAIKKHLSKNPLLDINGNKIDKVKIAVFNEYASKKVAVDSSFTYDKINNIPYAEKIIKKFELLEKSISLKEKVLPLPYLLKKHLDEYAGNSKEAFEGEGLESLYKKAGRPIKKVTRYEKKKEDDKFKGKYVETDKGGIVYFVMYENAEGIRDGMFSISVHQAIEKIIQGKEIAEEKEGYKKIVLSPNDLVYVPNEEEMVTKIIDWNNKSNIFKRTYKMVSSTGKQCFFVPHNISKTLLEKIELGSGNKNQRAWDGKVELVGNSETREDSGSMIKNHCIKLTIDRLGNATPQ

SEQ ID NO: 8392 - protein, 1060 aa, unidentified
  REGION 1..1060: note = Description of Unknown: Cas Enzyme sequence
VGNVLGLDIGPNSIGWALVDDGLNGGDGGPRLIDAGVRVFPEGVDNFDRSKEASRNENRRTARGMRRQIRRRRRRRALLRRSLVSAGLLPAEPAALAALLGEDPYALRACAATGDALTPHQVGRVLLHLNQRRGFLSNRKADGKDPKQVKGMLEEISTLAAELGGRTLGQYLAGKAAAPGEVVRPSHRLRGRHTRRDMLTGEFDRIWRAQALHHPQLLTDAIRYGTAGRGLAHVHKPVRLGRGGDALVQFGIEGILFFQRPMYWPASAVGRCELEPKEKRCPRADRAAQRFRMLQEVNNLRFIDPDDNEEKALTPEQRALVLDKLATRDKLSFEDMRKALGFLETVRFNLERGERSNLGGMKTDQLIASAKVLGKAWHQRPDAEKDAIVRVLLNADALDEAAARETLAGRFGFSADEAAKLVTVALPEGYAGLSLKAIDKLLPFLERGMRYMADSDPETSALHAAGYLRRDEMGRRLFDVLPTLARIHTGPLSDLPNPVVTAALYEVRKVVNAVVREYGKPDEIHVELARSLKMPRAKRQEFNSRLHEREAQRSDAADYLRDKGVRPSRDAILRYELWQQQGESCIYTGRPIGFQQLFGGEVDVDHILPYSQTLDDAQDNKVVAFREANAEKGQRTPRQWLEHDAARYEAVCQRARRLPYRKYRRFLQKELDLDDFIARQLRDTAYITRLAVEYLKLLVEPQHVLGLKGQHTATLRYQWGLETLIAELPDSPAWAEQGNLRDGEKNRADHRHHALDAIVVAFTDGASLQRLARIDRQGGTRATGEILAEPMPVFREVVKGTLAAVNVSHRPRRQVAGKLHEDTFYGPVMNPQTGEPRAGVFVLRKELARLSASEVDKIRDEGIKRLVVARLRERGIDFGRGKKPGAGAIGKALAGLTMPSGVPVNKVRILKVDSTIRAIRAGRPDQAFVRPGSNHHACVFEWEVKGERRREAVYVTRVEAARRLRDHEPVVRRAHPTRSDARFVMSLCPGDTVLLEEDGGRQLLVVTTLVAGEEQKRIHAIPATDARRSADRPNPSIGGKLLNLRKVTVDPLGRIRWAND

SEQ ID NO: 8393 - protein, 1764 aa, unidentified
  REGION 1..1764: note = Description of Unknown: Cas Enzyme sequence
MKKILGLDIGTTSIGWAVVEATDEKNINDITGKEAETDINNNRIGIYKDAVGVRIIAQDTERFDKGLTLNDPKGSTLTPTANRRVKRGVRRMKSRYKLRRDKLGRVLDFIGMNPDKAYYTNEKGKRGEFNDIGKAIYQLRDKAIKEPISLNELGRILSHLNQWRGYSSDRFAKEEKPKFDYYVAEVLEVDEANKIAIVDEINKDEIKYYKVSIKIRFDEPYNLGDEENKKLVTELDGILFKKVIDFKKGDFVTVKKPEFKQDKKGKVILAEYYKITFTIPDPTDWNYKYQTLQKTLTEWCEAGNTVGSYFYQNFYENQIIPRIRNQVVNRRWYEDELGKILDFQYKYHKDFFEKLEIEAIVKIAFKDYQAILNDILKKHGIKEQLKSLIKDKIIFFQRPWQQAKNKGQCPFEKIKVKKEKAIKGTGKKEIVEEYVGRTVIPRSHPLFQEFKIWQQINNVRIYLKLEKEKIDLFANENDFERFIGKQISEVKEELYNVLQNSKSLSWKSFAENTLELRNKKEVVDKETGEVIKCHFEFNFRKLKNDKVNWEDIKLKGNNTRASLQNILHAKTTDWFNQIHSDKQQITNLQLLWELIYDITNGDANKVASIIESHFGFDKNTCFQLANLKFDDAGMGSLSAKAIRQILPLMTDGKCITAKTQLKVNSLLAINEQETEKSKEEKLESLKDFIPDKKARLRLSKFNTASDFTYLNYWEATAVRYGSHSTNKAISVGKMKPVERHSMNNPIVEKIVNETISVVNDIKQRYGFDEIRIELSRELKASMDERQQMWEGMNNNAAKNEWAKQMLRELKSEFAELDTDSSNKSNLDKIKIIEDVVKFKNAVEYKLKEKEYKLSEPSKAEVKKYLMWLEQNFKCPYTNQPIPFTDVFARGKVVEIEHIIPRERYYLNSYANKVITWREVNQAKANNGNRTAYEFIVSKRVEEKVKVGNNELALVSKEEWESHVKSMFPRGGKQTNLLRKEISEDPINRTLNETQYINKKLKEKLGELVGEQKVWVTSGAVTDILRDRWHLNDIMKELMRSRFENFELPTGKKSIKLKTLAEQQAMLNNIQSVLDNPEGFEVYKIPAGKKIIEIKDIEEIKKIHTELGTLLKENTLTINQKTKPYDYSTSDEAFETKNLTHFTKVYNNKTDNYEDREIFEGYSKRLDHRHHAMDAIIIACTKQNHIQYINTLNAISSADQESDVSKKTKYSLLKADVCIGNSSKKFKTPWIEDKFIPDVRKALSEVVISHKNTRLLISPSKHRVDRDIKPNKIASIRGELHKETNYAKKNYFEGGRTNIDKLIPKILKHKKENQYQTMVHFKTFGEIIKETVLKEKYQNILVPLFEKYETKQLNDNLCKIYSKAILEEIETKKLLNNAQTNDPLQWLSTYSDKDKSSRPNGLSMDLNNAKEVNSIADPRIKRLALYRLKYVNDQKAAIDKTDNDVSEKNKAKRKIETLPLYSNAIYEVRTKKADGSYKWIELKDLTQSDFDRIDYSNLNDSKYNKKNNTEKVKELILKSGVENLKHYYFENPLFISAVPIEVKKVRQVSYFQDLYEVTKGKYVYSVDTFMTYFFQQKTNEGTIDETKNRIPKFLKFIDAVSIINSEKPNTIDYKKLIEKEKTNQELQNGIDYDLIFTLAKNDLVYLPDNILTKQQVDEINWNDKQAILPYLYIVKDMNPSLSKIVFQQLYKADSIKITEADSKSLFKNPELKEQTEKIKYGTVPMLQRCLKVFTDKLGKKIVPYWEFPNGCWDKERAITLGLINL

SEQ ID NO: 8394 - protein, 1586 aa, unidentified
  REGION 1..1586: note = Description of Unknown: Cas Enzyme sequence
MKKILGLDIGTNSVGGAYINLPEKFEDYGTAGSIEWVGSRIIPMDGEYLVKFEGGQSTKGQTKAAFRRIKRGSRRLKHRYILRRTRLIQVFKTLGWLNQEFPEDFKGKIRDNQDFKFSISDYLPFSESTIFEFENEFGIEGEKSKNGHTIIPEDWIIYFLRKKALTRKISIPELVRIIYMLNQRRGFKSSRKDLIDNVVLNYDVFMKESESLEYSKGQGKELETQFVSITKIKSVSLKEEKKDKKGNTEFVYTIKAADVRMRTWEEVRKQKPEWEGKEFTFLVNQKIDRKGEIVQNKPQMPKDDNWALCTTALSEKMGDVFPGTFFFNELKKAYSEGHDYKVRQYPVYRWRYQQELHAIWHKQCELNDDLRELNTDQAILQQLIELLYPTQAKEKMPKLREFLSNDLIHVISNDIIYYQRELKSQKGTISECRYEKRKGIDGEVYGLKCIPRSSPIFQEFRIWQDIHNIRILEREVKVEGRTRLDIDVTVNLIDEKIKEKLFELFCLKASVTEKDILKLIIDNCPNSGIKLDIDKKEKLHSHRVNLFNRREELKGNETLARYRRVFEKTGFDHKELLSNKEKLIKLWHVDYSISSSDEAKSEQGILSALGWSKKTNELVPNKNWDVFKMPSDVAFAFTQLPEIKKEYGSYSAMAIKKMVPLMRCGKHWNENEVSVENRGRAVKIQERLIEINNSINRIGEIADDDLQKQVLKSFIGLESLIKGLNTYQVGYLIYSKHSEKDISKIRSIEEFSQFIQKELPNNGLRNPIVEQVLRESLLLVRDLWQKFGQPDEIHVELGRELKNNEKERKRISENQNENFNEKQRTKRILRELLNEGFDQYIDDDKIEKSKFEVNPNPESPIDIDKFRIWRSLSKISDFELDKKLKEERIPKENEIKKYVLWLSQGSRSPYTGRIIPLSKLFDSAQYEIEHIIPRAKLKNDSFNNLVIAEWGVNKAKGNRLASNFIWESKGKCKHGDREYTLLTNDEYENYCRETFKFQKSKRKNLLASEVPNDFVDRQLNDTRYIGRKLAEMLAPVAKKENGIVFTGGMITSELKKNWGLNKEWKKLMLPRFERLEIITGNNYISINKSDPNDIDISVPENPKLELKRIDHRHHALDALIIAATTREHIRYLNSLNAVDSDEELKMVKRSLVKGKIRDFKLPWDYFTKDARETLEETIVSFKTNNKIFSKPYNRTAYWKQHKDGAWKKDSKLQKDNLKWLAVRKSMFKEPQGIIFLKEIYEVSVKEAIRIQLERIQLEKDSKKKKLASYIYDQEARPIIKDLIYRSGISIEETDGLLKDVYSYVIKNPLKDITGKAYVKIRIAKFVEYAAKRVTLDKSFDHKKINKIPYAKVDKSTLGRILHQHLDAVEYKGDPTLAFSGEGLEELGKKVGKPVSKVTIAEQKSPESKFGKQYVETDAGSNAFFIIYENEFTNEREFKSLATHQAIENLKEKGYLFEDREGYRTIILSPNDLVYVPTQNERLKIEQGISINDAIDWNNKSKISSQIYKMNSCTGTKCEFVPHRFVNQNPIIDKIEFGANNINQRARDGVVTLVPNKNDGFKREDTGTMIKEVCIKLKVDRLGNISI

SEQ ID NO: 8395 - protein, 1118 aa, unidentified
  REGION 1..1118: note = Description of Unknown: Cas Enzyme sequence
MQAENRPYSLGLDIGIASVGWCVLGENRIIDLGVRAFDKAETAKEGDSLNLVRRTARLMRHRLRHRAWRLTKLSRLLKRHGLIDDTSYFQPQHPFPHSIWTLRAEGLDRLLVTEEWARVIYHLCKHRGFHWVSRAEKKKAEADGKSEGGKVKEALDGTAKLMRERGYRSPAEMVLAEFPKAQRNKQGDYSKALARTLLGDELALLFSRQREFGNHYAGATLEVALLGIGDHKSGLFWAQKPALGGTDLLKMLGKCTFEKDEYRAPKASFTAERHVWLTRLNNLRIVLDGSTRPLNEQERQLALPLPYQQAGDFTYKQLRSALVKAGRLPESFRFAGLLYPSEKQKAEDKAKDPESAVLVKLPALQEMRLTLKTAGLETEWQGMAGAAMGGRPELLDQLAWVLSVFKDDDEVIGELRKLTLPGGEKMIDALLEIRFDRFHALSLKALRKIVPLMEAGLRYDEAVAKIPEYGHHSQLREPGEGQHKYLPPLYAGRDKKGRMVFSEDMDIPRNPVVLRALNQSRKVVNAVIRKYGAPREVHIEMARDLSRPLDERREITKEQDEYRKRNEKDKVEFAQQFGIIGAPKGGDFEKWRLYREQQGKCAYSIEPIDIERLLKAGYVEIDHALPYSRSFDDSKNNKVLVLAKENRDKGNRTPYEYLNGTSDSARWINFVAFVESTKAYRLAKRSRLLRKDFGEKEAEDFRERNLNDTRYICRFFKNYVERTLQLAEDSEAKRCVVVSGQLTAFLRARWGLIKVRGDSDRHHALDAAVVAACSHGMVKRLSDYARRKELEKVREGFVDAETGEIVSPAMFQQLRQHFPEPWPHFREELEARLKIDDLSLLRTQLQGLGTYSAETLDALRPLFVSRAPQRRNSGAAHKDTIYGQPERLKAQGGVTQKVPLASLSLKDLDQLIDPHRNEKLYAAIRARLEEHGGKGDKAFPPANPLRKPDRDGNPTGPIVRTVTMVIDKLSGIAVRGGIAKNDSMLRVDVFTKAGKFHLIPLYVHHSVAKVLPDRAIVAFKDEAEWTLIDDSFEFCFSLHPNDLVKITLKTGVSLGYYAGCDRSTGSVSLWAHDRNQSVGKDGLIRGIGAKTALAIERFNVDVLGDIYPANQERRHGLA

SEQ ID NO: 8396 - protein, 1374 aa, unidentified
  REGION 1..1374: note = Description of Unknown: Cas Enzyme sequence
MEKILGIDLGTNSIGWAIRDTSETENQIIDKGVLTFDKGVAEDKSGEHPMVQKRTEARGKRRNYQAEKYRKWALLQCLIENKMCPLSMEELNEWRHYKKDAGRKYPQSEKFIQWLRFDFDGDGKPDFERLGYSKHESYYLFRSLIVNESFKDIFKNEPEIIGRVLYQIVQRRGYNDGTDIDENEKNELSKTIMKGGGDAGAIGANEIEPYINKYKTLGAALYEIQKEQKTRIRKRYNLRSRFEAEIKEICRVHKLEFLYKQLWTAIIWQRPLRSQKGLVGVCTFENNKRRCPISHPLYEEYRTWIVINNLKIAAIYGVTVSMPLIQLLQTVVYPEFYKASPNFKLSTLKNKLKKVGYEIGAKFPDDTKVISISFNYKMKEIFGEDWERKTGWNNILLNLPKEENKKYDIEDLWHLHFVKSDNKKTSETAHEYLKRFGIENIKFAKEEAEEFAKIRLQQGYATLSVNAIKKILPYLQQGFIYSEAVYLANLPKVLNVQKITSDIVLHFTEEVRNILKENYREKKYIQAVNELINDQLTAVQRFGMDPDYKLDLDDLNDIKQKLEEVFGIVTWENLEEEEKILAIDFVSSKYLIFLKKRILSKNVFQRNERLHNKIFTWLSDIYDLPAERIKYLWHPSEQETYALAPEKNGIKYLGSPEPISNGFKNPMALKTLHKLKKLINFLLETNKIDEDTRIVIEIARELNDANKRKAIERWQRDREIENEKFRKQIEEINRECGTDFNSNDKNLIDKIRLWEEQNRLCIYTGKTINLCDILNGSKYDYEHTIPASMSFDNELKNLTIADKTYNQQIKGKKLPTECPNYEDEYIHNGITYKAILDTMQSIFGRLTEEEVKTKYGKKIFSKFEKIVALEKNYQEWKDKDSDDKETKNNIVIKRHYLKMELDYWRYKLETFTTTEYKAGWRNSQLRDTQTITKYALPYLKTIFKKVDVQKGSITADFRIIYRIQPRLEKKDRTKHSHHAIDAAVLTLIPSHAIRDKILLKYNEANEQNLPYHETPDQWNNFVTNHILNIEETVLINYLPDHRTLTPTEKKVRKRGKLQFVKEKLEHMKWQYKLDEQGNKIPVVAKGDSIRGQLHKLSNFGAINNGDAIILVERYPISSFTSIADCKHIVDPKIKQLVENELKKRMDNGLSFEKAKLEPVPFHKGNEVIKKVRCKVAAGRGYLTTEKAIKIGSHTFKSRHEYKQSMYVQNEENTYCLYYEKTVENKTHRAFKIVGLFELSLLKLKKESDLKLENYYKEVLSGKGKNAIQLPLVHILKTGTKCLFYKESIEELKDLDRTSLLKRVFRIYKFNEMGTPNLFLQNHLEARKNELLDDGDTSFEHTLNSYRLKIKADKFTCAIEGKDFKMEIDGDIKWL

SEQ ID NO: 8397 - protein, 1444 aa, unidentified
  REGION 1..1444: note = Description of Unknown: Cas Enzyme sequence
MKKRILGLDLGTNSIGWALVSPEEQKILGLNSRIIPMSQDILGDFEKGNSVSQTATRTGYRGTRRLRERHLLRRERLHRVLGILDFLPEHYSQSLDRYGNFGNEKEEKIAYFLNKENKHEFLFTNSYNEMLSDFRKNQPKLFYLKTNGTETKIPYDWTIYYLRKKALTQKIAKEELAWLLLNFNQKRGYYQLRGEDDDKNLNKLEEFYNLAVVEVQETGKGKKDGEIWYSVSLENGWVYRRSSKIPIFDWIGKNRDFIITTEIDDDGNVKKDKDGSEKRSFRSPKDDDWGLLKKKTENDILNADKTVGCFIYETLLQIPNQKIKGKLVRTIERNFYREELEKILACQLKFHPELQDKSLYQQAIESLYVSNEEYRDSIGNLDFRYLIVNDIIFYQRPLKSKKSEISDCTFEFRNYKDEEGKEITEPLKCISRSHPLFQEFRLWQWIQNVRIYQREKQIDGKLNIDAEVTNCFLKIEKDYVDLFDFLFERKDVDQKAFLKHFKLTPKTHRWNFIDDDKKIYPCNETHTQIVSRLAKVNKLPTDFLTKDIEVALWHILYSVRDKHEIKKALASFARRHNLDEESFVENFKKYPLIKSEYGSYSEKAIKKLLPLMRMGNHWKEQDIDHTTLERIAKIISGEYDEKIKNQVREKAVSLDSVNKFKALPLWLTSYIVYNRHSESGENNRWTTVTDIEKYLKEFKQHSLRNPIVEQVLIETLRVVRDIWKQYGNGNERLFDEIHVELGREMKNNAEDRKAITEINLKNENSNQRIRIMLAEFARPDYDIEGVRPYSIYQQDALKIFEDSVINSGIEIPEDIEKISKTAQPSENEVLKYRLWLEQKYRSPYTGEIIPLSKLFTPDYEIEHIIPQKVYFDDSFSNKVICESAVNKLKDAQLGFEFIKEHGSSIVAIGGGKSVQIFTIAQYEDFIKNNYTRNKGKAKKLLLDEIPDKMIERQLNDTRYISKIVKNLLSNLVRDVNNDDGVTSKNLISCNGAITSALKQDWGFNDIWNDLMLPRFERLNKLKGVEIFTVYNDKYQKLLPTVPIEFRKGFQFKRIDHRHHAMDALVIALTTRNHVNYLNNQTSLDKSNNKSKEDKLKDRQDLKHLLCFKTKLDENGNYKWALKKPWESITQDAKINLETAIVSFKQDLRVINKTVNYYQKYVDGKKQIVKQVTGDNWAIRKALHKETVYGEIILKRIKVPKDKILTATRKALDSTFDLSRIESITDTGIQKILKNFLQSKESNPELAFSPEGIGFMNQNIALFNDGVAHKPILKVRVFELGSKFSLGCTGNKKSKFVEAAKGTNLYFAIYIDENGKRNYETIPLNVVIERQKLGLSSCPERNDQNHILLFYLSPDDLVYLPSDEERISSTNMDFKELKKGQVDKIYKMVSSSGTQCFFIKAEVATCIVNKMEFSALNKMERSVDGDMIKEVCIKLKVDRLGNISI

SEQ ID NO: 8398 - protein, 1223 aa, unidentified
  REGION 1..1223: note = Description of Unknown: Cas Enzyme sequence
MKTVLGLDLGTNSIGWALVEHQLDEKIGKINGMGSRIIPMSKETLDNFGVGIQKSATSERTQYRGVRRLVQRDLLRRERLHRVLNVLGFLPEHYANEIDFEKHFGQFKKDTEPKLVYRMGKNGKNEFLFMESYHEMLSEFKAANPTLLRDGKKIPFDWTIYYLRKKALSKEIKKEELAWLLLNFNQKRGYYQLRGEDEVIKENKLEEYYSFLITDVIDSGDRKGTDIWYNVILENGWVYKRASRTPLHDWIGKTRDFIVTTDLNDDGSIKKDKDGKEKRSFRAPKEDDWTLVKKKTETDIINSNKTVGGFIYDALLKNPSQKINGKLVRTIERTYYKKELNSILKKQLEFIPELKDLNLYTACIEELYRNNEAHKNNIKSRDFTYLFLDDIIFYQRPLKSKKSLVSNCSFENKTFIVDGKEKIQPLKCIAKSHPLYQEFRLLQFVKNLKIYEREQNQNGKIFYDIDVTNQFLQNENDYTELYNWLNNKTDITQKQFLAYPKFRLKEDRFRWNFIDGDKPYPCNETRSVFIIKSSKINGIEPSFFNEEKSLELWHILYSVTDKIEIGKAIKTFTKKYHLPDEFAEVFSKLKPYDNDYGAFSTKAIKKLLSLMRFGNSWNENKIDENTKNRIDKILTGEYDLNIKNRVREKAFNLKSTADFNGLPLWLASYIIYDRHSEANDIAKWKTPDDINNFLKKEFKQHSLRNPIVEQVIRETLRVVKDIWEEYGNSKENYFDEIHIELGRDMKNPADKRKRMTEKISENENTNIRIKALLSELKNDGVNDVRPFSPSQQEILKIYEEGVYQYESRKDKLDEVDKIRKSSKPTKSEIAKYKMWLEQGYASPYTGKTIPLSLLFTTKYEVEHIFPQSRFFDDSMANKVICEAEVNQLKDNKTAYEFIIDNNGSIVELNGGGSVKLFTKEEYENHIQKYFAKNKTKQKNLLSEEIPDSFINRQLNDSRYISKVVKSLLSKIVRQEKDGELEQEATSKNVITLNGAITSKMKQDWGLNDVWNELITPRFERLNALTNTNDFGNWENKHGKQIFQTTVPEEISKGFSKKRIDHRHHALDALVIACVGRNHINYLNNLNAKDANDKTIKHELRNTLCLKTKPDEKGNYKWEFKKPWETFTQDVKEKLFCTIVSFKQNTRVINKTNNKYQKWIPDANGVMKKEMQDQIKGDNWSIRKPLHAETVSGKVFLQRPKATIVAITSILESTHLIIDKDIKN

SEQ ID NO: 8399 - protein, 948 aa, unidentified
  REGION 1..948: note = Description of Unknown: Cas Enzyme sequence
MARRTRITLARRAERKRELRLKLIEVGLLPPTAEAFKALLEGTDPWDLRRRGLRASLAAHEFGRVLLHLAQRRGALGLHIPDPDDVEAEGGGEDGKVKAAIGQVRAKMLAAKARTFGELMAIERDRRVTPLGGDDNRPQDARIGNREYRDAIRNKRGSYEHCADRAMIRHEFAELWREQVKLAPWAKKTLTDALRLALDDESGDSTWKHKGLLFGQRRQSWDLGTLGRCVLEPTERCAPHADMHASHYRVIETVNAIKVLQWGSGERALTVEEREKVIALLRGPLGVHESGKFKGQPKRSCSVTDIRIALGLGRGGKDKWPKLNLERDEDREINTDWFSRAIVHGAIGADVWSAMRPAVKEGFNRAILRHQPEDEGDAAKLKAGGLSWGGLDEGRADLLVTAWKSRPKLENRLSMSRKAVLNILSIMDRRDANGAAQPWPVEGEAGGHAWLTQIAARKLIAEDAGFSDVSTGQPLDQHARRRYATGAKGLSARDRHYLKKHPHDLPPAPMLSNPVVRKAIHEVRRHIVEYVRTFECFPDEIRVELAREAKMGAKDADRALSRNRLRARIKNDIIAELSLDRVSFNQQRAALDRVVLAVQQAQRCPLCGKGGLTPRKAAAGEDCELAHILPRSRGGHNGHGNMVLSHTKCNREMMQSTPREYWAATLKSGFDEGMKIVESIYGDIHRPKPAETTKAEGDALWSCYFDFRDDARKLDQFAKDITDIKDMTSRQGAATKYAARQVMAYLADALYGGHGLPERGGQRKIFASDGQWTSRLRREWGLFFDPHGAKAGGLDNTEEHAALEKNRGDHRHHAIDAVVIALGNEQVRNQWDSRERAAGAAISYKSSTPPEEQIDAYRRAHPIDPPAPFKDRDDLRERVAHAVFGDVKDRSGFKRPIAHRPVKRKLIGALHEGTLFGPVLDGEGKLTRNYTAKKSVLVLDPNHLRMPR

SEQ ID NO: 8400 - protein, 1390 aa, unidentified
  REGION 1..1390: note = Description of Unknown: Cas Enzyme sequence
MKKILGLDLGTASVGWAIVNEAENQTEKSSIIKLGSRIIQYDNFVSTESGKESKEPEKDFKGGKGISPNAGRTMKRSMRRNLQRFKLRKENLIEILIKTGFINVDTTLSENGNQSTFETYRFRAKAASEEISLELFARVLLMINKKRGYKSSRKAKSQDEGQLIDGMEIAKKLYNEGITPGQLVLQLLKEKKKYIPDFYRSDLQAEFDKIWKFQQQFYPELLIEDFKSQIAGKGKLNTTKIFLGRFGVYTAECKGADKKVQAYQWRVDALNKELPKDVLAFVISDLNGIISSSSGYLGSISDRSKELYFNKLTVGQYLMVQLEKDPNTSLKNQVFYRQDYLDEFNTIWEKQAQYNKELTPELKAEIRDVIIFYQRRLKSQNGLINFCEFENKQIEVEIEGRKKIKTAGSKVCPKSSPLFQEFKIWQILNNIQVNEKASKTKRFLEQDEKELLHAELSFKAEISKAEALKLLFKNANELDLNFKKIEGNRTQAALFDAYRRIIELSGHGEFEFSKMHSFEILKTVKAIFEGLHFNIDILSFNTSMEGLTFEKQALYQLWHLIYSFEGDDSNTGDEKLINKITELYGFQKEYARIIANVALQPDYGSLSTKAIRKILPYLLDGNEYSVACGFAGYKHSKSSLSKEEIDNKILKDQLEILPKNSLRNPVVEKILNQMINVVNTVVESFGKPDEIRIELARELKKSAKEREVLTAAIGETTILHEKYKDILHKDFGLTHVSRNDIIRYKLYLELEARGFQTFYSNTYIAPNKLFSKEFDIEHIIPQARLFDDSFSNKTIEARSINIEKKNETAFDYVYAKFGENGLAGYLSRVEEAYKAGKISKTKLNKLKMKGIDIPDDFINRDLRDTQYIAKKAKSILEELVRNVISTTGSITDRLREDWQLVDVMQELNWGKYDALGMTEFIENRDGQKIRRIKDWTKRNDHRHHAMDALTIAFTKPSHIQYLNNLNARSDKAGSIYGIEQKELYRDDKGKLKFKPPLPLDDFRAEAKKHLENTLISIKAKNKVATININSTDKKGGTNKKRQLTPRGQLHLETVYGSIKQYVTKEEKVGSGFNEEQIAKVAKASYRDALLNRLREFDDDTKKAFTGKNSLEKSPIYLDAQQTLVVPEKVKIVFTETVYTIRKDVSPDLRLDKVVDKKIKDLLEARLHEFNGDAKKAFSNLDENPIWLNKEKGISIKRVTITGISNAEALHSKKDKEGNLLYDEKGKTIPVDFVNTGSNHHVAIYKDEKGNLQENVITFFEATERVSQGLPIIDKEFKRTLGWEFMFSMKQNEYFVFPNEKTGFNPIEIDLLDPEKYYLISPNLFRVQSISSKYYIFNHQYETRNADGNMFKTKKQMSGITYNFFQNEKWLKGLVKVRLNHIGQIVTVGEY

SEQ ID NO: 8401 - protein, 1325 aa, unidentified
  REGION 1..1325: note = Description of Unknown: Cas Enzyme sequence
MKTVLGLDLGTNSIGWALVNIEEQKILGMGSRIIPMGTDKQDYEKGVGITKNATRREKRTSRKMSKRYKLRRNKLLFILNELGMLPDQFQFKNGLPEANKIQSLELLPIKKGTMQLDSLQHYQLKAKAIIDIIGLKEVGKILYSFNQLRGYSGGNNEDDAKKKVKEEDDGDENVKRKSYEVITEKVEIKTVEKSDDTFKGGKNQVETLYKYNVTIVLNEEEVECWTKLQNLEEKKDKEEEFEIRIKRPKKGDSTYELALPQKTNWRKQMETFEGRLKESGNYVSQEALKILVENKWTKVRNRVVLRHRYEAEFDAIWDYQYENNPEFQMIVDDKDKLEKIILYLFPERDISRPETTESKESKKENYRSLARENGLKYIIKEQVIYYQRPLKPQTELISKCPFEKEEIALATSHPLFQEFRCWDQINRLYTTSKREVYNEKKQKNVFQYTDRFLTNEEKQEIYNKLQNQKQLGYGEVKKIIKLEDGKGEYLNGLNSKAKLKGCDTAISIKKILGEYFDDLYEKDNEIITKLWRVIFDNANNGSEYDPKSVKVFSIVEVLRSSNDNTIFRELALKLAQGIKFSRKYASLSERAIGNILPLMQLNPTNISEKVKAKFNLIETGEISEEFPLENIEDYVISFIASTPNALHTGGLMYAFATSLVYGKHTKKIVNKVITNYHDIKQIDRKLRNPIVEQISNETMQVVKAIWKEYKFNPDELEIRVELARDLKNSALERDKIYKAQNRNKKTNDDIKRRLQEEGVPLTDLNILKYKLYVQQKFISPYTKKEIIPFSALFDDRLYDIDHIIPKSRFFDDSITNKVVCEANINEEKSNRTAWEYISQQNSKFEIRSVDDYIRHINEIFFGNKKKNLLLEKIPINPVERQIKDTQYISVAVINELAKIVGSANVKTSTGEVTSFLRSRWGLKKLFMELTESRFKQMELWDLDKETDNQKSEWINKYYDKEKQRHIYEIKNWSKRFDHRHHSIDALIVALTEQSHIQRLNNLNKYLQDELTKRKVEFKIEIKEDESIIDAFFNLEKVRREEIQKQIESSRYFEKPFEDLIKQAKEHLEKMVISHKPKDKLGVKEDEKTGKKQLKIRAALHQATYYGRLNGKDTKTVELSRLSAKVVSKIIDEVLKKEIDTHRKNYESMKEAFTGEGLKMFNEGRFQRKKPTQLKPPVYKVKIWYNAKENDESSLQRLYDNNDKLGVVTGDNYLFLVMEKDGKNGKERVFDIASLYDSADIAKRALRENKTNYKNEIAEDYKIKHKDKPSKVLFALQQNELVYLPENVEDPVFSFTKDEFNEWIYIKENKIKFAKRVYKVVKFSGK

SEQ ID NO: 8402 - protein, 1240 aa, unidentified
  REGION 1..1240: note = Description of Unknown: Cas Enzyme sequence
MQNTFLGLDLGITSIGWALVSENIKGEKEIVDMGSRIIPLSSDDNNEFSRGNAISKNQNRTAKRTQRKGYDRYQLRRKDLKALLSNYDMFPSDDLMKLSSLNLYGLRDKALKEKIELKELGRLLYHLNQKRGYKSSRSDANLDKKDTDYVAEVKNRHQIIKDAGQTIGQHFYEALKKDEFYKIKQQVFPREAYVEEFNSICNKQKEFHPTLTNDLIISLRDEVIFYQRKLKSQKGLVNICEFEGEYRIVIKGKSIFTGPRVSPKSSPLFQVCKVWETINTITIQNKRGEKLNISIEQKNDLFNYLDINERLSQAELFKILNLKKEDGWYGNKQIAKGIQGNITKSTILKLLRENDVLLKFELSIEEKPDDVFLIDKRSGEIIGANKSKVISKSFEQQPLYQLWHTIYSIADSEECSKALSLKFNISKDVSDKLALIDFTKFSFGNKSAKAIRKMLPYLMEGYVYSDACSFAGYNHSNSLTKDENLKRELLDVIPNLSKNSLRQPIVEKILNQLINVVNAIIEKHGKPTEIRIELARELKQSKDERNETFSNINKREKENAGIRNRIETEYGQYGVKATRNTVIKWRLFHEINNDESKINATCIYCGQPFGITDALRGSNIDIEHIIPKSRLFDDSQSNKTLTHRKCNTDKGDRTAFDFMKSKGDVAFQQYLETIEILYKNRIIGKTKRDKLIMASDKIPQDFIERQLRETQYIAKKAKEILEQVCYNVWSTSGSVTEYLRRVWGWGDVLMNLQLPKYSELGLTEWKEWETNDGQKYKKEQIKDWSKRDDHRHHAIDALTIASTKQGFVQRINTLNASTTRDGMKKELDDAKKEYDKRKSLLENYIYNLKPFSTKEVEDATSQILISFKAGKKVATFGNRKVKLNGKKQIVQSGIIVPRGPLSEESVYGKIKSIEKNKTVKYLFEKPHLIFKPYIKVLVEKRLLQYEYDTKKALDSLKSEPLYLDDANSIILKYGTCFKDEFVIKYPLESLKAKDVEYIIDNKIKEIVKTRLALFDNKEKEAFKDLEANPLWFNKEKRIAIKTVRCFTGLSAVEAVKKNEHGEDIGFVKPGNNHHLAFYVDENGKKQEHVCSFWHAVERVKYNIPVVIENPKLVWDSILIKKEDYPENFLAKLPLDSWTFDQSLQQNEMFLLGLSNEEFNSIIKQNNKKILSQFLYLVWSIGESQYWFRHHLETKNSDLKKISGAKECKRFYLCKSIGAFEKLNPIKIIITQLGEIKSSHD

SEQ ID NO: 8403 - protein, 1152 aa, unidentified
  REGION 1..1152: note = Description of Unknown: Cas Enzyme sequence
LWQPLPLDLKSKIYTDKFFRKSKGYFPFSEIEDYIKKEGKNWDLNYKSKTTVTGNPFTARLKEIFGNDYINIQIPKEASRKAGKDYYDLEDIWHVLFSYEDQEYVTAFSENKLGLDPEKTKLFIAAWNATPIGYAMLSINAINKINIFLQKGLIYTEAVLLANIPEIIGKDLWSKNETNFIEEIGNLITENRKQKNIINIINGLVSRHKNLEANEKFGFKDNSYKLDDSDIKEINTIIHEQFGIKKWSEKEDWEKSEILLTVKVCYQAYFTTSGLERKDINNDRFFIIKSNGIHYYKSASGYYRLPKLIDTLGEFLQLNFDVSNEQLSKIYHPSEINIYPHAKADKNGELKLGSPKTGSFKNPMAMRTLHELRKLLNYMIETNQIDCDTRIVVEVARELNDSNKRWAIEAWQKQREAENGEFALAIEQLVSENKSINASSKNEADIDKMRIWYEQNSEEPAPPVTEDKKEIRGIKWSENKKDSYKEIVAKKERTDKYRLWVEQDCQCIYTGRMINFTDLYKENVIDFEHTIPRSISFDNSLANLTVCYSDYNRTVKKNQIPFVLNNYDKDYAGHSAILPRLEKWKEKVERIKQQIDFWNTKVKKASDKEWKDKAIRERHLWLMELDYWRNKVDRFTLEEVTTGFKNSQKVDTQLISKYAFHYLKSYFEKVDVQKGSITAEFRKIYGLQVADEKKDRSKHSHHAKDAAVLTLIPVAAKRDEILKAYYEHRERRQPFANVEPFKGFKREFVWNIDDSILINNITNNQALTSAKKIVRKRGKIQFIEGTNIPKISTGDCIRGQLHLDTFYGAIKPALRDKEGEILRDKNKKIVQDEKIKYVLRIPLLYKKDQNSPGFKSLEELEKQIVDKDLFKQIAKQVKEVYGNSLKDALEPNKGVFMLNKKGEKVNKIRHIRCWASVSEPLSIKKQTYISKHSYKNYYWAGNGENIICAFYKNDKTDKNGNLKKDREIEIVNLNNAAKLKSFGLVHNNEIEIYRSGKNGEPIVKEDGTKQKPCALLMAGMKVIFFDKNLDDIKWQMGMSEVEYTKRLSDRTYKIVKFAGSQITFLHHLDARDEKQHLAEFPEDKIFKIDKDGKEITFGKRGKNGFTEKISDCLIYNQGRPWHKLLYTKDWFDFAIEGHDFTINMDGTIKWIK

SEQ ID NO: 8404 - protein, 1183 aa, unidentified
  REGION 1..1183: note = Description of Unknown: Cas Enzyme sequence
MKTVLGLDLGTNSIGWALTKQDFDQRLGEILGIGSRIIPMDAAMLGDFEKGNKVSQTAERTQFRSVRRLRERELLRRERLHRVLNIIGFLPQHYSEQIDFEKCFGQFKSDTEPKFVYRQNEEGKSEFIFKKSFGEMLNDFKLHQPESVSDDKKVPYDWTLYYLRKKALTEKIEGEELAWLLLNFNQKRGYFQLRGEEDDDPTRTAQTRIYFLSEKIESIDDTKTVYKGLKIFRIKLSNGESGKYFAKNEPDWLGMEKNIIVTIDTDKDGNDRLEEDGTIRKKFAIPTDDDWEKKWKLIKIKTEKTIRESGKTVGSYIYDTLFKNPSQKIKGKLVRVVERNFYKSELEQILLKQKEFHPELNDVDLYFKCIEELYPNNDAHIKNIERRDLSYLFLDDIIFYQRPLKSKKSLISDCQYESRNYFDKQTNEKKSQPIKCIAKSHPLFQEFRLWQFIHNLRIYEKDRIINGNELDVTPDFLKSEEDYTKLFSWLNDKKEIEQKVFLKYPAFGLKKSSEKYRWNYVEEKSYPCNKTRNSILNKLDKNSKVILTQDIEIKIWHLLYSVSSKAEIDIALAPNENRKSNNKAIFDMLIENNFTNEEISELKRITFTEKDYGSYSEKAIKKLLPLMRKGSYWQEINIIPEVKLRVEAIIERLREIDFEEKKIEIITDDDIPKQILKSFAKTKGENPLQGLNTYQACYAVYGRHSEARETLKWESPEAIETYLKTVFQQGYLRNPIVEQIIKETLKVISDLWKYYGKGKPNFFDEIHIELGRDMKNPADKRKTISEQVNANENTNIRIKSLIAELKADSNYENVRPYSPSQQEILKIYEEGVLKSNIEIPDDIGKILKTAQPSKSELVRYKLWLDQKYRSPYTGEIIELSKLFTTAYEIEHIIPQSRYFDDSLSNKVICESEVNKDKDNNTAFQYISGNSEKIIELSFGKKVKLFSIEDYENFVKDVYANNRSKMKKLLMFDIPDSFVERQLNDTRYISKVVKNLLSNIVRQDGEDAVTSKNVISCNGNITSTLKHDWGLNDIWNELISPRFQRMNELTNSEAFGKWENKAGKRVFQTTVPIELSKGFSKKRIDHRHHALDALVIACASRNHINFLNNEYAKEKQSDLRFDLRRLLCEKIADEQNSKSYKWVFKKPWDTITQDSKSKLQTTVVSFKQNLRVINKTVNSTQQWK

SEQ ID NO: 8405 - protein, 1152 aa, unidentified
  REGION 1..1152: note = Description of Unknown: Cas Enzyme sequence
MDMHGSYVLGLDLGIASIGWCLIRLRAAAGTEQPIPTKIIRAGVHLFESGTEGDIESGRDESRAGPRRMARSMRRSFIRRRQRRRNTMRALQACGLLPPGDIQTPQGVDTLIKSLDATLRFKWEAAGTTTHRERQLLPYRLRAKGAGAGPADQLEPHELGRAILHLAMRRGFRSNRKDLAEEQDHEAASAQTSAQTGANTGANTGAQTDVRGQPVAADDAADAAGKVASKAKKAPRVSKKGSPLPREDADAPRASDATDAAPDKPKAPKQRGVLDSIIDLKARMDAGGFGTLGAYFASLDPVGVGRAGGERIRERWTSRDWYLAEFRAIWSAQSKHHPHLTQEHRKAIEKAIFFQRPLKSAKGLIGACELEPGKPRAPLANRVAQEFRVLAAVNNLKVREPGQPERGLTPQERKKVLAELMTGGDQSFTALRTLLGLKSRGPEKVTFNLEEGGEKRMVGHRTDAKLHKLFGARFEQFSDEEKSAIVTDLLQFEKPAALARRGCKRWGLDAEKAEDFGKLLLEPGYASHSAAALDKLVPGMRGGTHFATVKAELYGPHKDIGAALSDLPPIAEALGALRNPAVERTLTELRKLVNAILRKYGKPTFIRVELARDLKKPRKLREKLSKENRERETQRERVVARIVKEAGVPRPSRDDIERVLLAQECSWVCPYTGKSFGITDVVGRNPRVDVEHIWPMSQSLDNSFLNKTLCEADENRHVKKRRTPYQAYHNTAKWDDVLARVRKFKGDAARIKLERFMAEHIPDGFASKHLQETRVVSVRASEFLQTLYGGLNGVDSGGTRRIFAVTGGLTYFLRREWMLDALLPSREHGDGAVAAAVASKNRSDHRHHAIDAAVIALTDARAVQLLQTAAGEAAEKRRRLFAPIEMPWPRFQQDLDASIRKINVSHRQSRRVSGALHDQSVYSKPHPVPGRPSGSSEVEHRIRKALSGLSAGEVDRIIDPRVREVVKKAFAKSGAAKPADAFKQEGDLPTITDKHGNAQVIRSVRISVDKNPRAIGSSAKRTERYVLLKSNHHAEVWVETTKGGRRLGKLVIVPYFEVRGHRRKSDEHGRLFCFSLAPGEFVQIEEAGKPVLYRVNGSSQNYVLLVKHDDGRKRDERNRTGDNLRVGATELIAPTTNKVTVTYLGEVKPCGG

SEQ ID NO: 8406 - protein, 973 aa, unidentified
  REGION 1..973: note = Description of Unknown: Cas Enzyme sequence
MSDLILGVDLGTNSIGFAIRDKNKRGNQIIDTNVIVFPQGVGEEKGVEFSLASERTKHRASRKLYRRRKQRKTDLLNLLIDNGFCPLTTDELLLWSVYKKGQEMKYPTGNYDFSEWIKINPYEVRAKAVDSIVSKLELGRALYHMCQRRGFKSGRKDSDAGKDLERYLVEKKELIKYGFKTLGEYYFDLLTKGVQVRKTKFSVDDQEVNSSRISYVEEFNFLMKSQNIEKELADQFFDAIFFQRPLKSQKGSVGKCTLEKTKSRCAVSHPLFEEFRMFQYLNSIKVKERNNDTFVFLSDYPDYYKIAEDKFYRVSAKNFKFVDISKSINTVAKKNNLFFEFNYNDKYPVVGSPTVSKLIEVFDAKDWNDCEIKILSTYKKQDNKTIEELVNELWHTLFFSGDFVNDITSEKVKSFIRNRYSISEEKVNYYENISLKQGYSSLSKKAIVKILPFLEEKIIYPYAVFFANVDTIVGKEKWNENKQFIQDTIVDIISRYKNEILKIDIVNGLVGDFIKEYDNSNYDYVLDETDKKSVLEKIKVFYGKYLWEKMSESEKESLQNEIEITFQQQLQKRRVGGYYLSKPRIDEVIKDFLIREFNVTKEQADKLYHPSAMDAYPQSQDGFLGLPFTDSIKNPMAMRTLFYLRKLVNTLLKEKKIAPDTEIIIELARELNDKNKRLAIERWQRERENENKKFREKLEEFAKDSNSTVTETDVIKYRLCQEQNNKCLYTNETINCEKLLGANPQFDIEHTFPRSKTFDNSLVNKTLADKKLNQIKGNQIPQELPEKYKLNFINNTSHWKETVESLEERIEQQKYFSKVASTVDQKNRAIQQRHYLKLELDYWKQKLYRFTATEIKPNFKNSQLVDTGIITKYSELFLKSLFQRVFPAKGSMVADIRKSWGLDAKDRNFHYHHAIDAVVLSCMDKSIRDGLAEAFKESEENRYSDKFKIKKPWNTFTEDVNQLKENIIVVHNH

SEQ ID NO: 8407 - protein, 983 aa, unidentified
  REGION 1..983: note = Description of Unknown: Cas Enzyme sequence
IFDATITKQQTTDLGVRLIPILQKHFPDIKFDAKDFDSMRLNNGYASLSAATVKTILPYLKKGMLYSHAVFVANLESIFGKELDETTLDILRKEYAQILEEHKSNKEVYGIVNSLISDRMNERDRMNMGADYKLDEIDLKDINDKIKDNYKAKVWNKKTKEQQSQFIEDVTVLYENYLRQPMGMDKGKQFFKLSRIEEKIIKLLKDKYKISEERINKYLWHPSEQEVYSPANIKADKDGVVYTDERGNDILFLGDPNPISKGFKNPMAMKTLQYLKKILNYLLKERKIDSHTKIVVEIARELNDTNTRKAIKSYQDKRTKLRDDYKKRLAEHFNEVGDTNKAISDEMIDRYELWEEQSEKCMYCNKNIECADMLNGTAQIEHTIPAGISQCSELFNLTIAHPHCNSNKAKRFPTQWVDNYDLIQHNIKFMYAKYIGFKEKHEATYAGAKKATTKDSKDKQVQDRHYYKMHLTYWRKKYETFTIEEVTNQFRRQQLTDTQIITKYALPYLKTVFKKVEPQKGIITADFRKIFKIRERFEGKDRTKHSHHAIDAAVLTLIPPASIRDFLRKEYYAAREKNIPFYSKPKNWDNFHERYILGIEEEVLNNYQAQHRTLTPTYKAVRKRGEIQYVKETLANGKWQYKLDADAKKIPLVAKGDTIRGQLHKESFFGAIKMPLYDEKNGKFIPMNDGKGNLLFQQNEKRGDELFIVERETLTKFSALEDFDIVIDPNLGAYLKNELQNRINGGQTFAKAILEPIYAFGITIDKNGNPLNPIRHLRVKATGSGSAKPASVRVKKSFLSNKEYKNFDYAVNGEIPICVIYESIINNKIERQLESFSILQLAKTNTTNRFIDAVPIIYEKKIGNQTHLLPIFSILMHGLRVIFFEFELDELKNLENIDLLKRMYIAGSFEEGRLSLKHHLISMKEDEIKAKLKKMGASDKGSSKVDFNKPFPKLRLSQGALNMAIEGNHFDIKPDGTINWRKS

SEQ ID NO: 8408 - protein, 1431 aa, unidentified
  REGION 1..1431: note = Description of Unknown: Cas Enzyme sequence
MEKILGIDLGTNSIGWAIREVNEDIENQIIDKGVLTFDKGVAEDKSGEHPMVQKRTEARGKRRNYQAEKYRKWELLKCLIDAYMCPLTMGELNEWKHYKKGIGRKYPQRKEFLNWLRFDFNDDGKPDFEQYGLSKHDNCYAFRWLAISEKEEHKKYFVENKLLLGRIFYQLVQRRGFHNSGDSEETKLIEEGRKNALTKTIEVVGISVIDKLIKEKYKTLGAALYWGQKNKELEAVNHNRIRNRFTYRDYFKNEIDLIFENLGFDLQSDFCQSIKKAITWQRPLRSQKGLVGFCTLNRPLKSKTGKFYKSGKKRIPLSHPLYEEFRTWVDINNLKIEPPKQQEKTHYLEDVIFLMFNKASDFYYSDKVDKKGVKTKGLKTKIEESGGSILSKFDMELDEENEGKKYKANIFLNKIEKIFGENWKELLRWNETLAGKEKNGNYLRVEDLWHLVYDATVTKQQTTELGSNLIPIVQKHFPDIQFDAKDFDSIRLNKGYASLSAATIKVILPYLKRGMLYSHAVFVANMENVFGYKLDEPFLEQLRKEYDAILLQHKADKEVFGIVNGLMSDRMNEKDRINMGSNYILDELDLKDIDDKIKDSFKTKIWGRKTKEQQQKFKKDVVALHQNYLRQPMGIDKGKQFLKLSRIEEKVIKLLKDKYQITEERINKYLWHPSEQEVYPPAYIKADEDGVIYTDERGNEVNFLGDPNPISKGFKNPMAMKTLQYLKKLLNYLLQENKINANTKVIVEIARELNDTNNRKAIKRYQDDRAKLRTACKKSIEEYFNKDGDTNKNISDEMIDRYELWEEQNKKCMYCSNPIECTDVMNGTAQIEHTIPEGQSQCSELFNLTIAHSGCNTNKGKRLPTQWTDNYELIKNNVKFVYAKYMGFKEKHEATYSGAKKAATKESKDKQVQDRHYYKMHLTYWKKKYETFTIEEVTNQFRRQQLTDTQIITKYALPYLKTVFKKVEPQKGTITADFRKIYQIQGRFEGKDRTKHSHHAIDAAVLTLIPSSSIRDFIRKEYYAAKENNQAYHNKPKNWSNFHQKYISNIEDDVLNNYQPQHRTLRPTYKKVRKRGEIQFVQVKNSKEKKTYKLDSTGKKIPMVSKGDTIRGQLHADSFYAAIKQPEYKFEHEKFIPLSDEKGNFIFQLNEKRGDTIFIAKKILITDLKTYEDLDIVIDPNLKNYLQRTLANKDFAKEILKPIWAFGKKEDKNGNPINPLRHIRCKVKGGGGGYVSNPAEIRTRKEFLSNKTYKNKYYAQNGETAVCAIYQATVEDKVIRELQTYSILDISKNKGITCIDDAVPVNLEKTIKKIKYLIPLLAALKPGQKVIFYENDIDELKNINDVDLGKRLYKIVKFDEGRITLMHHLNSMKDDDLTKEMKRLNLPATGASKFNFAEPIPKLRLSQAFLDMAIEGKHFEIKLDGEIQWLM

SEQ ID NO: 8409 - protein, 1514 aa, unidentified
  REGION 1..1514: note = Description of Unknown: Cas Enzyme sequence
MKTVLGLDLGTNSIGWALISKDENTNLQKIEGIGSRIIPMSQDILGKFDSGNSVSQTAERTGYRSVRRLRERNLLRRERLHRVLHVMGFLPEHYEQSIDFKNCLGKFLNNTEPKLVWKECENGKFDFVFKKTFNEMVQEFKHFQPQLFDNNNLIPYDWTIYYLRKKALLHKIEKEELAWLLLNFNQKRGYYQLRGEEEEENPNKLVEFHALKVIDVTSDEPQKGKLELWYNVVLENGWIYRRSSKNSLEDWIGKNKEFIVTTDLNDDGTVKTDKEGKEKRSFRAPSEDDWTLLKKKTETDINNSNKTVGTYIYTALLQNPKQKINGKLIRTVERFYYKEELKAILEKQKEFHPELKDKVLFSAALEELYPNNEAHRNIFQAADFTKLFVDDIIFYQRPLKSKKSLISNCKFEYRTYKDAEGVFQKEPVKCVSKSHPLSQELRLWKFVNDLKIYEREKTINGKLYADFNVTSEFIKSLDDLVTLFDWLSARKEINQDMLLSSFFKVKKKKGEEKLPYRWNYVEDKEYPCNETHSQFVNRLSKIKDIPAGFLTLEKELALWHILYSVTDKHEIEKALQTFARKNELPTEFVDAFKKFPPFKNDYGAYSEKALKKLLPLIRMGKYWSYEDINTQTQERINKLISGEVDDSIKNQVREKAIDLSNPNHFQGLPEWLAAYVVYNRHSEAGEFIKWKTYHDLEQYLEEFKQHSLRNPIVEQVITETLRVVRDIWKRYGDLSEIHVELGREMRNPADKRAEMTKRVSENENTNLRLKSLLIELANDNEVENVRPYSPAQQEILKIYEDGVLKSGIEIPEDISKISKLSQPSKSELIRYKLWLEQKYCSPYTGETIPLGKLFTTAYQIEHIIPQSRYFDDSLSNKVICESVVNGNPYKDNQLAYEFIAKNEGRIVSELSTSFKTVKIFTLPAYEAFIKQHYTNNPGKKKKLLMEDIPEAFIERQLNDTRYISKVVKGLLSNIVREENEEEPTSKNVIPTTGNITDTLKKDWGLNDVWNRIVTPRFERMNELTKSDLFGEWVNKNGKKVFQTMIPLELQKGFNKKRIDHRHHAMDALVIACATRSHVNYLNNESAKANARESRYDLKSKLCFKAKNGEDGNYKWQFIKPWDTFTIDAQKALENIVVSFKQNLRIINKSVNYYQHFVNGEKVIDKQVKGDSWAIRKPLHKDTVAGQVNLRFRKHVTLPAAIEQWEMLVDKSLKTKIKQLINEGLDKKKIQNFFSENENKWQGKDISKPELYYFSNEKKILVASRTALNDSFDSKTIDSITDTGIQKILRNHLAKYHENANGKTIEHPELAFSPEGIVDMNKNIKELNGGKPHQPILKFRTYEPKGNKFSVGTTGNKKDKFVEAAKGTNLFFAIYNGEKATRAYETIPFNLVVERQKQGLSPVPEVNEKGQNLLFYLSPNDLVYLPDVEELESNNTVDFSHLNGEQVKKIYKAVSFSGTQCFFIRHDIANSIENKVEFSALNKMEKSITGLMIKDVCWKLTVNRLGIIDNVILLK

SEQ ID NO: 8410 - protein, 1460 aa, unidentified
  REGION 1..1460: note = Description of Unknown: Cas Enzyme sequence
MKKNILGLDLGTTSIGFAHIIEDDKDASKSEIKQIGVRVNPLTTDEQTNFEKGKPITINADRTLKRGARRTLDRYQDRRSNLIHALATAKLIDNDTKLAEDGKGTTHSTYLLRAKAVTAKIEKEQLARVFLAINKKRGYKSSRKAKNPEEGQAVDGMAIAKRLYEENLTPGQLAYQLLKEGKKTTPDFYRSDLQAEFDKVWNVQKAFYPEIFIDDFYKELAGKGQRATSALFWLKYKFNTAENKAKSREDKKLQAYKWRSDAAFGQLTKEEAAFVITEINSNLNNSSGYLGAISDRSKEMYFNKETVGQYLYRQLQKTPHTKLKNQVFYRQDYLDEFEAIWTEQAKHHSELTDELKIEIRDITIFYQRKLKSQKGLISFCEFESKTIEVDRNGVKVKKNIGLRVAPRSSPLFQQFKIWQRLNDVLIRKKGSKKRTAKKDDSQSNLFDEEKEVFVLDLETKQKLFEELNLKGNLSASKIIELLGHKTADWELNFSELEGNRTNLSLYNAYLKILEIEGYDENLLKLSDKDDINIAELKTPASEIKSMVQQIFETLGINSTILEFDAELDGKAFEQQKSYQLWHLLYSAEDDSKKYTEEEKLVFGNENIGLKKQLCSKFGFKPEHAKILVNVTLSDDYGSLSSKAMRNITTHLAQGFSYGGRKDKPNEPSACELAGYRHSAASLTKEEIETRPLKDSLELLKKNSLRNPVVEKILNQVVNVVNTLVTKNSEKDADGNITKPFHFDEIRIELARDLKKNAKERAEMTTNINAAKIAHEKIFKLLQAEFGVKNPTRNDIIRFRLYEELKNNGYKDLYTNVYIPREILFSKQIDIEHIIPQSKMFDDSFSNKTVVYRKDNLDKGNKTAFDYIDSNYGEKILAEYQQRLETLFESGKKNKDDPSAGISKAKYQKLLKKEIEIGDGFIERDLRDSQYIAKKARNMLYEICRIVTPTTGSITDKLREDWDLINVMKELNLPKYRALGLTEMQERKYGQQVEIIKDWTKRNDHRHHAMDALTVAFTKHNHIQYLNFLNARKNENHKLHNVIIGIEDKETYLETDENGNKKRKFKLPIPNFRHLAKEHLENILVSHKAKNKVVTKNKNKILGKEKPQIVLTPRGQLHDQTVYGLNKWSRIELSKKISKNEIESISDSILKEFLKNLVKQKGSIAKAFSDEELDKLTYNDKELREIVVDIPCYTQRIDLAKIFTDPQKTNSAKEKNLKNVLDLGVRSILTKRVKEFKGDFKKAFSDLEKNPIWLNEAKGIAIKRVTISGVKNAEFLHHKKDHLGKDILDKEGNKIPVDFVSSGENHHIALYRDEKGDLQDNIVTFFDAVRLGKAGEPIVDKTYNQGLGWQLLFSMKKNEYFVFPSEKSSFNPKEVDLLDPKNKKAISPNLFRVQSISKVSYGNSVVRDFIFRHHLDATKASDLNKSLQGISYHQYKSLSPLDKIVKVRLNHLGEIVKVGEY

SEQ ID NO: 8411 - protein, 1505 aa, unidentified
  REGION 1..1505: note = Description of Unknown: Cas Enzyme sequence
MKKILGLYIGTNSIGWAFIESNAYENPETLNGQIIQLGSRIIPMDADAMNKFETGIPESKAAVRRFARGARRLNQRYKLRRTRLIEALKILGWVPDTFPNDFKMLNKHNINTYLPFSETIKKEVAIFFGASNKKTTKGEQYEISDDWIIYFLKNKAKSNRVSLAELARILYHYNQRRGFKSSRKDAKMEEEATEVRYPLYEKWVEIITVIDIKETGKGEGKDKDFTFYELTCKTADLEFKAIKKRKTPLEWLDKNIEVEITKKTTKDLAINYTISEVDPKAWESRKKALEKDIDFRGESITTYYLNKLKSEPYFRIKDRIVDRSRYQNELKLIWEKQSEFYKAAFTDKQKIGLIADTFYSHNKEKNKELKGKDLFHVFFNDIIYYQRGLKSQKGLLANCQYETKSFKTKDGEVKDSGVKVVSRSSPVFQEFRIWQTIHNLKIFKKEDTVEGKLKLNIEVTSSLLTPENKERLFELFDTSSEVTHDAILKLFDFKKTRIENGEKTYDYKLNYPDDKDFPGNETKALFRKVFKKHIFIEEGEKYLSDKALLNRLWHIVYSLPEEKDIINALNNKKYFSIPEAVIRHISKLPEFKSQYSSLSSKAINKLLPLMRIGKYWKTEEINTNTLQRINKIIDGEFDESISEKVRDEIKGRNFSSQNDFSGLPTFLAAYIVYGRHSERINEAKYEAIEDFKINELIPYNSLRNPVVEKTIRETLRLIKDIWKNEKLGRPDFIHVELGRELKNNNEEREKIASANSKNRIEKERIAKLLQELKYPNFNPDSPSDIDKFKIWKENGGQEGDEEFDSLFKKNNSDFIKDADIERYRHWAEQNYRSPYTGKMIRLSELFSEKYQIDHIIPKSRFYDDSYGNKVVVEAEVNAEKDNRLAIQFIEDYQGREINLSNGTSVTVLSMEDYKRFADEVFTSKKKRRHLKLYEVPEDFVERQMNDTKYISRTIAQFLRPVAIGNQTDEGLVYTSGSITSDLKNKWGLNKLWKEILKPRFERLEKTLGKQFILPSDTKQSDYHFAKDYKRIDHRHHALDALVIACSTRSHIKYLNSLNSLSNNKKDIVKYNEWQKWSYLLRKKRQLENQENGMTEFALPWDGYYLQAKDAIESVIVSHQPTSKLISKAINKYQKWIEVEPGKWEKKIVSQKQPKDDDKYWVAVRKALFALPLGTVTQPEYKKGIELKKAIKAQINFLKRENKRWSCEDWRIAKSTIRRRVDGIIRMYDFDEKLIWKYLETNPQKDEDDNVIERLDLLQFKKYASKRRTIDDKFTADVIKKMPGAELEKNWLTKLLKEHLSENEDSPTLAFKGEGLEKLYKKAPYPINKVTVLDGEAKNKISLRNYLLEGVAGVNQYFLVEISKELDKKTGEEKIIRKYSTPPFLECIERLAKGLSIHDEDPNKKYIILSPGDLVYVPEEGEKDNQIDWNNKKKISQRIYIMKSADGLFIPNYIAKPIVPYSRKEKTKGEIDWNDKSDRTFDTKQLLIRENFIKLKIDRLGDISSA

SEQ ID NO: 8412 - protein, 1242 aa, unidentified
  REGION 1..1242: note = Description of Unknown: Cas Enzyme sequence
MKTFPVVHFAFDIGHSSIGWAVLQASLPAPPELLGCGAVIFPADDCLASQRRGFRRQRRHIRATRLRIARLRRLLEHLGMLTKAQVEAPGCAWPWLLAARVLRGGAKLTWGELWDVLRWYAHNRGYDGNKGWSRLDAVASDEDTEKEKKAHELLDAFAAQHGRAGSMAEVFCDVLKVDPLGAVRSSTVRVRNLGAAFPREGVEAEVERILRAHLGSLPQVDDRLITAIMRDHTALPGPDYRLPARYGQRVNGERTAGGLLFGQLVPRFDNRIIATCPITFQREHDRVLAETGDEERATHEATKLAKVPALDCPEFYRFRWAMQLANVQVATGDERKTRRLFVQERATVNAAIEAAGAFTPGEFKKAVRALTAGAKDNLDQMLALPDADRSLVLDPARKFASGGLLGILWPHLGATLQKHTLTNLRRGKAVTARALLVAAPAAQAAFDRWWDGGAMKKPRKPRKPGTEEDVPRTRDQALDERHALRPDTGRAPYTRAVLREVAAFILSTDRHPADGQDGAPGNGPLFRSEAIRHAQLQRAIDEQTNNHLVRHRLKLLERLHGDLLKEYAGGDASRIARITIEVNRDLKEMSGKTAQEQAKIQGQQTAQFRGVEKKLAAAYEGLGVHLAPGLIRKGRIAEDLGWICPYTGATYDALDLLHRRVDKDHIIPRSQRASDSLDSLAITFSEINKWKGNRTAVQFVEECQSQPVPGRPNVQIKTLSNFTKDVEALETYKGHDDDQRRKKNRKRLLLLRDYVEKEFTPGDLTKTSQLARLGAQALHRAYLPATGRTAPALPGRVGVSPAGPGVPPGRTSQPAGAQRLAKTGDAATQDASLGGRDAHPTRDVHAPVITSLPGSVTGAVRKSWNLLGCLALANPLVLNPDDLDTDGKPKVHRKTEIRGITHLHHALDACVLGFASLFLPRDGGAWELLTKRRLKPDEQKRARELFGTQIEITQAGELRLADLPRGLKQAVGEKLAERRVVQHLPRDLSGMESKETVWRAFDPTDAHPNARRLAKWLAQKEIRVPTPDAKTALIICRKRKNADAADGESAGGKVFHEGKTWRWVYDIKDKSALLGLAPEGDPAQAKLKKLKAVKVLGDNFGIALDPETKLVAGSAENLIRPHKVWHQLEKLTAENGGKRVRVIRRGSLIRVTRAKSEKVDYRGVWVVRGAYFKQKGGYMVDLSPADYVAYRRVRGAFETVSVVTLLKCGLEVLRPSLAGLGSPPVSPRAGSGAKGSAERTLK

SEQ ID NO: 8413 - protein, 1567 aa, unidentified
  REGION 1..1567: note = Description of Unknown: Cas Enzyme sequence
MPENQILSLDLGSNSIGASIRNISEENQFENVTVITFETGVGKDSTSGQYTISLAANRTAKRSVRRLYQSRKYKLWAVLKALIKGKSNLYCPISEENLNRWKHYDKAEAKKGNGGRQYPVNDIGFANWIKLDFNKDGTPDDFSPYQLRNDLATVKLDFAIEENRFKLGRALYHIAQHRGFKSSKIVKNKDDDAKDNKSEDTVEINIGAERKKADNLYKQIEVLNINVNPERATVGMIFAKIETEGIHHPERKTEGIRIRKNLHQYVTRKMLIQEVKHIFDFQGLDFNSIFGDADSKVTVSKSVMFWQRPLRSQKGLVGYCTLESIKTFEKKKGKEIITGKKRCPVSRPEFEEFRALSLINNIEYRYKGNKDGSWQKLQKEIRNQLYQEKFFVQKDFEFFGIHKWIETKNKHKDWELNYNFKTSVPACSISVRLQNILGDDWNKTISKIDKKGNTIQQPLFEDIWHVLFESDDQEFIEEYGKEKLQLNEEQIKKLVSLWFAMPVGYAQLSLKAINNILPFLREGFIYTDAVLLGKVPEILGEIIWNEHKQFITEALQKDVIEKNRNEKRILNIVNNLIAQYKAQPKDKRFAEKDFNYHVGSMDNKFPEDSIERDTNQILKACEDGYGKETWKKLNAEAKDNSVKEVIAHYQSFFSDQKRDFKPLPKLGDAMKLFIRDDFEDTFEGEDKDKFLKRLNKLYHPSMIAIYPAAREEFYKHGDIEKKAVMLGSPKTGAFKTPMAMRTLHELKKLINYYIATGQIDEETRVVVEVGRELVDTNKRCAYEKYHEIRRKENEEFANAIRELLKDPEASDSLADENNDSDIDKFRLWYELIESAEGFEKNGKFTTSEEDNKPIERKKKKKSGKKEGEDEDEVFYEFSKNHFDKIKKEVWVKLTKAKDNIVEKYRLWKEQQYFCIYTGKPIKITDLFQTNLIDIEHTIPRSMCFDNSLANKTVCYADFNRNTKKNQLPQSLSNSQEIEHRLEKWQQKVKDLEMRVEFWKGKSKQASTPKWKNDAIREKHLWQFELEYWRNKVDRFTMKEVKPGFKNSQLKDTQLISKYAFHYLKSYFNKVDVQKGVVTAEFRKIFDIQKTGTPKDRSKYSHHAKDAIVLSVIPVAAIRDKMLEVWFRLDELKKENGEHQEIQRLEQELQQLKYQCNLPKGLNNTIKKLDEELLINNIARNRSLIPVSKKVNINGKDRIASGHAVQGQIHLDSMYGKIQMVELDKDNKPKRDENNKWLFKGGKEEFAFALRKEVDKNLDVEKIVDPELKKIIINQIGNRNLATTLAEDGGLYMLKKDGTRAHKIRHVRCLAKDVSDPIRVRSHSIQGNKEHKNYYWAKNGENILCALYEKPLKDKNDKDIIDRELEIISLKDAADLLSAGEIKKIEDLENLLYRKDGKGNPILDENGNKEKPYAILKPGMKVIFYDENMEELKKKESEKESDYKKRVGYRMYQIVKYAGDQLTFQHHLEARLDPELKKSYPDFKQDEKGNYLNEKGEIIDRKNKKERIRIYGVAGTSGFTQSVSDALKQNTYNNFEPWPKLLYSADWLNMAIEGKHFEVLPDGVIKWH

SEQ ID NO: 8414 - protein, 1096 aa, unidentified
  REGION 1..1096: note = Description of Unknown: Cas Enzyme sequence
MTIKDYYLKSSVSNNWQEDPFYTSSLVLGLDIGIEGIGVWLRKGPTPLFYRTYLVTLPDSAPLSGRRQMRAARRARKSRQHRENQLKAWIVKYGLLTKERVEEIWRNPKVFQNAFDLRHRAMNAGLKSTEALIVCIRHLVKHRGFDYHMTEEGSHPWGESLEYSDITKWLNTAVVSGDYATKTIQVLRDNAEWALNDKAEETEKLKKIELSFDDAVKKYDNNPVEVMLTNHLKEKNHVNLRERARGHNFPRELIKGHLRQICEKHKSFFGSNFDGAMNELLGALQSGAEVYHRESIIDYHRKTPEEVKALWERKVNDCPFSQILHDLNKINSHPQKCSSSNDEDIRKWKLSGFLAERTVVAKSGERFYLPERCVKNLFELLDKDIKAIKNKTPRPELTSLRKQIEEFFGKEFKLAPDSASHNKDFFFQLKDLLKAKFLTLNKRAGLSSSSAKALFDIATNCGVCLEPEKMLKNLIDAEYYKWRLNGSNGGPRYPQVEFLMGPRIQNDKQTVHGILRRIFARPEIQQYLEGKQCPDFSVVECIGDIPRNTKQKKELLDDLKSSRKNKDAIYEKYGLSWKSNSQDIKKALLFDQQQGHCPYTVESLGKSPLSNDLEIDHIFPRSKGGISEMVNLVLTKRITNGEKGDRTPVQWKGKKALSDILPKMKWNKAKKELFLREETECPEWENITRTAQLARQLKKEIASWMEIEDQPGQIAKRIGTPTGFMTSICRHSWKDKLPEWFYDPETGKKDRNNLRHHMLDAAIVSHIPPGKGLNNIVYGGIFLYDSFEKAGQINMSAIPDLGPDLVSFQSEHTLDCLVTKPRQSKSKKSRTDKTIYGVDGKQKNGNPILWSREEIQAKQNKQNDNSPLIPVKNVESMLQNSGIPVDKLPRKTLQNWMTSDKSKTLKLIDGTPVLRVPVEGNNEALSSLVPHYNHESSKPIGYKVSTETYLRKEIWQGETIDKKSKVKIVYDSLLIPHPRNLRNLRKQKLKNKISFSKSHLRNLKKVGHFEKGQLVFVPLDREGNIDSIHDSKKHFCSLWYRVTGIKTNGQLLLQLAEFDSTKSTPLKNLERQIELLQPSSAEVLAFIIEYNQKIKA

SEQ ID NO: 8415 - protein, 927 aa, unidentified
  REGION 1..927: note = Description of Unknown: Cas Enzyme sequence
MEDKNELVVGLDVGSNSVGWAVVEMNGERLEKIHGMGSRIIPMGDEKKEFEQGAKITKNNTRRQKRSMRRNHQRYKLRRANLVKVLKLMDAWPDGLGEQAKPDEPVLTPLQVYGLRALAVEDPVSLKELGRVLYHMNQRRGYKDIGDLMDEQDGAAPSEAKDDGKRIEKVFIEAVEVDDDKGKKVKYLVRLGDGREGTCTLDIIKGMIGTEQELEITTRKNKDGERFEFRLAQKTDWRKGMESINAAIDASGLTPGQYFHQQLKNDPFYRIKEQIVLRDTFKDEFKAIWARQVKEQPALNGDDLRDHVVKALIPNNLAEQAKWIKKRLGDFICGYVIYYQRPLKSQAKDKGHCRFEVGAPAKDGNKAIPPKQVMPVSSPIYQLFRIWQQVNNIRLIDRYSKESELSASERIVVVECLLEQHELKRESLLKELGRKGEDMGDNLRANLPGHQTLDKLRPLLKKTALWKRLQREATQLKDPQSTLLFRIWHILYSVPMEQDRVKALEKLKDLPSDAIPALAKVRYERKHGAVSARAASRILPLMVCGNAWSLANIHERDQRRLQMLIDGEEVHGIEPEMREHLRTLGSIEHFQGLAYWKAATALYGDHRAATAKPFDKPEEIKTLGRGFLRNPVVEQVVNETLMIMRDIWSTYGRPTSVRVELARELRQNQKERERTFDNNKKRDKERKDVVKKLIEVFDRPKPSRKDIERYDLWIQQGMRCIYSNHVINDRQLFDSRDTDIDHIIPQKLFYDDSLQNKVLVLRKENADKGKQLGALYMKSKGVAEWETYVDRVNKLKAGRGKKNYLLAEEVPDSFIKRQLQDTRYIGTKVIELLQPICTVNSTLGIVTNALKNEWELDKVFKEMLLPRFKRLGRIVRGDEMSLIREIPITNGHKHMDWKIEGYDKRIDHRHHALDALVVALTRQRYIQ

SEQ ID NO: 8416 - protein, 1220 aa, unidentified
  REGION 1..1220: note = Description of Unknown: Cas Enzyme sequence
MNRIILGLDIGTTSIGWAVVAENDGTKTTIKGIGSRIIPLANDEKNEFQAGNAISKNQKRTLKRTQRKGYDRYQLRKEYLRVKLSELGMLPDIALFTLTALELYGLRVKAINEQISLQELGRILFHLNQKRGYKSSRKDESKDKKETEYVAEVISRYSKIKEAGITIGQFFYNDLLTDERYRIKDQIFPREAYIEEFNAICTKQSQFYPVSLTGKNITQLRDEIIYYQRPLKSQKGLVSICEFEGKWYKNKDGKEVFGGPKVTPRSSPLFQVCKLWETINNITISSKRGEQFVISMEKKNELFNYLDNHDKLTETELFKILGITRNDGYYGNKQLTKGLQGNLTKTAMAKILKDQPDIEKIITFDLSPEPYEEVDKNSGEIVNRIRIKADFETLPLYKLWHILYSIPEEKDIVKKLLMDFNLPEEEARKLAKLDLTKGGFSNKSARAIRNILPYLQKGAKYSDAMTLAGYKHSDSQTVEENLIRPLKDKLKLLPKNSLRQPVVEKILNQLINLVNAIIEQYGKPDEIRIELARELKQSLDERNNTFKNNTKRENENKGIVLRLATEYHVKANRRNIEKWRLYEQTDGHCLYCGNKIELSDFLNGDESDVEHIIPKAKIFDDSFQNKTISHRRCNKAKDNSTAYDYMLTQSEEQLHRFEESVAQLFKTYKITKAKRDKLLMTEAKIPTDFIARQLRETQYIARKSREILHEVCRNVWATSGSITQKLRKLWGWEEALMHLQLEKYKAAGKTEWVEFESNGQQHKKERIIGWTKRDDHRHHAIDALTIACTQQGFIQRINTLSAKHTRDEMLAEVKDQVYKEKLTLLEKSLLTKRPFDTAAIENLVSQILISFKSGKKVATLGKRKVKKDGKLITKQEGIIIPRGALSEESVYGKIKRRVNETVKLSSSFTDVDLIINKTCKALVKQRLKNFDNDPKKAFGGLTKNPIWIDAAKTQALASVIVSTYKEEYVIKYPIGSITVKDLPSIVDFGVRKAIQKRLETYNNNPKEAFKDLENKPVWLNEEKKIAIKTVRCFTGLDAVVPVKYNDQKDAIGFVKPGNNHHIAIYVDKEGKKQEHSVTFWDAVERKMNGLPVIIKSPKETWDTILLNKNKYTQGFLNKLPQDDWAYLTSMQQNEMFAFNLNQEALNEAVQNEDYGLISQNLFRTRKISSGIYWFNHHLETEPKESLEDKKLKRCIQASMGSFSGIKVNIDALGRIVKIGE

SEQ ID NO: 8417 - protein, 1026 aa, unidentified
  REGION 1..1026: note = Description of Unknown: Cas Enzyme sequence
MTNTCLGIDLGTNSIGWALFATDGHGEARSLIDSGVRIFTEAVDAKSRVPKNQARRQKRQLRRQLMRRRRRMEAVRNVLMQTALLPAEVGTAPDQEGLWNRLGDPWQLRAEGLDRALAPHELGRAFLHLARHRGFLSNRKAARKADEDGTTTDAGINLLSQTIAAAGNRTLGEYLSKQPVQRNRDDQRPYYTSRAMLLAEFEALWKAQAPHHSVLDDALLVRLHRAIFHQRPLKSQAHTIGVCQLETSVGRSRPRAAWAWPVAQRFRILEQVARLRLIHPHRAEAQPLSVAERQALIQTLTGVAKLTWDKARKAVGKVRGTTLGKQELFNLEQGGLEHLIGDRTGTSIRGILEDEWDGFDAAKRHALVEDLLTIDHEDGLLRRLQEHWSFDRQTAVALGKLRLEEKPGRLSLKAIRNLLPHLEAGLDYDGACQAAGYLRRDQQVRGQAARLDAPPNLRNPVVMKALNEVRKVVNGIVRTHGQPSVIRVEMARDLKMSPKDKEAFEKAQKQNAKVNAFADDFWQQLGVRASHDDRVKFRLWRDQGEVCPYTQHTISAAMLASDAVQVDHILPFSRTLDDSYGNKVLCLTQANAEKGNRTPWEWLGGQGTRFENMLVLAEKMDIAPGKRRRFAMTADEFALAYGGERDFVARQLNDTRWICRAVKDYLGSLAGVTVEVTKGEATAALRHQWALNPLLSDSMEKNRADHRHHAVDAAVIACTGRAVFQRIAAAAHKARGDGWRNRIVDPPWEGFRAAVRDRLATIVVSHAVDRRISGGFHEDTAYGVAKEVDGRLELVYRKALTRLTPAMLAKIRDPVVQELVIARLRAEGLDPDAFAPKDAALVFGNPKQPVLHKDGATPIRSVRILKPNVDARGVMRRGGRTAYELGNNHHVELIRNTATGKIEGCFVSALEAANRARRTQQPVINQGIGTETDYICTLHINDTVEVPNADEKRYYRVQQLSPVDGGKITLRLSTAASLEENSQRLILTPNTFIKRSIRKVSVDPLGRVNPDDQARHRDRQPGPPAP

SEQ ID NO: 8418 - protein, 1354 aa, unidentified
  REGION 1..1354: note = Description of Unknown: Cas Enzyme sequence
RKYRKWELLKVLIVGEFVPLGKIEFEVWSKYKKGQLRKFPENDLFLKWLNCDFSYFEGGVNYENPYDLRVKALDHKLTKHEFGRALYHLVQRRGYKDIGETDTETKKQIERRGESGFQTALDNNRTIAEALTKEFLNKGERARNQYPYREEYQDELEKICKGQGYDISKSEKGDYKDQFVENLWKAIIWQRPLRSQKGNIGKCTLEPTKSRCPISHPIFEIFRTWSFINTIRYYDKDDKKQPLTESLSNQLFDFFLKKDKNFKFEEIRKFLDKHLNDRKVYNYPIDNKTGLYDTSVTGMPVCKGLISLWEDDAKEHVSNLHNYNIGNAPKIIHGYSFYDLWHILFEFDERTAKHKNFLEKFSEENLKIKKVENKKGKEIFLFAELKKNIVSGYSDLSLKAMCKIIPFLKEGYLYNEAAVLAKIPELLAEKWHTEKDKILDILRKSNDIYNWNKTTIGIANNLIDQYKGLESYEKFAYKDFQYTLVEDDINDIKKNCIGYFGEKSWNIITDKDEILKTVKEQYQAFFHDIKRSFRVVPLLTNIFQLNLKENNIEINGQLYHHSNRENMYGNTILDKKTSIEILPEPKIDSIKNPMFNKAMSLLRRLINELIKTNEIDNDTEVVIEVARDLNDNNKRAAIERYQNERKNNRIKYREFLNEFKEKENHSLNIEESIPAFELWTEQTFEETEDENKKKIANKNTIDILKEKETVKRYELWMEQKGQCIYTGKIISITQLFSNEIDIEHTIPRSLLPDNTMANQTVCFAKYNRDEKNNELPSKLRNYDQDWRGYTAILPRLDNWRQTRDGFKTRYDDRLKPKGNEDELTKSKRIQEKHYFRMHYDYWKDKVERFEAGEVKDSWARRQLVDTQIISKYAREFLKTFFKKVAVQKGSVTADFRKIYGFQEEDEIKNRNKHTHHAIDAAVLTLIPVNSSQRDKLLKKMYEMDEKENKQFTITPFSSFNSQKLIQDIENKTLIVNYEKDNLVKQTYRNIRKRGKLQYVKDKNGKFIKNINNEEILKTAKGDSIRSTLFKDTFVAKIRDVERYSDGQPIRDGNDWKYKKDKEEFIYAVRKPIKDVLSKIEDIIDPVIRELVRSQKNNPEIKDYQGNIIRHVRIKSSIGQKVKERINYRSSHEHKNHYYSAAGSLPYAILLQKSNQGNVEREMIPIASFEVAKMYKKSGVFDIEQYVQENYPDLSNYADKKLLKVGQKLIVLNNDKEYEKRNDMNFITKRLYFITQFSDGSIWLKYHLEAQAKDDIKDATYQIKNTILRNYEIQYELPEVIEDNTIEDKKLRKEDYERRKFSFAQLDNFRLKRLIEKIGIEQTKEIKKELDKYKAIAASVSVETEGKTPLLKMAK

SEQ ID NO: 8419 - protein, 1277 aa, unidentified
  REGION 1..1277: note = Description of Unknown: Cas Enzyme sequence
LLNFNQKRGYFQLRGEEDDDPTRTAQTRIYFLSEKIESIDDTKTVYKGLKIFRIKLSNGESGKYFAKNEPDWLGMEKNIIVTIDTDKDGNDRLEEDGTIRKKFAIPTDDDWEKKWKLIKIKTEKTIRESGKTVGSYIYDTLFKNPSQKIKGQLVRVVERNFYKSELEQILLKQKEFHPELNDADLYFKCIEELYPNNDAHIKNIERRDLSYLFLDDIIFYQRPLKSKKSLISDCQYESRNYFDKQTKEKKSQPIKCIAKSHPLFQEFRLWQFIHNLRIYEKDRIINGNELDVTPDFLKSEEDYTKLFSWLNDKKEIEQKVFLKYPAFGLKKSSEKYRWNYVEEKSYPCNKTRNSILNKLDKNSKVILTQDIEIKIWHLLYSVSSKAEIDIALAPNENRKSNNKAIFDMLIENNFTNEEINELKRITFTENDYGSYSKKAIKKLLPLMRKGSYWQEINIIPEVKLRVEAIIERLREIDFDEKKIEIITDDDIPKQILKSFAKTKGENPLQGLNTYQACYAVYGRHSEARETLKWESPEAIETYLKTVFQQGYLRNPIVEQIIKETLKVISDLWKYYGKGKPNFFDEIHIELGRDMKNPADKRKTISEQVNANENTNIRIKSLIAELKADSNYENVRPYSPSQQEILKIYEEGVLKSNIEIPDDIGKILKTAQPSKSELVRYKLWLDQKYRSPYTGEIIELSKLFTTAYEIEHIIPQSRYFDDSLSNKVICESEVNKDKDNNTAFQYISGNSEKIIELSFGKKVKLFSIEDYENFVKDVYANNRSKMKKLLMFDIPDSFVERQLNDTRYISKVVKNLLSNIVRQDGEDAVTSKNVISCNGNITSTLKHDWGLNDIWNELISPRFQRMNELTNSEAFGKWENKAGKRVFQTTVPIELSKGFSKKRIDHRHHALDALVIACASRNHINFLNNEYAKEKQSDLRFDLRRLLCEKIADGQNSKSYKWVFKKPWDTITQDSKSKLQTTVVSFKQNLRVINKTVNSTQQWKKDENGKAIEKVFDKQTKGDNWAIRKPLHKDTVKGIVNLRLKKTVQLSAAIDNYQMLVDKSLKSKIDELSSDNLNKIAILKYFKDLQNMWDGKAVSRVEVYYFDNNFVASRVALSDAFSESVIESITDTGIQKILLCHLKQDIYQNQKDMNGKLILPEIVAFSPEGIDEMNKNIVKLNNGKFHQPIFKVRIYEAKGNKFNVGYNGNKINKYVEAAKGTNLFFAVYQDENGKRSYECIPLQVAIQNQIQGFPIAPHDNVDEKTNKIKTLLFTLSPN

SEQ ID NO: 8420 - protein, 1089 aa, unidentified
  REGION 1..1089: note = Description of Unknown: Cas Enzyme sequence
MTAKRYILGLDVGVASIGWAVILLDAAGRARGLVASGVVLFEPGTDGGMKKIGEGQDTPRNKERRDARSMRRQTWRRAKRKRALLRTLIRHGMLPLPAGGAALRRPADIDAYLKSLDAGIIDKWAPDHTARQTWPYHLRASAAGGGEMSVFEVGRALYHLAQRRGFLSNRRTDIKPKAGEDKSVVKRDIADLQSAIDAMSSEPRTLGAYLATLDPDQQRLRGRWTARSMYAHEFDTIWATQCARHAVMTEVARVDIHTAVFFQRPLRDQSHLIGRCSLLPSERRCPLAVREYQRFRVLQSVNAMQVSVAGEPIRPLSPEERAALAQTLIHSGDLTFARIRTLLRLPRAAEFNMEAGQTGKLIGHRTDAKLRHAFGERFDALADEDKDRVVHTVRSFRSQSALAKALETTWQLDPAKAAWLAEPANGFEEARGSISLKAVRRLLPFMAQGQTYAEARKQAGFASDARDATPLDRLPPVIPVSRSERSESSPLRNPSVVRALTEVRKLVNAVLVRYGKPEIIRVELARDLKRPRGEREAVTSRNSARAKQRAGLEARIIKEGGVSRPSREDIEKALLFEECGGICPYTGRSIDFGSMFGKHPQVDIEHVWPRSRCLDDSFLNKTLCFADENRGRKGGRTPFEAYGGGSQKDDERFNQMLDRVQRFRGDPFVRTEKFRRFQATQIDAGFENRHLSDTRFISKACADYLALLYGGNTQMRIDEDGTRRVQTPTGGLTAWLRSGWGLSRLLGDTAEKNRGDHRHHAIDAMVIALSDHAAVKRLSEAASRAEKVRKRHAFDDVGEPFAGFREQAKGLIDAMIVAHRQSRKITGALHTKTVYSQPIRRPDGTADGKTEHRVRKVLAKLSPTEIKKGHIVDKQALAAIRAKLAELGMAEPDEGTIKQTFSNPENLPLVRGFGGKMVRLRKVRVLERKHPVPLGGKGKHASPVKHILTEGNHHTIIVESKDAKGRTVWTDHPLTLVAAVERLNGKRPVVCRDVGPDRKFICSLAPNDYLQADSPRGDGGRRLYRVSNLSEGQNELRLHNDARMASDLRGRRAEGRKDERVIVDGEKLRKLNARKVRVTYLGEVLPAND

SEQ ID NO: 8421 - protein, 1000 aa, unidentified
  REGION 1..1000: note = Description of Unknown: Cas Enzyme sequence
MSEKTKKILGLDIGTTSIGWAVVEVVKADSDQTNDASFVNNERTGIIENGLGVRIISQDTEQFDKGAKLNDFKAGTLTPTANRRKYRGVRRMRSRYKLRRGKLINLLDTLGILPQGAKIQTIDNKANRIAFREGGEYYTNVKGENGFDIGKKIYELRDRAIREEISLQELARILLHLNQLRGYSSDRFAKEEKSAFDYFTGTVSKISEQPYKIDYSKTEKAEVVWYQFLITIELENPISLKDESLIDRISNGIIFVKELSQITYKTGDIISFKIEEKDIKEKNKVVGNYIQVKPVKPNPEDWNYKYQTLQRDLTEWCISGKTVGSYFYRNHYESKLPEFRIRNHVVNRQWFENELDTILNFQYQFHNNFFDSLNIEQLVRSTFKNSEDILSEILKEKSSLDQFRSLVKEKIIFFQRPWQQAKNKGRCPFEKILVKRQLIEKGTGQKSVVELHVGRMVIPRSHPLFQDFKVWQQINNVRLYLNTKDEKIDLFEFPKIFKTYTGKEPGEVKELLYEALQSAKTLTWRTFVKEKLVIETYEEQIDKAKKGKVVNRETGELIDGFFSVNFRKKRKDGTYEDIRLKGNTTKSAFMSLLGHYDEQWFQELHSKSDQKLLSKSKASNQPVTCKEPITNLQLLWEIIYDITTIDKSKVAAILENQFGFETDLAIQLAGIQFDDAGMGSMSAKAIRQILPLMSGKSDPTEKANRRIQSLINLNNSAEELQREEKLESLRDFISDKKARIRLANFKSGLDFRYLNYWEATAVVYGTHSSLNTRTVGQMKTVENHSMNNPIVEKIVNETIRLVNEIYSRIGFDEVRIELSRELKASMDERQQIWESMIENNKKNEWGKQLLREMKAALLEEAMVDNLDTSFSNKANLEKIKIVENVVQNLKKDEYKVKVKEYNLKEPTSKEIQRYLLWLDQNFKCPYTNQPIRLSEVFDRNKVVEIEHIIPRERYYLNSFANKVLTWRAVNQAKQDYGNRTAYEFIFSKRLGSDTIRINDK

SEQ ID NO: 8422 - protein, 1047 aa, unidentified
  REGION 1..1047: note = Description of Unknown: Cas Enzyme sequence
KVNGENLTEAGRNAVLPCFFHKSKSTFPIEDVRRALKKAKIEGELNYEKWESRAAKENKEVKLTGAVTIAHMAALWNVEGIDILRAYGPMRKENEDERQKWDDRWNAMHREQNAWGEISECKLKGQYVRKPDSKHEQRDLKEYAKDVWHLTDEQVEDKKNFDLKQGYHNLSARVMGRILPYLYQGIPYHDAVLFANLPAVFKVVHKKMDANGQPLTDKNGDYITELRTGADGKPEPKMDDRWVGMTEDQREGIRAGIREQVKGQRQYSVETLLLNGLIRKYIDLFGDEGERKGFWNDQWNGRLDHAVDEAYTKEQKRTMGDEGLKTLAGQVKTAFLHHIESHQKVRFEKMSSMEERLKFWLIDTYPEYELAKTIDKRGLKRRVDQLYHHSAISTYRERDDRLGSPLTRGMKNPMVYRALHTLRKLVNDMIAAKLIDKKTAINIEMARQLDSANKRRAWENYQAEMKARNEKAEKEVREHFEASGNPHNPSDDEIERMWLYHEVLYLFGEAKCVYTGRIIGVNDLFNGGVEIEHTWPRSRTADNSMANKMLCDTRFNRDVKKGHLPGALPNFNAPARAAGRECPAISDSTKPIYAKWMKYQRDVDEQRNRSKAATTKEQKDKAIQKRWYAQFFRDYWRTKYEHLMADEIKPRFLNKQLVATAQITKLARSYMNSYFDKVVCYKPEALSAFRKEWMGESFVKEKDRSKHSHHAVDAAVCAAVDRNVFDELAKYYGVHDTTNVAASFDHPWDSFGTEMQKLRDGALIYHVDKASIGRRSSFNKKVKLKDGRVVEVQATGDSVRGALHEDTFYGRIKRKIKDTEDYNTVTVIRKSLLGVTQFAFTEADKANVVDKHIKALLADKDLEKIKAEGGLEMKVKNGVGFTMQKLKKVRVLIVGRVKNPVAIKAHRDQLPGFEHKHQLWVTGGENPIAAIYNDERGRPYGYVYSLLELTQHMKRTESVTRGMLSRAIPRRHPEHPEWEIALVDGNPLVLHAGQKVVMYKSGPEEIDRNDHQDMNRRTYVIDELQIKGNSCRLLMTNVLDARKPDLI

SEQ ID NO: 8423 - protein, 1371 aa, unidentified
  REGION 1..1371: note = Description of Unknown: Cas Enzyme sequence
MKKILGLDLGTASIGWAFVNEAGSENEKSSIIKLGVRVNPLTVDELQNFEKGKSITTNADRTLKRSMRRNLQRYKLRRQNLLEILMKNNFIDDNTILCENNNRVTFETYRLRAMAADEQVTLVQFANILLMINKKRGYKSSRKAKGNDEGQLVDSMEVAKKLYDENLTPGQFVYDLLKDGKKYIPDFYRSDLQLELDQIWEFQKQFYPEILTDDFKVQIVNKGKQNTSKTFLGRYGIYTAENKGADKRMQSFKWRIDALTRQLTKEELAFVVSDVNGSISNSSGYLGSISDRSKELYFKKQTVGQYLMEQLDMHPNFSLKNKVFYRQDYLDEFNTIWDTQAKYHPVLTEELKKEIRDVIIFYQRRLKSQKGLVSYCDFESRKVEVEIDRKKKVKTVGPKVCPKSSPLFQEFKIWQILNNLMVTDKNGCGKRLLDQNEKETLFEEANIKKEISKDEALKFLFENSKDLDLNFNVIDGNKTQAALFKVYQDIVELSGHGEYNFSKMSANEVLNIVEIVFKGLKYNTGILKFNSDLEGEEFEKQPLYQLWHLLYSYEGDKSNTGNEKLIEHISRLCGFEKEYASLIAKVTFQPDYGSLSSKAIRKILPYLKEGNEFSLACAHAGYRHSKNSLNKEEIQNKHLKDRLDILPRNSLRNPVVEKILNQMVNVVNSATESYGKPDEVRIELARELKKSAKEREDLTTAISKSTAEHEKFREILKKEFGLGHISRNDIIRYKLYRELESNGFHTLYSNTYISPTKLFDKEFDIEHIIPQSRLFDDSFSNKTIELRSINIEKGNETAYDYVGQKQGSDGLDNYLLKIEELYKAQRISKAKYNKLRMKSADIPDGFIERDIRDTQYIAKKAKSILEEFVKYVVPTSGLITDKLRKDWQLIDVMQELNWDKYEKLGLTEIFENRDGHKIKRIKDWTKRNDHRHHAMDALAIAFTKRSFIQYLNSLNARSDKSGSIMGIEAKELYRDDKGKLRFNPPIPLDEFRAEARKHLENTLISIKAKNKVVTGNINITKKKNGLNKKKQLTPRGQLHLETIYGSMQQYVTKEEKVGSGFDEIQIMKVAKKSFREALLKRLHEFDNDPKKAFTGKNSPDKNPVWLNSQHSAFLPEKVKTVVLEPLYTIRKEISPDLKIDKVIDNKIRNILQARLKAFNDDSKKAFSNLDENPIWLNKEKGISIKRVTITGISNAIALHDKKDKEGKLLKTDGKTHPVDFVNTGNNHHVAIYKDANGELQENVVSFYEATTRAQQGLPVIDKDFKKDEGWQLLFTMKQNEYFVFPNEKTGFNPNEIDLLNPENYHLISPNLFRVQKFTIKDYFFRHHLETKVENNNTLKGIIWLRLGLNGIQNITKVRINAIGQIVFVGEY

SEQ ID NO: 8424 - protein, 988 aa, unidentified
  REGION 1..988: note = Description of Unknown: Cas Enzyme sequence
TGPKVAPRSSPLFQVCKIWETINSITIKNRKGEILLIDNERKKQIFDYLDSNERISQTDLFKLLELNKDEGWYANKQIGKGLQGNLTKVAVLKYLRHSEHLLKFDLNIQETEIIDFKSGEIKPTEQISADFEQQPFYQLWHTIYSIDDAQECANALKLKFNLPEETIGQLIKLDFKKSAFGNKSAKAMRKILPHLMCGLVYSSACSVAGYNHSNSLTKEERQSKPVREHIELLKKNSLRQPVVEKILNQLINLINAIIKEYGVFDKDDIIRIELARELKQSKDERNEATLNISANETINNEVIKRLTELGLPAKKRNIEKYKFIFPVKNKKLKEAIVKNQCIYCGEHFSLSEALLGNNFDVDHIIPQSLLFDDSQINKVLVHRKCNAEDKKNKTAYDFIHSKGDDELQKYLTRLDEWYKQGVLSYSKMERLKVSHVDYLERKSKKKETEADKKLWENFITRQLRETQYITRKSKSILELVCNNVWNSSGNVTQYIRKVWGWDDVTMNLQLQKYADLGLTEQKRWQTNDGQFHFQERIKDWSKRDDHRHHAIDALVIACTEQGFIQRINTLNASTTRDEMKKEIDDAGIAYDRKKNLLENFIFSQKPFTTKQVEERVDNILISFKAGKRVGTVSKYKANGKNSEKGIIVPRGPLSEESVYGKIRTVVEKQPLKFLFENPQTIFKPYIKTLVEERLLMFNGDTKKALASTNKNPILLNKDQTIILEFGSCYVDEYVIKYPLDINFTKKDKIIDKKIKQIIADRLAKYNNNPKEAFRNIEGDPVWFNQAKNIAIKTVRCFTGLSAVEPVKKDEQGKNIGFVKPGNNHHVAIYLDNEGKKHEHICSFWHAVERKKYNIPTVIKKPENVWDSIINNKPVYTESFLEKLPPDNWKFQQSIQQNEMFILGLTNEEIEVAVSENNKKLISKFLYLAWSISESDYWFRHHLETKNSELKNISDAKESKRYYRFKSISAFEKMNPVKARINVLGEISF

SEQ ID NO: 8425 - protein, 1037 aa, unidentified
  REGION 1..1037: note = Description of Unknown: Cas Enzyme sequence
MNKLTLSLILSGHSTAFNLLSTDEDNHQSKIINSGLRIHPHAVNLKTGASLNKPRRDARGARRVTDRRKQRLKNIRKLCIKQNLITKNEFDQLFIDKEIDLWELRSDALARKLTNSELTRVLYYLAKHRGMLESHKNEPDDEKEIKEKELILKAIKCNKDNFKKSNCKTIGEFFHKTIQTGEPMRNKRSDYSKSVSRSLVVNEAKVIFDSQSELGNPICTKKLFKEYCSIAFTQKPLQSIEHMVGYCSLELDQKRAPKNSYSFELFRAVLNINNLKLINIYGAERCLTKNEKELLFEECQKLAQLSYAQIRKKLKLDADDMFKQLRNKKETSVLIDMQGTHTLKKIIGKDTSTTLLDTIATIISYEKDLNAMEQCLLKLELKKEVVAQLLKLNFVQFGNVSIKAIQQLLPFMLEGEFYTNACILAGYNREYIKTKLLPPLPDEYKTTNPVVNRGVAEARKLTNAIIRKYGSVHQIIIMFHREFVHTMKECRQIEKEQANWQKAKIKAKEECLQHGVEPTNKNLLKFRLWKQQSEYCLYTQTKIKVEDLIKAEHYEVGHILPPSRCLDDSLNNKVLVSVKENQEKHNKTPYEYFTPKKWEKFCKFLTQLDLPEAKYFRLIKTTLIEIDDYIKDNGYIARLMKDYIEKYLQFEPWKELKQTVQVRAEKTTKFLNWHWNTRELRLSYRTDMIAEFTLENENNKIKNAIAEEKGQSTRIPILTPEQIIEKSLTKRHIRDQILDAILISCSTQTMITYFAQVLKLQEINPEGANRLPKIPLPWNTFIEDCSKAIQDVFITRTVTKKISGTAHDATVKSKKRFGDNEVTYKVPLERVTFKILAKIVDKEYNQALYDVLYNRLVEFGGDPKKAFKEPIYKPLSAKKAKLGIKPTIIRGIKVVDKQTSGVFVQNGIARNGNLVKVNIFEKANKFFLSPVYNHQIAKKIIPNKVISGKTEADWLIIDDSYKFKFSLFPNELIRIQKGDDIVTGYYLSTDRATASINIETHDKSIIYRKGIKNLNSIKKFNTDHFGNWSEVLREPLV

SEQ ID NO: 8426 - protein, 1110 aa, unidentified
  REGION 1..1110: note = Description of Unknown: Cas Enzyme sequence
MKNTTQNIQLAFDVGHNSIGWSVLKVQGEAPEIAGCGSVIFQKDGCLATKRRGYRRQRRNIRATRQRITRLKQLIFSLGVLSHEQLNRVSSSSPWHLAAGVLEGTRKLDWAELWDVLRWYAHNRGYDGNRQWATNGTVEEEEDTEKVENARGLFAKHGTTTMAQTLCAELELDAKGGKAASRIRFKGLNAAFPRESVTAEIRAVLDAHKGLLPKVDDAFIRALIGKDHSDGDAWKAVPVAGLKIPNRFHGSLLMGQNIPRFDNRIISRCTVLFDRILQQKLDEGMDRESAQAEAQKLSKVPSKKAPEFLQFRWAMLLANVLVTGVDGKSRSLAVDERKAVHLKIRERGAFTPTQFKLEVMTATGAIRSNLEEMLSHPDADKALVFDYATRETQRGTLGLVWPSIDDLNKTRIKRLLRDGKTITIRDVVVANDSAISALENSLTASATRKTTAKAGAATKSLDVLLSETVCIHPINGRAPFSRQIMKEAVADVMEKGIHPTTEGGVLYRGESIRLAQVQRKLDDQTNNHLVRHRLLILERLHHDLLEEYAEGNPGLVERITIEVNSDLREMSGKNAKETAQEEGLKLADFKGVTKLLEAQLDGQGIQITAGLIRKARVAHDQGWKCPYTGKDFDVFDLVHRRVDKDHIIPRSLRQSDSLDSLVITFSEVNRMKGQRTAVTFIEEFGGKVVDGRPELSIMGLASFEEGVNKLDSRRGHDDDKRRKKNRKRLLMLKDYVDKEFTPGDLTRTSQLVRLGAQLLERPYLGCEKKPVITSLPGSVTGAVRKSWRVLGCLSKANPAVTAESTKTDVRSITHLHHALDASVMALASHFLPRDGGIWELIVKRKLSASEQQLLLKKGQQFARDSEGRVSLIDLPTFLKNQLSNRLAEQRVVQHISADMSGLASEETVYRVLDPKDSHPSAKKLMKLCAARGIEVPDAREEVALLVSRKRRSTIESGDLLHETPIWRWAYRIEKKSKLLGLESKEPASGKLKSLKAVKIIGENFGLALDPEPEVLQLSSVWKRLRELRLAHGRPVRILRNGDLITLSSADVPEQRRGNWRVMSVKNNTTGLALDLSRPDEIKATWINTLVQSHLRNGLKIVDARLSGVMK

SEQ ID NO: 8427 - protein, 1045 aa, unidentified
  REGION 1..1045: note = Description of Unknown: Cas Enzyme sequence
MQKLRYRLALDLGSTSLGWSLIRLDAQGIPCAVIKAGVRIFSDGRNPKDGASLAVTRREARAMRRRRDRLLKRKSRMLKTLVKWGFFPGDAAQREALALTDPYVLRAKGLDHTLTPEEFGRVAFHLNQRRGFKSNRKTDKADNDASVMKTAIGDLRRVMQETGCRTVGEFLHQRLVAKQTVRARYREQRVLREDGKTKIEKSYDLYIDRAMIEAEFDVLWAAQAKNNPTLFNLRAQAELRDCLLHQRPLKPVQPGRCTLLPQEPRAPLALPSQQRFRIYQEVNNLRILRNGVREEPLSIHQRDQIVQALEVNGKRTFHALKQLLGLDGSDIFNLEDAKREELKGNATSVALSKRDAFGQAWASFDSNRQDAIVMQLIQEENEAALIHWLQGETGVGVQQAERIASMGLPEGYGSLSAKALDLILPALAASVCSYSDAAKAAGFHHSQLDHDNEVPGLTFPIENVVQQTGEIKMLHVFKELPFYGEYLQRHIGFGSGKPEDPPEKRFGKVANPTVHIGLNQVRVVVNALIARYGHPAEVVIELARELKQSREQRTELQKQQAENQRRNQARRKIIADILQISAESVKPADLQKMILWEELSRDAADRRCPYSGAHISAAMLLSDQIEIEHILPFSKTLDDSLNNKTVATRQANRIKGNRTPWDARHDFVAQGWGTEHMLERARQMPLKKRYRFFEDGYEKWLREDKDFLARALNDTRHLSRVATEYLRLVCPQSTRVIPGQMTALLRGKFGLNHVLGLDGEKNRNDHRHHAVDACVIGVTDQGLLQRFAQASASAREGQLNRLVANMPMPWGDSDDGRYFKSVQRAIAAIHVSHKPDHGFQGAMHEATAWGILPGGQGTRRERGDDGRRHRVTENKKLIPLASTRNPSRHGLGEDGQPKPYKGYVGGSNYCIEVVRSERGKWEGEVISTFQAYQIIRQHGLTLGVATLRSPKISQSGRPLVMRLQLGDTVRMECGGVLALMRVVTITSNKQLFFAPHNEANVDARNGNKADPFVYTSKYPGSLQKAFGRKVVVSPCGELRDPGFPG

SEQ ID NO: 8428 - protein, 1015 aa, unidentified
  REGION 1..1015: note = Description of Unknown: Cas Enzyme sequence
MAPMRYRLALDLGSTSLGWAMVRLNAQNEPCAVVKAGVRIFSDGRNPKDGSSLAVSRREARAMRRRRDRLLKRKHRMMATLLRHGFFPQDEADRKALETQDPFALRAKGLDHALLPEEYARALFHINQRRGFKSNRKTDKKENDSDALKTAISQLRQAMQTTGCRTVGEWLNARHQQGLSVRARYRENRITKDDGKTKIEKSYDLYIDRAMIEAAFDALWAKQSELNSVLFNDTARAELKDCLLHQRPLKPVKPGRCTLLPDEERAPLALPSQQRFRIYQEVNNLRLLREGLSEEQLTLTQRDLLVQALETNNKRSFAQIQKLIGFSGQFNLQDEKRTELKGNSTSAMLGKNEHFGHGWFTWSERQQDAIVKQLVKQENEWRLIKRLQKYCGVNEETAERIANAPLAEGYGSLSAKALEKILPALLAEIITYDKAVLAAGFAHHSHISHAVTGEILQTLPYYGEYLQRHVGFGTGKPEDPAEKRYGKIANPTVHIGLNQVRTVVNALIKRYGHPSEVIVELARDLKQSQEQRKDEQKRQADNQRRNDRMRADIADLLQTSPERVRTTDLQKMILWEELSFNAAERRCPYSGVQISAQMLFSDQVEIEHILPFSQTLDDSLNNKTVAMRQANRIKGNRTPAQATADFEAQGWTPEDMLSRASLMPKGKRYRFAQDGIEQWLREDKGFLARALNDTRHLSRVAREYLSLICPQAIRVIPGRMTAMLRGKFGLNDILGLDGEKNRNDHRHHAVDACVIAVTDQSMLQRFAKASASAREKQLNKLVETMPLPWASYREHVQRAIDNIWVSHKPDHGYEGAMHNDTAYRLLGAGRVQIRKTVDGVRTREIAALKVIEFSDASASDRHGLLPTGEPKPYKGYKGDSNYCMEIVRNDKGKWEGEVVTTFEAYQLVREHGVARLRHPKLSVSGKPLVMRLMNGDTLVLNTKDDPKMVARISNISSNGQIFVAANNEANVDARNRDKSDSFAYVSKMAGSLQKAQGRMAIISPIGQLRDPGFSA

SEQ ID NO: 8429 - protein, 1376 aa, unidentified
  REGION 1..1376: note = Description of Unknown: Cas Enzyme sequence
MTKTILGLDLGTTSIGWALVKEGKDADIIKTGVRIIPLSSDEIQNFDKGKSITTNADRTLKRGARRNLQRYKLRRSHLIKLLTEHHFISEESILNEIGNHSTFQTYRLRNLAVSEQIKLDELARILLMLNKKRGYKSSRKAKGEDEGMAVDGMEIAELLYEKNLTPGQLVYQLFAQGKTSVPDFYRSDLQAEFDSIWNYQKQFYPEFLTDDLYEGLKGKTKTISAVILRKQGLDGVELKGKLSEKKRMRYELRAKAVNQQCSLDEISEILPEINQNINQSSGYLGAISDRSKELFFNNQTVGQYLYQQIEKNPHFPLKNQVFYRQDYLDEFNRIWEKQAEYYPETLTAELKADIRDTIIFYQRRLKSQKSLLSICEFEGKQVEIEIDGVKKKRVIGPKVCPKSSPIFQEFKIWSQLNNITYSISGSKKSEGIYLELEQMKLLYEELNWREKLSATDVIRILGINGYELNFKEIEGNRTNAAFVKVLNDFFANEGHDELNLFKMNSKELKETLELLFPIYGINLNLLHFNSNIKGQEIEKQEFYEFWHLLYSYEGDNSPSGINSLREKLADPKFGFPKDSNSIITNISLPDDYSSLSARAIRKILPFLKEGNRYDLACLLAGYNHSHSETKADLDAKILNEKLDPLRKNELRNPVVEKILNQMINVVNSIIETYGKPDEIRVEMARELKKSAKERELATKAIRQATDEHTKLKKELQNEFGLNTVSRNDLIRYKLYLELKDNGYKTLYSNQAIDRSKLFSSEYDIEHIIPQSKLFDDSFSNKTLELRSVNLKKGNDTAYDFILKEYGEEGLKQYEARINSLFNNQFGKKSKYKKLLMTGEDIPKDFIERELRDTQYIAKKAKDILSSIVRNVGTTTGSITERLRQDWQLVDVLKELNWNKYDKLGMTETFENRHGEKIKRITDWTKRNDHRHHAMDAITVAFTKREYVKYFNNLNAKSDKDGEIYKILKTETYFDQNQKRRINPPMPIEDFRKRAKEHLENTLISFKAKNKVVTNNKNISKSKGPNNVKIQQTPRGQLHLETVYGSSVSYKTKIEKVNASFDAEKIKKVANQKHRLLLLERLLENGNDPKKAFTGANSLSKNPIYLNKLQTYKLPEAVKLVEFETQYTIRKPITPDLKIDKVIDKGVQRILLDRLKTHNNDAKKAFSNLEEDPIYLNKEKGIVLKRVTIQGINNAVALHSKKDHFGNELLDENGNAIPVDFVNTGNNHHVAIYRDENNNLQEEVVSLFEAVARQNQGLPIIKKQHELGWEFLFSMKQNEYFVFPNEETGFDPTEIDLLDPTNYPKISPNLFRVQKLSTKNYVFNHHLETTAVDAETLKNKKNLLNITHKFIQSPMRLKSLKKVRLNHLGSIIQIGEY

SEQ ID NO: 8430 - protein, 996 aa, unidentified
  REGION 1..996: note = Description of Unknown: Cas Enzyme sequence
MQRTLGLDMGTNSIGWAVLDVPTEDGEVGEVLAMGSRIFKAGAEVKGNTVTTKARERREKRMMRRQIERRASRRRLLRSELIKVGMLPKDDDAFDLLMDQDPAPLLATGMAKKKLELHEIGRVIYWMSSKRGFLSLRSGGATLVDDDPDFVPTRYRVSQFSRSTGERIHIGQEDILIEFLDGQRELHPKVLTDKATFGARGRLVYPVKPIARDKYASNGSALDEFGIHGLVFFQRKVYWDQATIGACSLDPSSGKRAARAERCAQEFSIWNTIVNLRIGSAQRPLDQAERSTLYKLMSAQQTLAFSKVRKALSLDEADRINFEREDSKGLVGNQTDALLASRLKDAWTDLSEDDKDDLVYLLLGNAPEDQIINQLTKQYGFDEKTIESALKAPLVTGRTNYSRATMRKLLEHLPTEPDVRSAILAAGYPTPEEARAKQPLNLDTMSNPLVRTSLTQLGKVIGALEKRFDRPGDKAFDVVRIELSRDVSMNAKQRERVTKQNRDNEKSRDRAKGLISEFAAGGENSGDNIRAARLWSDQQERCLYCGQNISAVELFSNKVQVDHILPRAQTLDNSMGNVAVVHTKENLDKGERTIYEWVGAERMEEIADRARTWGLPYGKQLKILTEHVDPDTIPASLLTQTGYINSLARDYVALRPNLTERVEVSRGRLTAALLYRLGLKKDRDDHRRHAQDAAMIAITTPRIAQQLSLRFKAERDFNQMRDEGWGSWEPWVGLRQQITDVYSQIVVSHKPTRKVSGQLHEETYYGKVSSPYDDRKDLYARRRGIAGQWNPKQLKEVADPAVREALMQDLRNRGFDPEADKKLTFDVENPPLMPDGNPIVRVRCHMNQPGNRVLRPKTQPKTGVTLANNHVGYVYENINTSAWRIEIATRLDSFIERSNSASSQRDARVRDQERFKYSLCVGDVLALSSSASIGADLIIIRRLVESQQLLWIQPLHESRPGEGLTRLSASGKESLRSLGAQKITVTPDGQIRTNNE

SEQ ID NO: 8431 - protein, 1055 aa, unidentified
  REGION 1..1055: note = Description of Unknown: Cas Enzyme sequence
MIPPQVAAKRWKEDPFYTKAVVVGLDIGIEGIGVAVRKGPDVIYRRTYMVSLPKSAALEGRRLMRSARRCRKQRRRRDFLLRMFCEKHLGGAWSAITKRVLEHRLRAVEGKLKSPHALVQCLRHIIARRGYSYHLKSDGAFLWGDSPKFPDAKRWLQAAYCDDQVATLLHQQVEELPWTDAQKEEFAELCRDAVRNSAGRSIEETLKHHLSKGSLKSRPPFRGNAWPREHVQAHFEKICRSHPEFFGGEEKLEKLLPRLFAILNHERKNAEERAAHARSKAGKCDFAPVLLGKEDLTRGFQGDLPVRLLNLLEFLSSRRVATSDGLHHYATPRWIYEQVGYVQADAGAVATNQPRPSISITDLKKSLLESINEALGLSGKQALKWEKGSSLNEDFFKQLKDLLCLRRSRFETRAGISAEAAAHIIDPLISKPAERVSAIGDHLNEYRRQRRDRMRSVITSPQVEFLLGRDGKQEGRLQRIFALPELRETLGRKQSPDFVVIEVVGGAARNTLEAAEIRKEQLERRKEREALAEKYGIGEADAKGETMLRVSLYEQQRGLCPYSGKPLGSPTDHGLQIDHIFPREGGGTSERRNLVLTFAKYNEAKGKRLPYEAAQAGDLPLDWKAICALTSTMKFGAAGKEGQLSKRDIFDLKDSSRCPDWGNLTRQSQIARELRDAVGQWLGIKGDANKMASSIGTPTGLHTAICRRAWKQSIPRKNRADLTHHLWDAITVSFIPPAKGLNTIEYGGIFHHVTEASAAVTEMTALPVCPELTPLDKDTEECLVERPRQSSSKKQRFDKSIYGRRADDSLQIRKPIKKGEGIASDEHSLWEALKASGIPDEKIPPPKMLRSWLDSDAAGPLRLKDGTSVGSLPVKAGKPGTVMTQVAHRNHEGHSMGIKVAGEANWRLEVWKTQDGNAVKYHTRVIPHPRALKIFKATNGAAAWKKKDQTTGKTWRQQVAGSLPPYAKKVGHFEKGMVLQVPLTKQGEVAANGVCYKRVSYTVASIESKGRVELKMSGVKQPAENFKWAYTDLPASSFVIRVSAPVKLASLLKVR

SEQ ID NO: 8432 - protein, 1226 aa, unidentified
  REGION 1..1226: note = Description of Unknown: Cas Enzyme sequence
MKKILGLDLGVASIGWALINVENDIPTEILGIGSRIIPLTTDDANEFSTGNAISKNQNRTTSRTQRKGYDRYQLRRKNLTDFLRKYNMTPTEELIKLDVLGLWGLRAKAATEQITLIELGRILYHLNQKRGYKSAKSDGIDDKKQRDYVANVNNRYGIIKELGQTIGQFFYGNLQKDVHYRTKEQVFPRAAYVQEFESIWDAQAKYYPEILNEENKGIVRDEIIYYQRSLKSCKHLVSLCEFDMRAYKNKEGKTVYDGPKVAPRSSPLFQVCKSWESLNNIVLKNRRGNEFEFSLEHKQAIFNHLENHEKLTISDLYKILGINKSEGWWGGKAIGKGLQGNSTKMQISKAIEGLVDYQNLLQFNLKIIDTKLVDTETGEIIQQINPDFEKEPLYRLWHTIYSINDKDELANVLHKNFGIEDPEAIDALYKIDFVKSGFGNKSSKAIRRILPYLQSGLMYSEACLAAGFKHSESLTVAENDARILLTKLPQIRKNELKQPIVEKILNQMINLMNAVIDQFGTIDEIRVELARELKQSKDERNAADKNMRLREKENDYFAKRIFQEYGLAASRTRIQKFRMWEESKQKCFYCGQTVNVQEFLRGFDVEVEHIIPKSLFFDDGFSNKVCACRKCNAEKNNQTAFDYMKSKAENEFENYLVRIEEYYKNGDISKTKKERLLTTKEKIPTDFIDRQLRETQYIARKAKDILAQVARNVWATSGSVTDFIRHTWGWDNILHDLQIDKYRINGQTEIVEFNHKNQKHSEERIIGWSKRLDHRHHAIDALVVACTRQGYIQRLNNLNTERDAMWQELKNQSEEHRNKFMSLENWLNDQPHFSKELVQNKVAGILVSFKPGKKAASTGKRIKYVNGKKIVLQEGIIVPRGSLHEESVYGRIKTLEEKKSIKYVFENPQLIFKPYIKELVEKRLEEFDGDPKKAIASLTKNPIKLKDEENLEYATCFREDYVIKYPLQSITPKDVSSIIDKHLRDVVKERLKKFNNNEKDAFKDLQKNPLWLDKDETIQVKTLRCFTGLSAVEPIKNNGIGEAIGFVKPGNNHHIAIYTDKTGKKIEHSVTFWSAVQRKKYGIPVIISNPIEVWDSIFEKDISENVLNSLPLIDWKFEVSLQQNEMFILGMAEEDYQMAIEKNDLTLLSKHLYRVQKIAPSDYVFRFHLETKLDGSSDAKEVKCFYRIKSLSAFFALNPWKLKINCLGQITVAKNKPIMNEMIKMT

SEQ ID NO: 8433 - protein, 1606 aa, unidentified
  REGION 1..1606: note = Description of Unknown: Cas Enzyme sequence
MEQKILALDLGSNSIGGTIREISDRENQFKKTTVITFETGVGKDDYGRFTLSHATERTSKRSLRRLYQSRKYKLLETLEILRQKKYCPIDEKSLNRWKHYNKEEAMKGNGGRAYPINDIVFNNWIKLDFNNDGIPDYSSPYELREELAAKKLDFTIDENKHKLGRALYHIAQHRGFKSSKKVQNKDDEKDENDSEHYDKLKGAEGKKTKKFWEAITKLNLGIKDTLTVGQVFSQIEKSNLQNGTNIRIRKELHQFVTRKMLMQEVDTIFKLQEISFGSIFKNNKGAEIKISQSPMFWQRPLRSQKGTIGKCTLEKNKYRCPVSHPAFEEFRAWSFLNNIQYKIRDEKESEWQQISLVYRKEIYADKFFRVSKKDFDFFEIAELIKKKNQHDKWQLNYNSKTNVAACPVSAKLKDIFGDDWKSYSLKTDKLKQVKKKDGTIKEHKTTYDIDAIWHILFDSDDEDIVEEFALNTLKLDERKANKFMSLYKSMPVAYSMLSLKAINNILPFLRDGLIYTEATLLAKVPKILGNEIWTLKKTEILNNLTKKVIEKNREEKRTLNIVNNLISQYKALPDNEQFAKNNFDYILGERDKQLDIKSKYTDANQILFAIEDSIGKNTWNEKTNEEKKNSVEKVSKEYQSFFSDKERKFKKLPHLQKSMKQFLATEFDFLRCPNTFKELKDEEKKCECNACKKLNSLYHPSQIDIYPAAKEGIYKYGEIDKQMVMLGSPKTGAFKNPMAMRALYELKKYINYLIATEQIDEQTRIVIEIARELDDNNKRWAWDEFQKRRREENKEFRDAIYELIKDPEASGSIVNPDSDSDIDKFRIWYEMIQDHDATEGFEEKKVFIPLEKTTTIKKNRKGQEEEIEEFNEDNYLKINKSLFFKLQKAKENVEAKYRLWKEQEYCCLYTGRMIKITDLFQENSIDFEHTIPRSRSLDNSLANLTVCDADFNRNIKKNKMPTELDNYNKEAYGLNGSIKSRLGKWEHKVKNLQLHVAFWKAESKRATTKERKDQCIRQRHLWHFELDYWENKVSRFTMEEVKSGFRKSQLVDTQIISKYAFHYLKTFFNTVEVQKGGVTAEFRKIFGVQEIGTEKDRSKHSHHAKDAIVLTLIPTPAIREQMLTTWYAILETKDLLLSNTEPDKNKIQEKIYRLEETLRILKYQCNLPNVNAVLDKVDEQILINNIAKDNTLVAAKRKVRSRGKVVGLKDENGNDIYQTDTNGNPIQRKYKDGNLVWKNDEFGKPLVDENGNKIPVYKVKEKWAKGDAIRGQLHLDTFYGRIKVVEKDENGKYKRDEQKKFIYEVDKKTNDFSYKTVLRKEVNKDFDVEKIVDPQLKFIIKKQMNGRTIGTTIQEDGGIFMLKNDGSRANKIRHIRCFEKKVTNPIAIKGHTIQGENKHKNYFWANNGENIICAIYQNIIIDKNGREKIERDLEIISLKESAALLSLEQIDKNRNLILYKKDKRGEEVNPYAILKARLKVIFFDKNVNELKDRAIGELSYRTYNITKFSGGQITFKHHLEAREDKELEKVYPEKKVYKQDDKGNDILYGGKGTSGFTEKVSDAIILNGYNNYEPWPKLLYTKDWLNMAIEGKHFEIKPDGEIIWLF

SEQ ID NO: 8434 - protein, 1306 aa, unidentified
  REGION 1..1306: note = Description of Unknown: Cas Enzyme sequence
MKKILGLDLGTNSIGWALVNQDTKNNAGNIIDIGSRIIPMSQEILGEFDKGNSISQTAERTGYRGTRRLRERHLLRRERLHRVLNILDFLPKHYANHIDFDRHFGQFIDYAEPKLVYDDKGEFIFKKSFDEMLEDFKIHQPKLLLNKYGKPALIPYDWTIYYLRKKALTKKIEKVELAWLLLSFNQKRGYYQLRGEDDEETPNKLIEFHELKVVKVEDSGDKKKDDVWYNVILENGWIYRRSSKIPLFDWKDKIKEFIVTTDLNDDGTFKTDKEGKVKRSFKAVNSEEDWIAIKKSTEDKIEKSHKTVGSFIYDTLLQNPDQKIKGKLVRTIERKFYKAELTAILEKQINEHSELQNNELYQECLKELYKNNNAHRNSISSKGFAHLFLNDIIFYQRPLKSKKSLISNCRYESRRYKNDEGKFIPVPIKCIAKSHPLFQEFRLWQWMKNLKLFLREDDSDVTSIFLKTEEDWVDLYEWLNNRKEVDQKAFLKYPAFNLKKQAEKYRWNFVEDKSYPCNETHSQIQTRLEKVENVPAYFLTKETEEALWHILYSIEDKIEIEKALKSFALKHNLGDDFIERFKKYPRIEKEYGAYSYKAIKKLLPLMRMGKYWKEENIHPQTRERIENILNGEFDEKIKNRVREKAILLKDIKDFKGLPLWLTGYIVYNRHSEEGEITKWHTANDISLLEQHSLRNPIVEQVINETLQVVRDIWKTYGEGKENFFDEIHIELGREMKNPADKRKQITLKNTENENTNLRIKALLIELLNDSNVENVRPYSPGQQEILKIYEDFVLNSESEIPDDILKISKTSLPSKSELNRYKLWLEQKYRSPYTGAVIPLNRLFTSDYEIEHIIPQSRFFDDSFGNKVICESEVNKLKDNQLGLEFIKNHHGEKVSLNYGKSVEIFSEEGYQDFVMKHYASSTGKMKKLLLEDIPEKMIERQLNDTRYISKVVKNLLSNIVREENEQETTSKNVLSSNGSITSILKQDWGLNDIWNDIITPRFVRLNQITNSSNFGKINPQTNKFLPQVPFELQKGFSKKRIDHRHHAMDAMVIACASRNHINYLNNEYAKADKKDTRYDLKSTLCLKKYNEGSKDNYKWVFKNPWNNFALDAKEILQTTLVSFKQNLRVINKTVNHHQKWVTQKDGSLKKEMVKQTLGDNWAVRKPLHKDTVSGLIQLRFKKTVSLSSALDNVESIVDKELKRKIKELFSQNPDKKKIQKFFKDLDNKWNKKDISKVEVYYWEKDNVASRVKLDDSFNAEKIQSITDTGIQKILFSHLKNHDEVKDGKIIEHPELAFSPDGIDIL

SEQ ID NO: 8435 - protein, 1375 aa, unidentified
  REGION 1..1375: note = Description of Unknown: Cas Enzyme sequence
MEKILGIDLGTNSIGLTLREDNDFTWYGVYTFKKGVGEGKSGEFSFAAERTKHRSSRRLYNARRYRKWETLKILIEYDFCPLSKVNLDNWKHYKKASGRTFPINDNLFQQWIKLDFNNDGVPDISSPYQLRKLLINEKLDLTISENRYKIGRALFHIAQRRGFKSSRKSGANEKTAVYKGSTETKTIGRNEYENLIIEQGSLGAAFAFLEDQNIRVRNRYTLRSDYQTEVQKILEFQKVEHGIFCENINKAIFYQRPLRSQKGLIGKCTLEPNKSRCPVSHPKFEEYRAWSFINNIKYRNNDTNQFEPIPLPLKEKLYKEKFFYKSKRDFAFKEIRKFIQLNGGKDWELNYGTKMDEISVPSCYVTARLKSVFGDNWETYQKQINRTNKKGENETVNYSIEDIWHILFNFEDEENFIEFLTNVIVLEEEQIKELTTLFNAFPVGYANLSLKAINNILPFLREGIIYSESVILAKIPEIIGKKLFEDNKTEVLQAIQDKVEEIRYKKTVITITNNLIFKYYALDFDQRFAWKDNEYRLAESDLIEIETASKEHFGDKTWNKLDLKLKEDILSEVSVLYKDFFASIKREHFAQPHLVNSVKDFLYQNFTTSTKVLNKIYHPSQIDIYPKTEGQQFLQSPKTAAFKNPMAYKTLYRLKDVINYLIEKGIIDNETRIVVEIARELNDSNKRWAIEKYQRDREAENIEFANAIAELIKDPEFSGTADPNSNSDTDKLRLWIEQTENPEEIFKVVQNINKDKQLSISQKDIQKYRLWKEQNCRCMYTGNTINLTELFDVNKVDFEHTIPRSKSFDNSLANLTVCYADYNRRIKNNQLPTELLNYSEEWNGYTAIKPRLEGWEKKVNELYQQIDFWRFKSRTAMDKAAKDAAIQQKHLRQMQYDYWRNKVERFKQTEISQGFINSQLTDTQIITKYAFHYLKTVFNKVDLIKGSNTASFRKIYGVQSKEESKDRSVHSHHAVDAAVLTLIPSSKKREEILRKSYEFEEKNYGKQYHIKPFAGFHYAMIEELKKNILINNIADKDQTLAPGRKIVRQRGKVVWIDKENRIPKVAQGDSIRGELHLQTYYGKIKIAAKDEKGSLSRDYKMNIIYNQVDGKDEIWMVIRKPIDKVNFSSDIIVDEHIFSFLKNQLDTGTKQTDLVDFQGRKLRHLRCRVKAARGFMNPDNATVVKEQVYKSDKEYKNQIYTDSGENYLFGLYENENGRKIVSINKFEAAIQNRGSHFIDKKDLFRLKEPVLIRDKESSLLYIFETGKKVLFYELLEELKDLDKKELSKRLYYVKTLFDAKTQRIIFQHHLEARSNDDLLKDFPREQFGTKGKDGFSKFTTDFVAPRLLLSPGNFNFIIEGKDFEMKLDGTIIFKF

SEQ ID NO: 8436 - protein, 1537 aa, unidentified
  REGION 1..1537: note = Description of Unknown: Cas Enzyme sequence
MKKVLGLDLGTNSIGWALVSEADDKKEILGMGSRIIPMSQDILGEFDKGNSISQTADRTGFRSARRLHERFLLRRERLHRVLNILGFLPEHYTNSIDFEKHFGQIKNNTEPKIAYRKNIETNKFEFVFQKSFLEMVNDFKQNQPQLLEGDKSIPYDWTIYYLRKKALTDKIEKEELAWLLLNFNQKRGYYQLRGEDEEENKNKNVEYYLLKVVDIIDSGDKKGKDEIWYNVVLENGWIYRRTSKTPLDWIGKIKEFIVTTDLDENGNIKKDKEGKEKRSFRAPQEDDWTLLKKKTENDIDKSNKTVGCYIYDTLLQKPNQKIKGKLVRTIERKFYKDELKRILEKQIIEHDELQDKKLYYACLEELYENNDAHRNNIENKDFIHLFLNDIIFYQRPLKSKKTLISNCPYEFRKFIKKDGTQEVEPIKCIAKSHPLFQEFRLWQFIHNLKIYDRSKIIDGTEVNVTNEYLKTEDDWVKLFEWLNSRKEIDQKAFLKYFKLKIETHRWNYVDDIENKKTYPCNETHALISSRLEKTNNIQTNFLTKETEEALWHILYSVEDKNDIVKALKTFASKHGLGDDFVENFKKFPPFKKEYGSYSAKAIKKLLPLMRRGKYWNEELISPEIKSRIKAIIQRLESIQYDEKKIDTISDDDIPKQILKSFINCNHPFNGLNTYQVCYAVYGRHSESGDIKNWKIPADIETYLHYEFKQHSLRNPIVEQVITETLRVVKDLWKEYGNSEPNFFDEIHIELGREMKNPADKRKQMTNQITENENTNLRIKALLVEMLSDSTVNNVRPYSPSQQEILKIYEDGVLNSNLEIPEDILKISKQSQPTNSELTKYKLWLDQKYRSPYTGETIPLNKLFTPAYEIEHIIPQSRYFDDSFSNKVICESEVNKDKDNSTAYEYIKNNSGKKIELSFGKEVTLFTLSAFEDYIKSHFAKSKTKMKKLLMEDIPESFIARQLNDSRYISKVVKGLLSNIVREEGEQETTSKNVLSNNGTITSILKQDWGLNDVWNDIITPRFVRLNEIDAIVNKTEKSTKFGEWTNKGGKQVFQTQVPLELQKGFNKKRIDHRHHALDALVIACATRNHINYLNNEYAKASKKDLRYDLRTKLCFKKHNDNSKENYKWSFYKPWETFTQDAKEHLKTIVISFKQNLRVINKAVNKYQKWQFKEDGSKIKTKETQVGGNNWAIRKSMHTPMPYGKKIYKFDNLKIAENVGKKDLIIDDEIKVKVFEILCQFENKVTATQNYLKKNPIKDADDNPILVTAFKIESGKYRKRQPISKLANRGQGGIKTIEDAIKFINKVADFSIQQDLLKYLKENENDIDKAFSPDGIDTFNSKRKIPVYRLPIAESGDKRFVLGESIGTKHKWMEAAEGTNLFFAIYIDKDGKRSYETIPLNIVMEIQKQNAFEQKKQNENQKQILPPVPIKNEKGDKLLFYLSPNDLVYIPSIDEIENSHLVDFSKLTTEQVKRIYKMVSCTGYVGDFVPNYYSNAIIKNEMGTNNKNQNALDGRQIKAVCWKLKINRIGKIVEVNGK

SEQ ID NO: 8437 - protein, 1495 aa, unidentified
  REGION 1..1495: note = Description of Unknown: Cas Enzyme sequence
MNDSKKILGLDLGTNSIGWALVNAREDETKEILGIGSRIIPMSQDILGKFDSGNSISQTAERTGYRGVRRLRERHLLRRERLHRVLHVMDFLPKHYEKYIDFENKLGKFISDTEPKLVWKEDENGDFDFIFKVSFNEMVEEFKITQPQLFDEDKIIPYDWTIYYLRKKALQNKIEKEELAWLLLNFNQKRGYYQLRGEEEEDNPNKLVEFHTLKVIEVSADEPQKGKLDIWYSIILENGWIYRRSSKTPLFDWKDKVRDFIVTTDLNNDGTTKVDKDGKEKRSFRAPSEDDWTLLKKKTESDIEKSNKTVGCYIFETLLQNPTQKINGKLVRTIERKYYKQELKAILEKQREFHSELNSVELYQDCLYELYGNNEAHRNSNANRDFTYLFLNDIIFYQRPLKSKKSLISNCKYEARTFVNKETGEKQTDAIKCITKSHPLYQELRLWKFIQDLKIIEREKDINGKLNTDVDVTNEFLNTEDDYVDLFDWLNKTKEIKQDTLLSSYFKIKKKKGEDELSHRWNYVEDKEYPCNETRAQFLNRLSKVSNVPENFLNKETEIQLWHLLYSVEDKLEIEKALKSFATKNHLGDDFVEVFKKFPPFKKEYGAYSEKAIKKFLPLMRMGKYWNLDNIDEKTKFRIEKLITGECDESIQNRVREKAIKLNTDTDYKGLPEWLVSYIVYDRHSESGEISKWKTPEDLEAYLCTFKQHSLRNPIVEQVITETLRTVKDIWKHYGDFSEIHIELGREMKNPADKRKTMTAQITDNENSNLRIKYLLAELINHSDVENVRPYSPSQQEILKIYEDGVLNSGIEIPEDISKIVKQSQPSKSDLIRYKLWLEQKYRSPYTGEMIPLGKLFTSAYEIEHVIPQSRYFDDSFSNKVICEAAVNKEKDNALGYEFIKKNEGRIIELSYGKTVKIFTVSQYEDFVKQYYGKSRGKMKKLLMEDIPEAFVERQLNDTRYISKVVKGLLSNIVREEGELESTSKNVISCTGGVTTILKQDWGLNDVWNRIVTPRFERMNELTKSNNFGQWTNKDGKRVFQTEMPLELQKGFNKKRIDHRHHAMDALVIACATRSHINYLNNESAKPSSKVSRPDLKNKLCYKSKTDDKGNYKWQFYKPWDSFTEDAQVALENIVVSFKQNLRVINKTANKYQVIENGKKVIKTQESGDSWAIRKPLHKETVAGIVNLRFKKSVTLSTAIDQWEMMVDKGLKTKIKQLINEGLDKKKIQKFFADQENMWLGNDITKVELYYFSNDKEVLVASRVNLDTTFGVKKIESITDTGIQKILLNHLANYNDQPELAFSPEGIEDMNKNMVALNNGKFHQPIIKVRTYEPKGNKFNVGVTGNKKDKYVEAAKGTNLFFAIYADENGKRSYETIQLNIVIERLKQGLSEVSETNDNGDKLLFHLSPNDLVYVPTEEENVTSQFNIENKERIYKIISFTGNRLYALQQNIASVIVDKVELTLLNKVESDIQTNLSIKQFCIKLKVDRLGRISI

SEQ ID NO: 8438 - protein, 1164 aa, unidentified
  REGION 1..1164: note = Description of Unknown: Cas Enzyme sequence
MNAKEKVSAIDHHQRNLELAFDVGHSSIGWAVLQARGQVPELLGCGSVIFPADDCLASERRGFRRQRRHIRATRQRIARMRHLLEHLGVLTAKQLEAPGCAWPWLLAARVLGGGKPLMWPELWDVLRWYAHNRGYDGNKGWSKHDVTSSEDSDKVKRAGELLAEFAKKHGRPGTMAEVFCDKLGVDPLGTVKSTMRRVRHLGAAFPREGVEGEVEHILRTHAGILPQVDDRLINALMRDHTAMPSPDRPPPARYGQRLSDGSLSPGGLLFGQLVPRFDNRIIARCPITFERVYQAVKAETGDEEKAKNEAEKLAKVPGVDCVEFHRYRWAMQLANVQVATGDARKTRPLSAAERQALNTEMEKLGYLTPGDFKKAVRALTNGAPDNLDQMLALPDADRALVLDPVRRYIHTNALVSALRPVLPERLQKRLTGQWRRGHTITVAQLLDACGGARAAAEAVCEKHLDAQNTKRRQTNEALTREALLGTPLGVEPPNGRAPHTRSVMREVVEFVFGTDRHPMDTRRSAADNDGPLYRSEAIRQAQLQRTLDAQTNNHLVRHRLKLLERLHADLLKTYAGDSRDSIGRITIEVNRDVRELSGKTVQEQAKLQGQQLAHFKGVAKKLAEAYEGLAVHVGPGLIRKGRIAEDLGWTCPYTGKPYDALDLLHRRVDKDHIIPRSDRASDSLDSLVITFSEINRMKGNRTAVRFVEEFQGQPVQGLPQVMIKPLSAYLKDAAALETFKGHDDDQRRKKNRKRLLLLRDYVEKEFTPRDLTQTSQLVRFAAQAMQKHYIGAKTPPVITSLPGSVTGAVRKSWNLAGCLAAANPLVLNPEDLDEDKRPKVRTKTEIRGITHLHHALDACVLAFASHFLPRDGGAWELLVKRRLNTEEQHRARAHFGSHIAITQDGQMRLGDLDRQLKAQICERLKERRVVQHLPADLSGLRCKETVWRVFDPTDPHRNSRRLARWLAEAKVALPTPDAKTALIICRKRRAADAASEEGASSKVFRETKTWRWVYDIKDKSALLGLAPEGDPAAAKLRQIKAVKVLGDNFGLALDPEPTLIRPHKVWHQLEALRQRNGGNPARLLRIGCLVQVKEKAARSDYRGVWMVRGVQLNQRAGYLLNLSPSDQILYRGQPMCFQNVSVGTLLKCGLEVLAAPLCGLPSRT

SEQ ID NO: 8439 - protein, 1026 aa, unidentified
  REGION 1..1026: note = Description of Unknown: Cas Enzyme sequence
MKNLFNPPPGAAVQLEKRAWRSARTLRYNSGNIGHRSWNMKKTETVWAFDLGKGSIGEAVRQGTKFLHKASLLIPADFAETKTAAGRRRMWRTRQAHKAREHWLDEVMRKAGIEVLHGRNYDMAGNWKPGEPADERLEREFAEPGNPTCYTSCLLRIKLLRGEKLASWQVYKALHSAIQRRGYDPDIPWKNREQRKAKSGDSDDDDAGTQARMEEFEKTLATLSKGNPTLHYPCYFDAYEMGLWDGDSEFKDRTDCQAKSTRNQIVPRTLVETEVTNLVDAAAKQYPKLAGQAKYLLYGPTEIAYASFDAKLRKKHGLREGGINDWQGVVGQKIPRFDNRIVGKCVLIPRLNVCKIRTGDDGDLHPQSRIAAETVFLMKLKNMRLQRNGGVHGLTAKEIGEIFSDPKRSKLGLTPTQWRKWCERFSGYPLPGQFAEVEEPRFSGRSRFCRPALEILKRLILSGETPPQAHAKELVRLNGNTNPLKGLVEDDLKFILRMGLTWDGIYIPNQKLDALAHSTGDVHEAIRQLISSQNDPIVRHRLTLFADRLDKLAEQFGVPNYVVLEFVREDFMGRKAKFEYMKFQRDRAHDRAKAREEAAQAGATENAAGLKMELYKAQSGTCLYTGELLGVTSLDKYVIDHIVPRAKGGPDAAVNYVLTTPRANDDKLDRTPYEWLSKSPGWDAYVARVRKCTVALRNKKVSLLTSPDAETLVDKYTALAETAWISKLAQTIIGIRFGWPAGIANGERKVIVISGGLTGRIRRKYKLNSLLNPTATSEEEAETKNRNDDRHHALDAMVISFIPNWARNSKITGFFRFPDEVHRDLFAKEIAEVIPENICFEKTALAETIYGARNDYGKKVIVQRTELLSLAMKPTTPGKTIFDLKYASSQAQSVRDSLIKDRLLEFVATKPDETAWRNFCAQFHLKRKDDTDGPSVESVSVTVGAATEYKDMSKDGTGAYRKALKGHKGQIVYAITTTDKKGTKKETIEVRPVYAFESFAKVRAALQLEFGAAIQVKGIFQSGCLI

SEQ ID NO: 8440 - protein, 1034 aa, unidentified
  REGION 1..1034: note = Description of Unknown: Cas Enzyme sequence
DLLWAGVRLFKDGRNPKDEQSLAAMRRVPKGARKRRDRFVLRRADLLSALIETGLMPADVAERKQLEMTDPMRLRGEALDRALTPYELGRVVFHLNQRRGFQSNRKTDKGNKDDNGKIAKAAIALRDQLAEQHCRTFGEFLARRHELREPTRIRLDGKGAKALYHFYPLRAMIRHEFDRIWATQSGFSPRHITAELGERIAKILFRQRPLKPPKIGKCTFEPGEERLPKALISVQAREIYERLNHIRVSTNPSEERPLTLAERDLIAGVLLWESKFTFTKLRKALKFGGGVRINFEENEETELSGLTTNKILLKPDHYGPGWRALSYADKDAFIGKLLAETDDEILVTRLIAENGLSAQQARNCASIPYPDGYSRIGKTANAAILDALVHESDAKGRVIPYGEAVLRAGKALGRPWHHSDERDGEIFDRLPYYGQVLARHVMPGSSDPKDRKDEAAFWGRISNPTVHIGLNQLRRVVNELIGKFGHPKQITVELARELKQNAQQKKEEKERNKKNKDANAQRDKTLAELGEEANGKNRARLRLYEDQTPRGGGAVLCPFSGRAISYSQLFSAEIEEEHILPRSRTLDDSPANKVLVFREVNRIKRGKTPYEAFGATPDWEAVAARGRDLPRQKAWRFLPDAMAKFEGERDFLARQLNETRYLSRLAKAYLGKICDPDQIYVVPGTLTGMLRGKLELNGLLSDDNRKNRSDHRHHAIDAVLIGAMTRGLLQYLAKSAGRSEREEFDALLGKVPPPFEGFRDHVRSRIEAVIVSNKPERGKAGALHEDTNYGLIENEAEATEIGNLVRRKFLRDLTAGEVDAVRDVPIRETLQALIAPLRDAKGKIGKADEKAFAAILDGYASQAGVRRIRVGKFDESAVMLKDRRSGEIYRAVTPGENHHMDIVQMRDGSWKGFAATVFEVNQPGWRPVWEREKLGGKLVMRVHKGDMLEVDDKDGVRRVKTVVRLNPSEKRMYLVAHNEGGNFVERKKDADDYFVIAHPTPAIGPAGSLAASTKRMVSNTEARLAFAVLTTERK

SEQ ID NO: 8441 - protein, 982 aa, unidentified
  REGION 1..982: note = Description of Unknown: Cas Enzyme sequence
NSSGYLGSISDRSKELYFNKQTVGQYLMSQLDQNPHTKLKNQVFYRQDYLDEFNTLWETQAQFHKQLSAELKEEIRDVVIFYQRKLKSQKGLISFCEFENRQVEVEIEGKKKTKTVGLKVCPKSSPLFQEFKIWQVLNNVQVIDKSGAKRALEQEEKDILFTELSIKDKLSKADALKLLYKNPKELDFNFKDIEGNRTQAALFKAYQKIIELSGHSEYDFSKLPAKESLEIVSSIFSGLGYNTDILTFDTNLEGKAFEKQTLYQFWHLLYSFEGDDSVSGNDKLIAKLTQLYGFEKEYANIFANVNFQADYGSLSTKAMRRILPHLKEGNEYSLVCEYAGYRHSKSSLTKEELDNKVLKDKLEILPKNSLRNPVVEKILNQMINVVNASIESYGKPDEIRIELARELKKSAKEREDTTAAISKSTTEHEAFRTILHKEFGLTHVSRNDIIRYKLYLELKDNGFHTLYSNTYIPQEKLFSKEFDIEHIIPQSRLFDDSFSNKTLELRSINIEKGNETAIDFVLKKYNKEGHATYLSRIGELYKTGKLSKTKYNKLKMKGEDIPNDFINRDLRDTQYIAKKAKSILEELVKEVISTTGSITDRLREDWQLIDIMQELNWDKYDKQGMTEIIENRDGQRIKRIKDWTKRNDHRHHAMDALTIAFTKRSHIQYLNNLNARSDKAGSIYGIEAKELKRDDNGKLRFKMPLENFRSEAKKHLENTLVSIKAKNKVATININVTQKINGVNKKIQLTPRGQLHLETVYGSIQQYTTKEEKVNGSFTKEQIEKVAKKSYREALLKRLAEFDNDSKKAFTGKNTLDKNPIYLDETNTTKVPEKVKTVTTETIYTIRKDISPDLKIDKVIDVNIKRILEARLKEFGGDSKKAFSNLDENPIWLNKEKGISIKRVTITGISNAESLHDKRDKEGKLILDKNGNKQPVDFVNTGNNHHVAIYKDADGNLQENVVTFFEATTRVNQGFPIIDKEY

SEQ ID NO: 8442 - protein, 1442 aa, unidentified
  REGION 1..1442: note = Description of Unknown: Cas Enzyme sequence
MEKILGLDLGTNSIGWAIRDTSENENQIIEKGVLVFDKGVATVEGREQPKVKERTEARGKRRNYQAEKYRKYVMLQSLIENKMCPLTIDELNEWRHYKKGIGRKYPQSELFHQWLRFDFNGDGKPDFEQFGFSKHENCYLFRWLASSEKEDHKNIFKNNPQLLGRVFYQLIQRRGFRKGDDDNETKLIEEGRPKKDSTGKIIKGEIEVVGIKVIDSLIKEKYKTLGAALYWGQKNNELESINSNRIRNRFTYRDYFENEVDLIFENLGFDKETDFCRIIRDAIINQRPLRSQKGLVGYCTLDNPLKSKTGNYYKPGKKRIPLSHPIYEEYRMWCFINNLKIEPPASTDKMEFITNNVVPLFNRASDFYLSDKKVKGKEDKKEKVTKGLKTKIKELGGKILSNHDSDLGDEDEGTRFNANTFLHRLEKIFGSNWKDLLKWDETLNSVEKSGSYLRAEDIWHLFYDALITKKQTENFSQKVIPILKKHFSEIDFNESDFKSINDFDKGYASLSASSIRKILPYLKLGLIYSQAVFIANLDKVLDRKLGADTISSLLSDFKEINRKHKSDKEIYSIVNILISDRMFYRDRLNMGDNYVLDNYDYKDIDEKIKETFKIKEWNKKSEEQKNAFKNDVALLYTSFLRQPFGINKSKQFYKLYRIEDQLKNLLIDKYGADEKRIKKYLWHPSEQEKYPPAYIKADKNGEVIKNAEGEEIYFLGDPNPISRGFKNPMAMKTLHHLKKLLNHLLLIGKIDSKTKIVVEIARELNDANRRKAIEKFQGERRRKRDGFKKLIEEYLDENNSGNKSISDEIIDRYELWEEQTKKCLYCNQPITCHDVMNGTAQIEHTIPAKISNCSELYNLSLAHPHCNQTKAKHFPSELENYSDIKKNAGFMYAELKGYEKMFEETFDNAKRANTKESKDFIIIKRHYCKMHLDYWRKKYETFTLTEVTNQFRRQQLTDTQIITKYSLPYLKTVFNRIDVQKGIITSKFRKIYQIEAKIEDVKNRTIHSHHAVDAAVLTLIPPASIRDNILKEYNQAIDENTLKSFEHPKPRNWNNFDQSMITSMKNEIIINHVTENRTLKQSFKYLRKRGEFVKDKNGNKIWQQGATTRGKLHDESIFGMVKMPETEIKEGKHRLKITEGKLSFQMNEKRNDELFVVKKIKITDIKSIEDLEKIVIDPNLKMYLKKELEKRMQNENISFEKAISNHIYAFGQTIDKNGNLLQPIRHIRCKVKTGVDSYVQFPADIKPIEKAFESKQIHKQFTYATNAELPVCAIYEWNEKGKIEREIEPVSILKMSNSFHFEKNLKFVEERKVINKGSGKNKTEIIKELNTILYKKQHAIFYKEGLEELKELYRTNKKDFTKRIYKVVKFEDGKVFFDYHLTALSDTDIMNEMEKLGLPKKGASKLDYENPSLRLRLSQATLNMAIEGKHFEIMPDGEIKWI

SEQ ID NO: 8443 - protein, 1098 aa, unidentified
  REGION 1..1098: note = Description of Unknown: Cas Enzyme sequence
GSNSIGWALINDNTQEIIDMGVRIFQEGVENYGQGGKEVSKNEARRSARGARRLKFRRRLRKTRLRNILSNISGYTFWPQNESEYEEFRTLNPYQLRAKGTTQKLEPIELARIWLQMAHRRGYRSVGADSEAKTLYAGGDLDGVAITGISTTEAEWDKSGLPTIGAYLESIQHIPGQNEYSKIRARYTLRKWFKDEFNYIWEVQKQFYPELLTDELQVKLRDEAIFFQRKLKAVSNDVKGKCEVFPDELRESASHPAVQYFNLLTVLNNFKYYHKNTPDDKKPIPLQYHELIVRKFMWKAEFTAEQILKAMKLSGGENGEFRTNFDHEKKIKACPFMAMLLKKEISGDSGVKVENWQLERIEELYNDINSDIEVEDKIILLKSRYGFNKEAALSLISYSPGKKYSSVSLKGVKALIPFMKGEGVDADGVIHDRPMRYDEAFKLATGREHNLYDELHGKSGNKVCLPPAPDLRNPVVNRTLSELRAVVNCLINHYGKPDRIHIEMGRDITKNADDRAKISKQNYTNRIENEEAATTIQNELNGDIVPSRGKQLRYKLWKDQEKKCIYTGENINISDLFDSGKVDVDHIYPKSLYHDDSFQNKVICFRSANASKGQQTPKEWLASNPEQYRQVLQNAEAFKNKHPEKYKRFEKNPGEGDVAGVGGFIERQLNDTRYAARMARKYLSAIVKYENIFGTRGAYTSVLRKAWLDKKDEPLIINPILDPYLPWVNVEDPNQPKLHPDEIKGGKSRLDHRHHAVDALVVALCNNEMMKQLNRLQQKITIDKNGRKVDYISYKLPPKWDNLYAQAKEKVNRIIISHRVETKTNGQLHNETYYGKITLPPSAKDANNNLAVVPPADREVAVVRKKIKALTKNEVTNIVDHQVRNIVYNYILEKKPDWTPGADFGKILAECPGLNNKNGNPIIKIRIASNNPSLILIREKKAPVYVDPQSNHHALLYVNSETGKVRGEIVQTYVVARNFNGKDLGFKPNPQPAANEEFLFSLKANELVYINEGNPIPLHLLSGKEYYADLAEFIYRVQLMDKTAGNVCYRQQWFSKISLKTNEKDADKSIGRKFFTFSSKRVYKLLIDPAGFLTLAKE

SEQ ID NO: 8444 - protein, 1390 aa, unidentified
  REGION 1..1390: note = Description of Unknown: Cas Enzyme sequence
WIRTEDDHYRFLFMDSFHEMLADFAQHQPQLVADGQKIPLDWTLYYLRKKALSQPILKEELAWILLNFNQKRGYYQLRGKEEGEDQKKKGEDQTKKEEYYELKVVRVEETGEPKGSPISYVIYFENGWFCTKDSITPLHVLVGQNIGVIATWKYEKDGKTLKKNKDGSEQITVKIPKEDDWGAYKKRTEKQLETSGQTVGCFIYDHLLAEPSDKIRGNFVRTIERKYYKDELRAILRKQMEFHAELRDSEMLAACAKELYQKNEAHRKNLLQKNMEYLLVDDLLFYQRPLKSKKSLIDNCPYEQHMYEFVDKETGEIKKDQIQNIKCIAKSNPYFQEFRLWQFIQNLRLYRREDDAEVTGEYLQSSEDYVRLFLYLNDKEKIKMETVLKDFLGMKKAKGKDAGYPLRWNYVEDKTFSGNETRYEILSALGKAGLPTEWAEQDNRMYRLWHLLYSVDDTQELRGALKKFKDDEVFVESFLKVKPFKKDYGTYSEKAVKKLLAVMRMGSLWHEEDICAKTRTRITNIITGNIDSKLKEKIGGTRAFTTITDFQGLPVWLACYVVYGRHSEVSEIKKWETPEQLMEYIRGFKQHSMRNPIVEQCILEALRTVHDIWKEVGHIDEIHVELGRSMKKTAVERERDMRNSMRNENTNLRIRNLLIELKNDKDIADVRPYSPTQQEILRIYEEGALQQLTKENKEYDEIVKISQQAQPTSAQLKRYKLWLDQKYVSPYTGKTISLSKLFTSAYQIEHIIPQKRYFDDSFTNKVICEAEVNQLKSDMLGYEFIKAHGGEIVHCTMLGDVKILDEASYKELVVSHYANNNAKRKKLLAEDIPEEFLARQMNDTRYISKMVMSLLSNIVREKDEEEATSKNVIPCTGSITDKLKKDWGLNDIWNTIVMSRFERLNELTKTEAFGRWENKEGKRVFQTNVPPELQRGFSKKRIDHRHHAMDALVIACASRNVINYLNNESAKDSKRREDLRVKLCDKNRIIRKPWETFTQDALVALENIIVSFKNYVRVINKATNYYERYDEKGKKVNVPQKGVALWAIRKPMHKETVFGEVNLRRKEIVPIAKALDTIPAICNKALRKYIYGLIANKFNKKQLLAHFKSINYRWNRQDVSKVEVIVESKNNEEMVATRKLLDTSFDNKRIMSITDTGIQKILLCYLDAKGGDPTMAFTPEGIAEMNGDISIYNGGKWHQPIFKVRVSTKKGEKFCVGQKGCKSKGFVEAADGTNLYFAIYEDQEGVRSYSTMRLDAVAERLKQGLIPVEERNKDGVPLKFYLSPNDLVYIPSEEEGMSEGMCIDNSRIYKFVDSSGTTANFVPHTVASLIYNMDKKTAESFCHGNRIIQNEFGVGSPQSKNQRALTGEMIKDVCWKLEVDRLGNILRIIK

SEQ ID NO: 8445 - protein, 1207 aa, unidentified
  REGION 1..1207: note = Description of Unknown: Cas Enzyme sequence
MLMSKHVLGLDLGVGSIGWCLIALDAQGDPAEILGMGSRVVPLTNLGDDKAFSKGEAFTANQKRTARRTMRRGFARYQLRRYRLRQELEKVGMLPDAALIQLPLLELWELRERAATVGRRLTLPELGRVLCHINQKRGYRHVKSDAAAIVGDEGEKKKKDSNSAYLAGIRANDEKLQDEHKTVGQYFAEQLRRSQSESPTGGISYRIKDQIFSRQHYIDEYDQIMAAQRVYYPDILTDAFIRMLRDEVIFMQRPLKSCKHLVSLCEFEKQEKVMCVQQDDGKGGRQLVERRVKFGPKVAPKSSPLFQLCRIYEAVNNIRLTRPDGSPRDITPEERAKIVAHLQSSASLSFAALKKLLKEKALIADQLTTKSGLKGNSTRVALAAALQSYPQYHHLLDMELETRMMTVQLTDEETGEVTEREGAVVTDSYVRQPLYRLWHILYSIEERDAMRRALITQLGMKEEDLDGGLLDQLYRLDFVKPGYGNKSAKFICKLLPQLQQGLGYSEACAAVGYRHSNSPTSEEITERTLLEKIPLLQRNELRQPLVEKILNQMINLVNALKAEYGVDEVRVELARELKMSREERERMTRQNGQRKEANDKVAERIRQCGLYPTKPRIQKYMLWEEAGKVCLYCGRSIEEEQCLNGDDMEVEHIIPKSVLYDDSYGNKTCACHECNQTKGNRTALEYIRAKGREAEYMKRINDLLKEKKISYSKHQRLRWLKEDIPSDFLERQLRLTQYISRQAMAILQQGIRRVSASEGGVTARLRSLWGYGKILHTLNLDRYDSMGETERVSREGETTEKLHITNWSKRMDHRHHAIDALVVACTRQSYIQRLNRLSSEFGREDKKKEDQEAQEQQATETGRLSSLERWLTQRPHFSVRTVSDKVAEILISYRLGQRVVTRGRNIYRKKMADGREVTCVQRGVLVPRGELMEASLYGKILSQGRERIVKRYPLHDLKGEVVDPRLRELIAEYNQEITSKVKAKGAPLYLDAAEKQEVRSVRCYVDKPSVAKAIPIRFDECGRAITFVKSGSNHHLAIYRTPKGELVESIVSFWDAVNRARYGLPLIIKYPRKAMEQVIQREDIPESVLSLLPPADYEFVEVFQQNEMAVVGLPEEEFRRAVDTQDYRTLSEHLYRLKGISSKDYEFHYHLDTDDPDETDSSKKKKKRVRNTSGRIPRIYRIRGIGSLQKKNVHKVCVDLLGRISLL

SEQ ID NO: 8446 - protein, 1388 aa, unidentified
  REGION 1..1388: note = Description of Unknown: Cas Enzyme sequence
MKNKTWYLGLGVGPTSIGWAATDSNYKLLRKNKKRLWGVRLFEEAKKAVDRRTFRAERRRLARRKWRISLLEELFAKEVSKNDPNFFLRLKESKYHFEDKSLMNEYILFNDKDYTDKDYYKEYPTIYHLRSSLMTEENPDIRKVYLAVHSMLKNRGHFLLQGQSFNDSNIDSGIKELLELETVKINFEVTDEVIHSLKEIALEKKNLSDKNNDVKKLYPKEKQLQEIFKLVFGGKTSLDKLYDIEEYKELDNSVKSISFKEKVYEEVRPDYEQILSNYIELLDLAKLVYDSIVLADIKKEGKTISESKVELYNKHKDDLANLKKLVKTDSKLSEDKKKEVYFAIFKEDKEKGTNYVNYTHRSQEGKSCSYEDFKKFLKKELEKLEDSPTKTTILEELDLETFLPLQRTKDNSVVPYQIHKEELVKILDNAAKYHSFLAEKDDSGYSTREKVVQLFEFRIPYYIGPLNAHHNTENGGYSWAIRKKGMESVPVTPWNFKDVIDESASAEAFVNNLTNKCTYLSGEDVLPKNSLLYSEYALLNELNALRYEGNRISVEARDVIVTKLFKEQGKKVTKKIIKELLKTEGFIDGKGEIAGIDNIVKNDLKSYRDFKKILGDKFDKERVENIILWITLYGESRKLIKEKIIKVYGDFYTVDEIEKISRLTYKDWGTLSRKLLTGLVSEKLYNEETGECLNIIGAMRQSTILFMELLADKFDYMSKIKNHNKENKDDITEITPDILENLYASPSVKRSIWQTVRIVEELKTIIGCAPTKIFVETTKRSNAPYKVPTLNRNDLVTKYKTIREHEIFELEKELKNILDFTLNKNRLINEEPSKLKATKLYLYYTQLGRCMYTGKKIDFGELFDINKYDIDHIYPQSKVKDGSFNNIVLVTKASNEMKADVFPLKSKFQTKENKIFWRFLVEKKLITEEKYNRLVRTEEFSDDELTGFITRQLVETSQAIKVISNVLRELNPETTICYSKAENVSSFRQSFGKIKEANRKAENNEKLIRVQEINDYYNAKDAYLSIVVGNVYDVKFTRNVHNFIKNNKDARKYSLNGLFYTDVKNANTTAWEVNKTVHVVEKTMNNNNILITRRTSEQKGALYDATLYKAKVAEKAKEGTYYPLKTTDSKIKDVGKYGGFTKVKIAYYSIFEYTLDGKKGKQKITKIVPIPIYISQNIKDDKALLEYAQTRLPEKNLKLKYRKLCIGSLIKINNFNYYIGGKTNNNFTFDSAVQVILDKDSESYIKELAKYLNWKKENKDGKLWESITEDKNIQLYDSLVKKMNTGIFIRKTPNKYTELLTLEVKNKFINIDIDEQVKLLLEILNLLTNKKFTSKLNEIGITASRGVCSFNLSNQSQFSIIEQSVTGVYEKEAVIVGEKNNHLENNSN

SEQ ID NO: 8447 - protein, 1256 aa, unidentified
  REGION 1..1256: note = Description of Unknown: Cas Enzyme sequence
VNCFQNYKDSKHFSIPFMGNHSDSIFLFNSFIEISYTVSIMKRILGLDLGTTSIGWALVEEAENSEESKIIKLGVRVNPLTVDEKINFEGGKPITTNADRTLKRGARRNLDRYQLRRDYLIKELKNAGFINEETPLTEIGKDTTHQTLALRAQAAHKKVSLKDLAKVLLAINKKRGYKSSRKSKDENEGVAIDGMAVAKILYNDNLTPGEYAYNLLQQNKKHIPDFYPSDLKSEFDAVWKKQKEFYPEILTEILYKNLEGKNKGQSWTICSKPFEIEGIKLEGDRTQQKAKRYELRKDALLEKISLEHLAIVLQEINNDINGTSGYLGKISDRSKVLYIDSLTVGEYLYNQIKKDPHTSLKNQVFYRQDYLDEFEQIWETQATFYPELTKELKVKIRDIIIFYQRPLKSQKGLLSFCLFESWQQEYFDKVKQKNRKRTIGQRVIPKSSPLFQEFKIWQNINDLEFKYTGKSKDSLDKQNSMYKLEEGDRSLLFEEVNLRGDLTAAAVLKLLGLSAKDWKINFKDGIKGNTSNEKLFNVYQEIAAREGYGIDWKKNTAQEILEELRNVFPIIGIDASLLEFKGNLKGNEYSKQSSYELWHLLYSAGDDSKVSEEDKLIYGNSDVNLKKKLHQKYGFAPVYAGMLANVNFPNDYGNLSARAIKKMLPHLQDGDNYYEACDKAGYNHSNSINSEKNDKRVLKDRLEILGKNSLRNPVVEKILNQMIHVINQVCDTYGKPDEIRIELARDLKKSAKERLEATKYINSATKLNLDIAKTIKQQFGFTPTKNDIVKYKLWKELEPRAYKSLFSNEQIKLQDLYSGKIDIEHILPKALIYDDSFSNKTLAYREVNLKKANRTAIDFITQDKNAEVDNYIERVEALYNKGKGSISRGKRDRLLKSATDIKEGFIERDLRNSQYIAKKGRTMLLEVFKNVTPTTGRITDKLREDWGIINVLKELNLPKYRAAGLIEIEERKNDKKIEKIKDWTKRNDHRHHAMDALAVAFTTHNHIQYINNLNARRDKTHDKHFIIANIENLITHRVEDDKGNSKRTFIKPMPSFRRESKKHLEAVLISFKAKNKVVTRNVNKTKKDGGYNTSLELTPRGQLHKETVYGRSKRSKDQPTKINKNLAFAEAKQIIHFGQRVLVLKHLEAFDNNPKIAFDTKTIKKHPLLWNDEPLKEVLCFEEIYTIRKDIAPGLKLDKVVDEGIRDILKKRKEAYGGNDKEAFSDLGKNPIWQNKEKGIAIKRVTITGVSNAEAL

SEQ ID NO: 8448 - protein, 1377 aa, unidentified
  REGION 1..1377: note = Description of Unknown: Cas Enzyme sequence
MKKILGLDLGTTSIGWAFVHEAENNNETSKIIKTGVRVVPLSTDEQQDFEKGNSITLNADRTLKRSARRNLQRFKLRRSSLLDILKANDFINNNNLLSENGKDTTHQLYEIRAKAATQKISKEDFARVLLSINKKRGYKSSRKAKGTDEGSLIDGMAIAKELANKKITPGEYSLVLLQTGKKKLPDYYKSDLQDEFDLIWNFQKQFYPILNKHHYQQLLGKNRTVTKQYFEKEFLTELAENKGKDKKIQLYTWRAISIKEKLDLDIVTLILTEVNNQINNSSSYLAAISDRSKELYFQNKTVGQYQFEQLKDSPNNSLKNQVFYRQDYIEEFNTIWDTQSQFYPELTDDLKKKISDTILFYQRRLRSQKGLVSICELEKHLKTITVDGKTSKKLIGPKVAPRSSPIFQIVKTWQSVNTLRLVNEITNEEITLDDELRQLIFDKLQIQDHLKPTEILRLLKSETDIDTKVWKCNLEQVEGNKTQAKFISAFLEIIYNEGINELSKNTNHQNIIDFVTHHFKDFNINTDILTLDHSILGNDFTEQPAYQLWHLLYSFEGDNSNTGDKKLIEKLGTKFGFNEEQAKILASISFEDNYGKLSVKALRKLYPHLVDGFVYSEAAEKAGYNHSKSLTKEENEARLLKKSIEILPKNALRNPVVEKIINQMIHVVNQIISHPEMGTPDEIRVEMTRELKNNAKVRKELSSSIKKATAQNQKDREYLQKEIGLKHVSRKDLVKYKLYKELKSIGYKSLYSGTYIELNDLFFTNKFDVEHIIPQSLFFDDSFSNKTLELRSVNLEKGNQTAIDYCVQKGWETNFKNRILELRKSNSIGYSKYQKLLRPKEEIGGDFVNRDLNNTAYISKKATEILLQVSRHVLTTNGKITDRLRNDWGLIDVLKELNWEKYNQLGLTYTVTNKENKELKRIKDWTKRNDHRHHAMDAIAVAFSRREYIQYLNNLNAKHVNNDNTKDVIGIEKKFLFRNKHNKLIFRTPFPTLRKDSLDQLSKLIISFKAKNKVVTRNINKTKIKNGVLKKIELTPRGQLHKETIYGRSLKQEITFEKIDGKFNKDKIDTVTNTFYRESLLERLEQFGNDPKKAFTGKNSIRKNPIKINNGVKTLPEKVKCLTVIEQFTIRKPITPDLKVDKVIDKGIQRILKNRLNEFGGDPKKAFVNLDDHPIWYDQKKEKAIKRVKIEGVSNTIALHEAKDQQGNLITDKEGNHIPNDFVSTSNNHHVAIYEDVDGNLSDEIVSFYEAVVRKQKGFEIINKNDTLGNTLKFSLKQNEMFVLLDENFNIDQLNNSTTVNQEISNRLFRVQTISRVSYGNSVVRDYVFRHHLDTTTNKDAVLKGITWIALKSLSKLSCFEKIRINHLGEIVHIGEY

SEQ ID NO: 8449 - protein, 1227 aa, unidentified
  REGION 1..1227: note = Description of Unknown: Cas Enzyme sequence
MEKPKKVLGIDVGVASIGWAYIEEDIEPSKCRILDMGVRIVPLGNETDDFKKGKAVSLNAKRTEARGARRNLQREKQRRQKVIRLLKENEMYPNDELIHLRKYSNEAYDIAEKDPVNYKLYALHARAVEQKITLQELGMIILHMTQQRGYQSNRKTKAGENEGTDYLRDIKLNSDALGDDTIGQFFFKQFKADRDEMKSRKGKPYEMTRVKFDSSNAPKSKEKKKEGEKTNEENRIFFRDNYKNEFNKIWEKQSTLYKKVLTPELKKQIGERGLFFQRPLKSQKGKISRCRYFKNYKVAPKSSPFFQIFRIWQNVNALLLEDDQLRGHTLTVLEKAEIFEHLNKSKEMTGAAVIKKVLKLDYDRKYTLNKQTKEKQPINFKKIEGNRYNYELLKILKDKIFDNFTKEEKEKFVEFDPFIENPENQLSYRLWHVLYSVDDEKQLYETLQKDVEGKVKFGFNLEQAIALGGIYLEDGYCSLSTKALKELLRHMIPGHETEEGDLYPTACEKLGFRHSDWEDKQERETKDMEDVAKPVEKGELRNPIVEKILNQAINLVNEIIASEALGRPDEIRVELTRELKQNRKKRDEVTKKIKSETERNQRIVDDIKEYSKSHNTYIKITRKAIERWKLWEDAGETCIYSGEKIPIGEVLNEHSKYDIDHIIPQAKRYDDSLSNKVLTKRSENAKKGDRTAKDYILEKQGKGEMSYMEYIAIIKNSIKNGSKIQKLQTGEDDLTDGFITRQIKETQYISREFTKRLRPVCREVTSTTGSITSHLRNEWGINQVMRELFPKNHEGTWSKRDDHRHHPADALVVACTTQRIITYLNTLHSREKGEKLGQKVWQIPIPWHGFVAETKARMSEILVSFKSKNRVAVVNTNKYKAKIGQGKRKVIGTQTVLTPRGFLHKETVYGRKKKCLKQKVKVSKILKEKMLEYIVHPAESQAVGAYLAQYNNDIAAAIKDLKKNPIIIQGRKKPLTEVVVWKWVYTVRKPIVGLTQKQAGEIMAKDIRRETLARFEEEGNLKNVNSNRPINSNYGKGTQVKRVKIATDLKDLQALHENENGEPIDFVNLRNNHHAAVYKDEKGDYYNEVLSFWTAFERHRTQWEARKNLPKGAKKMPIELVKKDNLDEGHQFIVSLSINEMFVKDLNPDAIDFKDKKNYPLISKHLYRVQNVSDKDYVLSHHLLTESKNKQQQIRITNLSKLESYTKVSINRLGMITDVQKIAPAKK

SEQ ID NO: 8450 - protein, 1035 aa, unidentified
  REGION 1..1035: note = Description of Unknown: Cas Enzyme sequence
MNYTLGLDLGVTSIGWAVVSEEDSFLDTGVRIFPAGIDNFDTSNEQSTNVQRREARSARRRIKRRAQRRQLLRENLTALGWIPSSKHALDEQAIADWEALDPYALRHRALTEKISLAELGRIFLHLNQRRGFLSLRKSDETAADKEEQGILAEMSSLETAIQDSGHQTLGSYLYHVREADLAEHNGSPFVRIRGSHLRRSLIHAEFDAIWKQQALHHPEVLTDTLRFGQAGQRSAPISVVTPERRQKGVTLLEQFGFENLLFFQRRVYWPEASIGICELEGHVLFEQLRAEDKLGPDFNDYRKELESGIRRSPIDDRRFQEFRMLCEINNLKLTDYSTSVPESRPLAPAERTIVEDYCRSVAKPSFKMIKKRLIKHVGLQSVDQISLNLEEGGRKEISGLHTDALLSGKKGMGKRWHEIPEETKNQIVEYLCNPTATDEELTQRLFATGALSRDEVFSLSKCSLGTNHGNLCIRALEKLLPHLRKGMIYMAKREGDSSALHAAGYQRRDEHENDEHDLLPRFDDPLLPYAKQVNSPIVKRAMTELRKVVNGLIKKYGKPARIHVEMARSLKMSPTQRQDYNKRTRSLEEKRKKAAKEITNLRFLPTRDAIERLLLWEQQDRVCAYSLKPVSISKLFSGDVDIDHILPIKRSGDNSFNNKVVCFRSENAAKDNQTPYEWLRSDQDRYDKVIQFAYRHLREGGKSKKIVLKEIPEGFIARDLNDTAWMAKACRQYLTCLFPSDKSHLVQGTKGSHTSVIRDMWELNGLLRSDGLNLKTRDDHRHHAIDAVIIALTTQARIQHVVKTQRFETVITDAREEGMKRYVLKRRVEHEEFPWEGFRDDLKKSLAQIFVSFRPRKKVSGALHKETFYGKTSEGLLTARKEVKSLTAKDLKNIRDPFISKLIQGHLESGKTLEDDLLLPNGTPVRKVKILIKQAHLTLRENTRHEMHVWSDGTHHAAIFSLGGGKCHVQPVSLMEAAERKRRGEPIVQKTNKDLPPESEFMCSLSKGDTILCEKEGREELFVYSTMASTTLQMR

SEQ ID NO: 8451 - protein, 939 aa, unidentified
  REGION 1..939: note = Description of Unknown: Cas Enzyme sequence
MARIIGLDLGTNSIGWAIRDRGLDNKNQILHTGVLIFPQGVGEEKGVEFSLASERTKHRASRKLYRRRKWRKIDTLKILIENNMCPLTMEELNVWGTYEKGKENKYPTENEKFREWLKLNPYELRKKASEETVTNNELGRALYHICQRRGFKSGRKDADAGKDMEVYIEEKEKRGDQTLGAYLSDQLYAGIEVRKTKYQADDQEVNSSRISYIEEFDVIVKKQNLDKDLIEKLFDAIFFQRPLKSQKGTIGKCTLEPNKPRCAVSHPLYEAFRMYQFLNSIKIKNTFGNDSQFHFLTEFPHYFEIVKQLFFRKSKPNFKFADISKAINKEAKKRNEHFECNYKDKYPIVGSPTLSQFINLFDAEDWEDCKTKIKNNYKLSNNKSTDELIDELWHTLFFAGDFVNDITSKKVKDFVRERYNVTEEQIETYEAINLKQGYASLSRKAIKNILPFLKAHIIYSHAVFFSNVEAIVGKDVWEANSEFIQDTIIDIITCYKEDNLIVDIVNGLVGDFIKEYDNAHLDYILDETDKNNVEEKIISFYGTSKWNALSEAKKEKFQKEIETLFQEQLQKRRTGGYFLSKARLDEKIKDFLISEYKVTKEQAGKLYHPSAIDIYQDSLSGELESPFTTSVRNPMAMRTLYQLRKLVNTLLEEDKIDADTKIIIELARELNDKNKRLAIERYQREREAENKKHRTLLEPHAKKAKSKVTDFDIVKYRLWIEQNGKCLYTNETIGIADLFGSNPKFDIEHTFPRSKSFDNSLANKSLSEKKFNQIKGNKIPQELSVNYLQNALHNIAHWKENIEALKEKIEQQKYFSKVASTVEQKNRAIQQKHYLKLQYDYWKDKHRRFTDKEIHFRFKNSQLVDTGIITKYAKLYLQTLFKDVFPAKGTMVSDVRKSWGLKEKDRNLHYHHAIDAIVLTCMTKDIREKLATSFLEAET

SEQ ID NO: 8452 - protein, 1124 aa, unidentified
  REGION 1..1124: note = Description of Unknown: Cas Enzyme sequence
EHLAIVLQEINNSLNQSSGYLGAISDRSKALYFNKETVGENLYKQVLKNRHTSLKKQVFYRQDYLDEFEKIWDSQSKFHPELTEALKTEIRDVIIFYQRKLKSQKGLLSFCQFESWEQAYIEKATGKSKTRIIGNRVISKSSPLHQEFKIWQNLNNLEFKNKERREVIEVAKLDNEIREVIFNELNIRGDLKATNILKLLSKYLKIGKTTEWKCNFEKIEGNRTNQALYDVYQKIAEYEGYGFNWSKKTALDIINELKIVFKEIGIDESILDFNTEIEGVDFDKQTSYQLWHLLYSAEDDVKISEDDKLVYGNTNVALKKKLHTKYGFKPEYAPMLANIALQKDYGNLSSKAIRKIITSLKSGNSYSEACAIAGYNHSNSLNKEDLKNRVLKPKLELFKKNSLRNPVVEKILNQMVNVINQIIDTYGKPDEIRIELARELKKNAKERGEMTRGIAEATRRNLDIKKTITKDFGIPNPTKNDVVRYRLWLELETRGHKSLFTNEYIPKAKLFSKEIDIEHIIPKALLFDDSFSNKTLAYRTVNLKKADRTAYDFISSDSQSDIENYKERVESLYNNGKGAISKAKRNKLLLSQSKLPEGFIERDLRNSQYIAKKAKEILFEVFREVISTTGSITSKLREDWDLINVMKELNMPKYEALGLTEIQVRKNNKEVKVIKDWSKRNDHRHHAMDALTVAFTTHNHIQYINNLNARRDEHHEMHKVISNIQNKITHRNKEGKLKFEKPMPNFRKQAKIHIEQILVSFKNKNKVVTNNINKSKLEGKDNYHRKLQLTPRGQLHKETVYGKSKRPQEKPTKLNKRFTKEQAKFIINVPQRNAVINHLKKYDNNNEVAFDTKTLKKDPLLYKDEPLKGVLCFEEIYTIRKDINADTFKDVKSINKVIDLKVRQILLDRLSEYNNKPKEAFSDLEKNPIWLNKAKGISIKRVTITGVSNAEPLHYKKDHLGLEMLDDNDNNQPVDFVSTGNNHHVAIYQDKDGKLQEKVVSFYEAVIRVNQELPVIDKTYNQDIGWEFLFTMKQNEMFVFPSEGFNPSEIDLMDKKNYREISLNLFFVQALSIVKYGNNTIRDFIFRSHLDSSKKSDKQLKEHTYFHIKSLEDKRLRDCVKVRI

SEQ ID NO: 8453 - protein, 1067 aa, unidentified
  REGION 1..1067: note = Description of Unknown: Cas Enzyme sequence
MKYRIGIDVGTNSLGWAVLELDDNNSPKSVDDLGARIFSDGRHPKTGASNAEERRGPRGMRRNRDRGLQRKRGLLRELTEFGLMPTDEAERKDLEKLDPWVLRARAMQEVLPVHHVGRALFHLNQRRGFKSNRKTDKVEDTGKVYDAITKIKDALHEAGVSTLGELFGKPRLDVIAFNKTAPKGAGKPLPQARVRMRGEGAKMAYDYYPTRALILDEFDKIWEHQASHHPELTDAAKGVLRYRIEYQRPLKPQPVGKCTLIETEERAPKALPSAQHFRIYSEVNNLTVGQTGQKSRVLTQEERDIVSKKLLRPTNKTAKKTFDQIRKLLGLPNSMRFNLESVKRKDLVGDETAATLKDSWGASWYDLTVAEQDTVIEHLLTVEDPKSMLDWLIRTYDFDSNTAQVISNARLKDAHGHLSKLAISQILPHLKTGLTYDKAVSAAGLGRHSQRGDGVVYDEKLPYYGEVLSGHVAFAKPAPDNGPDTRNIEAKFGKIANPSVHVALNEIGKLINDLMSRYGQPPEQVVMEMARDLPLSARGKRELESRQAANQKDNEARREILNKHGASDTYENRLRLRLFEELPALEKQCIYSGEALSLASLFSDAFEIDHILPYSRTLDDGFGNKILCTRKANREKGNKSPFEAYGDSSDWGALSIRADALPPNKKWRFGPEAMERYENEERDFLARQLTDTQYIARLAKRYVEAIYGGQGLKDQENRVWVTPGRLTSDLRHYAGLNTVLPGHNSSFKERTDHRHHAVDAVVIAFTDRSMVKRAADQAKREDMYGHSDMMKIMAEPLQKHRGDIEERLKSVVISHKPDHGYQAAMHNDTAYGVTGERDDKKQMKLVTRKPIDSFEKAKQLEDIRDYQTRIKLLEAVQGLTGKEFKDALKVCADNMTPPVRRVRVLVPMKDSSFVTIGHGGNPIAKAYKGDGNYCYDIWSEIKKDKPVWTGQVVTTFQAYQRAQVDKNWWRKPLGQDGQKLVMRLRAGDMLELDHNDTRMIVKVCKISPGVIAMAEHFESNVDARTRSGYKGDKPLKYIFKAPSSLQKSKAVLISVSPSGKVRRKKMR

SEQ ID NO: 8454 - protein, 1205 aa, unidentified
  REGION 1..1205: note = Description of Unknown: Cas Enzyme sequence
VLNVVDYLPNHFSDGIDFVKKKGQYKPGKEVKISHRNNHKNSRYEFIYQAAFNEMLACFNIKGHDLNIPADWTIYYLRVKALSNKVSKEELSWILLNFNQKRGYYQSRDEDLEATTSGKEFHELEVEKFEDTGEQVKGKDLFKVIFSNGWEYDKFIVNKANWEGQIKEFIVSSKVLKDGSVKRSFKEVDSEADWAAIKAKKEDELKRSNKTVGQYIFDRLLENPNQKIRGKYLQTIGREFYKDELQKILINQAKYYPELSEQGGDVFLKSCKELYSKNREHRNNIAQRNLIYLLVEDILFYQRPLKSKKSTIAGCQFERRSYKTKDTKTKFEKEIVTKVKVASKSHPLFQEYRLWQFVHNLEIYLKEKIVDGRTKYDVNVTDEVFKTDHERVQVFDFLNSKKDIDETQLFNFLAKIGLIDKSEKTNKEWNYYWNYIREKKKYPTSDTRYQILSRLKKVSEVDAEQFLTTDELFNIWHILYSVKDPHEFKKALIKYAFQNDLNEAEFVDNFLKHPPYPADYCSLSYKALKKLTPLMRMGKYWDITQISELIVNKINKILNGEFDPEISEKVREKLVQYDSIDQFQGLPVWLCNYIVYNRHAEAELITKWDSPEDIENYLNAFKQHSLRNPIVESVILESLRVVRDIWVEFGGGESNYFDEIHVELAREVKNSAEKRKKMSSRNLANEDTNNRIRLILKELQGDDNTGSIRAYSPSQQEKLKIYEEGLHLNPNTNYDLLGEEEVSKFRRNKNPKKSEIQRYRLWLEQGYVSPYTGAIIPLSKLFGTEYEVEHIIPRSRYYNNSLSNKVICETIINKDKGNLTAFEYITKKGGSTIQGFKLFELEVYETHCKNYFSNHVAKRNNLLSDGVPDGFISRQLNDTRYITKKVLNLMSNIVRKEDEKEFNSLNVLSFSGSMISDLRNSWGLNDIWNELISSRFERMNKRTGTEDYSFWDEKIKAYRCDVPEDLKKGFSKKRIDHRHHALDAIVIACADLKHRLYLTSLEDKGIKNSLRPKICYQDKNGGYTRNYIHPWKGFTVQVLSLLHKTLISYKKNTRVINKTNNKTWQWVEDEAKKGYSKKLVKQTKGENWAIRKPLHIETVYGKVERLSDQKKTVTYKRIALSDIKDIKGLNKIVDEGTRKILRGHLKAYTISSKKEFDFDLAFDENGVITLNDNIKQLNGGKDHKPIFKVKQAETGSKFALGASGN

SEQ ID NO: 8455 - protein, 1526 aa, unidentified
  REGION 1..1526: note = Description of Unknown: Cas Enzyme sequence
MSKKILGLDLGTNSIGWALIQLNGEEKQGEIIKLGSRIIPMSEDILGKFDSGITESDTAKRTSFRGIRRLRERNLLRRERLHRVLNILQFLPEHYAQSIDFEKRLGQFQKETEPKITYRFNEQTKAFEFVFTNSFNEMVEDFKIHQPQLLEDGKKIPYDWTIYYLRKKALTQKIEKEELAWLLLNFNHKRGYYQLRGEDEEETTNKLVEFHSLLVIDVIDSGDRKGKDEIWYNVVLENGWIYRRTSKVPLEWKGKTKEFIVTTDLNDDGTIKKDKEGKEKRSFRAPAENDWTLVKKKTEFDIEKSSKTVGTYIYDTLLTNPKQKINGKLVRVIERKFYKQELQQILTTQQQFHTQLQDEALYNACLNELYEYNEAHKNSIGSKNITHLFVEDIIFYQRPLKSKKSLISDCKYESRVYKKDGIKTTEPIKCIAKSHPLFQEFRLWQWIQNLKIYEKESGKEATDLFFKSEEDWVTLFDWLNDRKEIDSKTLINFLSKPLKLKANLYRWNYVYDEVKDESKKYPCNETRAMILTRLEKVANMPTNFLSAEIEVALWHILYSVNDKLDIEKALNTFAAKHQLDESFVEQFKKFPPFKSDYGAYSEKAIKKLLPLMRMGKYWNEANIHPQTKARIEKIINGEYDETIKDRVRDKAINLTTIQHFKGLPLWLTSYIVYDRHSEEGNVTKWKSPQDVAAFLQTFKQHSLRNPIVEQVITETLRVVKDIWTTYGNGEENFFDEIHIELGREMKNPADKRKEMTNQITENENTNLRIKALLAELQFDADFENIRPYSPSQQELLKIYEDGVLKSAEEIPEDILKISKTPQPSKADLVKYKLWLQQKYCSPYTGQIIPLTKLFTPAYEIEHIIPQSRFFDDSFSNKVICESEINKLKNNQLAFEFIKSNEGRIVELSNSRTVKVFSVEAYEKFVKEHYDKNRSKRNKLLLTDIPEKMAERQMNDTRYISKEVKNLLSQIVRADSNDDGTTSVNVLASNGQITSILKQDWGLNGIWNEIIAPRFERLNTLTQTNSFGSINPSTQKFLPTVPIELSKGFSKKRIDHRHHAMDALVIACATRNHINYLNNQHALEKKKSKEEKQAKREDLRNVLCYKKYNEGSETNYKWLFKKPWNTFTQEAKATLTTTIVSFKQNLRVINKTVNKYEKWEVKNGIAEKVIATQKNKGESWAIRKPMHKDTVSGLVKLRFKKTVQLSAALDNWEDIVDNDLRKYIKSLVAVGYNNKKMLQKHFKDHNNTWEKKDVSKVEIYYWDKENVASRVTLDETFNAAKIESITDSGIQSILLNHLNHEKYQQAKDEKGKAIPPETLAFSIDGIEEMNKNIVALNGGKFHQPIYKVRTYEPKGNKFNVGHTGNKKHKYVEAAKGTNLFFAIYKDENGKRNYKSIPFNEVVESQKQSAGTKQILSVPERNENGHLLLFDLSPNDLVYIPTEEERENPTLVDSYKMTDSQINRIYKMVSASGNQCFFVKSSVATPIVNKVEFSALNKMEKSVDGLMIKETCWKLQINRVGQIIKIIR

SEQ ID NO: 8456 - protein, 1667 aa, unidentified
  REGION 1..1667: note = Description of Unknown: Cas Enzyme sequence
ITGKEAETDINNTRIGIHEDAVGVRIIAQDTERFDKGLTLNDPKGSTLTPTANRRVKRGIRRMKSRYKLRRDKLGRVLDFIGMNPDKAYFTNEKGKRGEYNDIGKAIYQLRDKAIREQISLNELGRILSHLNQWRGYSSDRFKKDEKQGSKKGDNELFTSVVEEVCFVGLLPNDKRYHYFIIIFENGDRGCDIRKVEEKESNFTRGQMHTYYFDEKNKEPEIDGIKKIKSSKLDTESYTYRKKHINNKVELFILEEEKKDKSQGTVGSFFYQNFYSDNIPTEERIKRIRNHTINRDWYENELDKILDFQYQYHKQFFDQLNIEAIVKVSFKNYQAILNDVLKKDGIKEQLKCLIKDKIIFFQRPWQQAKNKGQCPFEKIKVKKLITLKGIGKKETKEEHVGRTVIPRSHPLFQEFKVWQQINNVRVYLKLGNEKIDLFANEKDFKKYIGKQISEVKQELFNALQNSKSLSWRSFAENELGLRNKKEVVDEETGEVVKCHFEYNFRKLKKDKVTWEDIKLKGNNTKVALQNILIEKSGKWFNELYTETNKKREKREQKEKGSKNNNSNKVPLTNLQLLWEIIYDITNGDASKVAAIIETHFEFDKDICIQLANLKFDDAGMGSLSARAIRQILPLMSDGKNITSKTQEKVNSLIVINKEEVQKSKDEKLESLKDFIPDKKARLRLSKFSTASDFTYLNYWEATAVRYGSHSTKKGKAIGTIKPVERHSMNNPIVEKIINETISVVNDIKQKYGFDEVRIELSRELKASMDERQQIWESMNNNAAKNEWAKQMLRELKSEFSELDTDSSNKSNLDKIKIIEDVVKFKNAGEYKLKEKEYKLSEPSKAEVKKYLMWLEQNFKCPYTNQPIPFTDVFARGKVVEVEHIIPRERYYLNSYANKVITWKEVNQAKANNGNRTAYEFIVSKRTEEKVKVGNNEFTLVPKEEWESHVKSMFPKGGKQTNLLRKEIPEDPINRTLNETQYINKKLKEKLSELVGEQKVWVTSGAVTDILRDRWHLNDIMKELMRSRFENYNTGEKKEKRNLTHFTKVYNNKTGNYEDREVFEGYSKRLDHRHHAMDAIIIACTKQNHIQYINTLNAINSSDQENNESKKAKYNLLKADVCIGNSSNKFKTPWVEDKFIPDVKKALSEVVISHKNTRLLISPSKHRVAKDIKPNKIASIRGELHKETNYAKKNYFEGGKTFINKLIPQILKEKKENQYQTMVHFKTFEEIIKETVLKEKYQNILISLFEKHETEQLNDNLCKVYSKAILQEIESNKLLVNSKTNDPLQWLSTYSDKDKSARPKGLSMDLNNAKEVNSIANPRIKRLALYRLKYVNDKKAAIDKTDNDVSEKNKAKREIETLPLYSNAIYEVRTKQEDGSYKWIELKDLNESDFDKIDYSNLNDSKYIRKNKTEKIKALILARGIERSRQTYFVDPLFFSDTPIEIKKTRQMSYFQNLYEITPKRYVQVEETFMTYFFQEKTKDGTIDETKNRNPKFLKFIDAVSIINAEKPNSIDYKKLIEKEKTNEELQNGIQYGLIFTLSKNDLVYLPDTILNKEQMEEINWDNKQAILPNLYIVKDMNPSLSKIVFQQLHKADSIKISEADSKSLFNNPELKEQTEEIKYGTVPMLQRCIKVFTDKLGKKIVPYWEFPNGCWNKERAIELGLIK

SEQ ID NO: 8457 - protein, 1097 aa, unidentified
  REGION 1..1097: note = Description of Unknown: Cas Enzyme sequence
MEKKFRLGLDIGIASVGWAIVDEGENIIDAGVRLFPEGGSTVTSAERRVKRASRRLLRRKHHRIERLRKLLFENKIIETLDYDFYINEITPYELRVKGLTEKLTNRELAIALLNLVKKRGIHNFEIKAKESEEEKGTKDIILQNEKKLNHKYVCELQVERLKENNIDMDNGAVRGKRNVFKTEDYVKEVKQILDTQVKKGIDIKNDFVDNYIKILEGRREYYTGPGKPSIYGWNDEKEWIEGLFGRCTYFPDEIRMCKHSYTAELFNLLNDLNNLKIKREENTSLTKEEKEKLIELFKTQNPTLKRIAENIGVKETDITGYRIDKKEKPQFSTLTSYKEINSIFGIEDLDLIDEICKILTIYQTNDKIIEKIEELLKIDISEEQIEKLNKLVGYTGSHSLSKKAMSSILEDLLETSKNQMELFTEKGLVPYKMDFTGKKEIPKNYVEEWILSPVVKRAISQTINVINSVHKRYGIPSEIVIEMAREKNSDDKKKFLNELQSKNEKTNKMIKEYLSERSYSKEIGFFEKMKLWNEQGGSCVYSGKTIAIEDLLNRPENFEIDHIIPRSISFDDSQNNKVLVLRDENQNKKNMSPFQYLSTSGRYEEFKARVKSSGLNRKKQENLLFEGELSKYSRKFIARNLVDTRYATREILNLLKKYYKDNEHSVKVKSVTGAMTNQIRKMWKFPKSRELSHAHHAQDALIMLSAEKILNSLKNVRDFDSGEEKSSVDLRTGEILTDKQYKELFKYEYGCKIKEFNKYRYSHYVDKKVNRQLTNETIYSTRVVKELDKTGKKEIENEYIISKHTGIYSKDNKTIKKFFEDEKKQKQLLMYHNDSKTFEKFMEVYNEYKKESNPFYAYYNEHKEFITKYAKKDDGPPVMSIKYRESLLGNHLDLSHKYGAKDKKVVMLTIPALRADIYKKGDLYKFITVTYLMMQDKGKYYQLNSEAYKASKKNKDIDESYEFQFSLYSGDVLEIEQDNQKEKFKFKGVNNDKTNKFEIDYLDKFNSNYIDAIKELQAILKENETIDKYIFERRVEEKLGFRVDSKDVKDFIKNYPVSSKQKCLTIGKAIKKIRKIYVNTLGIEYDSKERFISRIYK

SEQ ID NO: 8458 - protein, 1034 aa, unidentified
  REGION 1..1034: note = Description of Unknown: Cas Enzyme sequence
MERIWGFDIGTTSIGFAVIELEEEQGTGSILQEGVRIFPEGRTEKELEPRNQARRAARLLRRQIRRRRLRRRLLRDALADAGLLPRFGSRGTPEWDAFMNDGADPYQLRARGLRERLEPFEIGRALYHLAHRRGFLSARRMEERADVKKTRDKEEGPIKEKIKALAEKLEGRTLGEYLASLTDERKRSRHISREMVVEEFERLWAAQAAHHPQLLTNGLKERLRGILLYQRPIFWRLQTVGQCWLEAGEPVCPLGSWLGQQFRMLQHVINLRLRFPGQLPRPLDPQERELLLKKLQQQTAMTFPGVKTALRKLWKERGLDLKPDISLETGGETRLLGNKLEAELADMFGDNWDTHPARDRLRQELYPRLFAVYNRQIGEKRIELHRLDPFKNEIAPGKARFVEEAEKDFGITPEQAEQLAEFEPPSGWLRFSEHAIRKLIPYLEHGLGLNETGGALDQAYPGWRERSEDVLDRLPSHPKRMPVPRNPSVNRALNELRKVVNNLLAVYGKPDLIRIELLRELKKTKKERLEISSRYSKNRRSREEGAQALKENNVRVTNEAIEKWLLWKESDETCPYTGRKISFDALFRKGEFQIEHIFPLSRSLDNGYFNKTLCATDVNKNKGNRTPFEFFRDDPDKWDEIRSRLETWVKAKKFPLEKMKNFLREDYPEGQEFLEERQKADTSYIAVEARKFLARLGLPVGVANGQVTAQLRKAWGLDAILNPETPWRKNRADHRHHAVDALAVALTSPAFIKRLSDFYARGKQGENPKLPQPWETFWQDAKAKTEGIVVSHRVQRKVSGPLHKLTFYGDTDQEVTEGGITYRYFVTRKKLEDLTESEIKGEKKSKIRDDAIRKLVQDHVATHGNAFPPYPALVNKETGEVRDIKRVRLLVRQQKHLLAALRPAPKTFADLAGNHHMAVFQMPDGSADYETVSLLEATRRLKKGESVVRRAPMNGGRFLMSLAANDILEMMQEDGSHHYVVVRFCNEKGRVFYKPINMADDPKPEVSFGPKDFLKPNIRKVSVDPIGRVRPARD

SEQ ID NO: 8459 - protein, 1361 aa, unidentified
  REGION 1..1361: note = Description of Unknown: Cas Enzyme sequence
MKKILGLDLGTTSIGWAFVKEDEKRAKSHIVATGVRVIPLSTDEKNDFKKGNAISVNADRTLKRCARRNNQRFKQRRSNLLNLLQEYGLLKSTDSLTEEGKNSTHKLIKLRAKACKEKISLQDFSRVLLSINKKRGYKSSRKANNQEEGQLIDGMAIAKELDNINMTTGQYSYSILESGKNKLPEYYRSDLIHEFKKIWVTQKESHPIILTDEFFKEIIGKTSKATYYKFNTEMGITPVELKGKRKEKKLESYNLRAKAANKQVSIEELAFVLQQINEDINKSSGYLGAISDRSKELFFNDKTVGQFLLEKINENAHQSLKNQIFYRQDYVNEFEKIWSVQSKFHSKLSLNLKKKIQYEIIFYQRRLKSQKHLVSNCELEPQRKAIPKSSPLFQQFKIWQNINNLVFTNKKTKDSINASELDQEIRNLLFENLNLVDNLSSSQVLSFVFEKPKEYELNFKKVEGNRTFHSIVNILNSIIESEGYEINYKKNTLVELKHFISDFCDKLNIDLKILTLDSSINENQFDKQQSMQFWHLIYSYEDDSSNTGIEKLNQKLNSKFGIPKEYCTRFSNLSLQDNYGSLSSKAIRRIIPHLQDGLTYDKACALAGYNHSSSETLEEKEKRILKSKLELIPKNSLRNPVVEKIINQLVNVINAIIEDPKLGVPDEIRIEIARELKANAKQRKDTLAHIEAATKKHIKIREILKSEFGFKYINRNDVIKYKLYQELGPIAYKCPYCSNPISKQDLVKANVDIEHIIPKSRLFDDSFTNKTLSHRTCNLEKGNLTALNYMETKGEVQLDAYKSRVEELYTKGTIKKTKRDKLLMSADKIPEDFISRDLGNTQFIAKKALMMLREICKEVHPTTGKITDRLRSEWELIDVLKELNWDKYYKIGFTKIIVGKNGQQIRRIKDWTKRNDHRHHAMDAITIAFTKKSIVQYLNNLNAKSDKSSSIYAIEKKELHKTKSNKLVFKPPYNGIREDAKKHLASLLVSHKTKNKVTTRNKNKSKLKGKDNFNTKIELTPRGQLHKETIYGIKKYYETKEVKVNASFDIEMIMQVAKKSHREALLERLSTHANDPKKAFTGKNSLTKNPIYLNNGNKDTIPEKVKLVWLETRFTIRKEINHELKIDKVIDVGIRNILRKRLVDYDNNSKLAFSNLDQNPIWLNQDKGIKIKRVTISGVSNAEPLHHKRDYKGVEILDAQGNPIPTDYVQTGSNHHIAIYKNQNGDFQEEVVSFYEAVARKNAGLPVIKKDHELGWEFLYTMKQNECFVFPSDDLDPSEIDLKDPKYYDLISTHLFRVQKISAGDYTFNHHIETMAVSSDTLKKKELNKGTFYRIRSPKNLNDIIKVRLNHLGRIVHIGEY

SEQ ID NO: 8460 - protein, 919 aa, unidentified
  REGION 1..919: note = Description of Unknown: Cas Enzyme sequence
MRELILSGEKPSSFYHRLIQRDAELLNKFKAGNGRPFEIFDDSPDKQKNNENKKKGLLISDLQFLLSMRKTGAKEDSWENLFIPNQRLDQMVQEINAVKESEGRDVEKKRRDKAIGELIGSQNDPVVRHRLTVFWERLKYLESKIDKNGRPLGEPGQIVLEFIREDFMGKKAQKKLKDFQDGRAVARKKAREFGGLKYELYEAQSGGCLYGKQVIKNGKCAYLENGLPQPNTPGWDELVIDHIVPCEAPYNGPDSMVNYVLTTTDTNNAKRKRSPFDWFHQDRLEEWDCYKNFVTSKIGTLGGKKVQLLTRADAADLVSKYTSLAETAWISKLAQTLARLHFGWPLDHERGQERITVVPGGLTGRIRRKYLLNTLLDERFKNLPTSQIQSENEEEAEKDRTDKRHHALNAMLISFFPDWMRNPQKDDFFRFPVPLDQPFPGKRNKHSVREYFKKLLDEVMPENLFLEKAKLAEMAYGKSFQSEESSVSGETIKYKTAKVALAELACSKGTTGNARYDYKQACRLANGIVDKELRKCVSEFLKSRPLEADWIAFCKKIEEETFKVRRGKAVKVEMRQIVEIRTRRRSVKEMAYGQGSSREYDVEYAKGHVDEIVEDSPEQAAIKMKLGKFFADNPNEQQWRTFAESLKPIDRCKLRAEPDETEKKTKARTVKLEVFAHRPIPMRFNLKKAHARIDKICDEHIRQRLRAFVNQSPSPDQTAWNAFCESFAQELRDDGGSLLKDAEGNVLCGAAIKKVRVNDGSPDEYKDFSKDGTGTFFKNKKEHKGQFVYLADNGTPDGKVIVRPVYVFESVRKVQSEVKATDKLKYVVGYFQSGCTIEICQPLSAESHGFVVLNEEKKKRVKDAASPLAPGKFLLKTITKSRSIEMETATGIVINSKLDSLIQAGLKRVSMAKIKPSKP

SEQ ID NO: 8461 - protein, 1034 aa, unidentified
  REGION 1..1034: note = Description of Unknown: Cas Enzyme sequence
MEYLLKTAESSSWKNHEFYTSSVVLGIDIGMEGIGIYLRKGRQTLHARTYLFTLPESAPLENRRLKRSARRARNSRKRRNILLRAWCEKHGLPTSPFITPNHEPFRLRLDAITEGKGLKSAEALVVCLRHLICHRGYDYHLTEEGTYPWGEGLNFGDILSWARTTACKPEYGKELKALLSESGLGEDKLERLYSAIDGAVAHYVDKPIRKVLEAHFREKKPNLRPPARKNNFPRELVREHLEEVCRKNCRFFVQTNLENALSELKEILDYHRKPPGALAEKKTKVCPYAERLGLAQGMKCALNDNLEVRKFKLLQFLAERTFVEKGGARLYASAAVVQAALQRVEEDAKTVAAKQPRKDTRTLRRDFEKEAQIVLARKESHNEDYFDQLRDLLKPNITVLKKRASLGAESARHLYATATQNGANFDPTSVRANLENYYQLRRDNERGYGIYPQVEFLLGPRQSNDTQAVHGLLKRLFANAVLKEHLDGKAHPDYVVVEVIGDIPRDKDEAREIQKDQKARRSFKDKLFEQLEGKSSGSARKRLLLFDQQNGLCPYTGKELGDALNSSLQIDHIFPRERGGIGEMINLVLTHGQTNAEKRDRTPFEFIGREGLAQHLSKMKWNRAKRELFAREESECPQWQNTTRMAQLARQLRDEVAHWLNVKGDATEMAQRIGTPTGYMTSICREAWGVPKKNRNDLRHHLYDAITLSYIPPGKGLNTVQYGGIFYYPPESKVGSVEMRALKNAGPETEIFARLPSDECLVVKPRRKKSKQSRMEETIYGQDKEDNLWSRKPLLENATNSEDASVPVKSAEKWLGNSGIPSVKLPSKRIRDWSEHSGQKQLKLTDGTPVYRVPVQANKEQSTSLVAHYNTLRKEPIGFKVATEGYLRCEIWSGSIKDKQGKLKTVFERLLIPHPRNIRNMCRRGENWKPKFSRPFLRNLELKGKFTKGDLLKLPLTVEGGICEPKDKVFCCLWYRVTALKTNGQIEFQLAEFKDKSATPLANCSKDIAQQKPSSAEVLAFLVDFNTNKAANPT

SEQ ID NO: 8462 - protein, 1240 aa, unidentified
  REGION 1..1240: note = Description of Unknown: Cas Enzyme sequence
MKKILGLDLGLASIGWALINENVVDGITKNEILGLGCRIIPYEGTEGKDFDKGTGESRNSLRTQARTARKGYDRYQLRRKYLVETLIKNKMFPDDKLKSLPKMQLWELRSKAVSTQITPPELGRILLWLNQKRGYKSSRSDANLDKKDTEYVATVKSRHDKIKELNLTIGQYFYQELVNDEFYRVKENIFPREAYIEEFDAICTTQKKYYGAILTDDLIAKIRNEIIYYQRPLKSQKGLVSVCEFEGFWCKGKDGKEYFVGPKVAPKSSPLFQLAKMWENINNIKLGSRTGGNIEITTEQKWLLFNHLDNNEKLTPSDLLKILDLKKENCYVNKQLAKGISGNITKFAIRKCFDDSTKYDHLFKMDLNIVETDKEGYLYDKKTGEIKGSKNIKFIDPIIEREPFYQLWHIIYSIQDQEECSRILQTKFDIEKPIADKLVSIDFSKHAFGNKSGKVIRKILPYLMEGDGYSEAMSYAGFDHSNSLTKDQNLERKLLGELKLLPKNTLRQPIVEKILNQMVNVVNAIIAKYGKPDEIRVELARELKQSKEERNDTDRAMSKRQRENEEISKRLAEYGLRATRNNIIKWRLYQEIDNAENKLNAICIYCGQPISLIEALKGNEVDIEHIIPKSKLFDDSQSNKTLAHRKCNTNKNDRTSYDFMKSKSEQALAEYVDRVNALYANHVIGRAKRDKLLMTESKIPDNFIERQIRETQYISIKAREILQTICHNVWSTSGNVTAELRHLWGWDEVTMNLQFDKYKSVGLTHMVDWESEHGKNKHQKEVITGWTKRDDHRHHAVDALTIACTKQGYIQRFNTLSASKTREDMKFEVDKRSIEFKEKLNLLEKYLVGENPISVDEVQNAVANILISFKSGKKVAVIGKRKVGKRGNKKVVQTGIIIPRGQLHQEFVYGKIKSKEKKPVKYLFENPNLIFSPKIKSLIENLIEKYEGDAKKAYASLKKEPIFLDESKTTPLAFGTCFKEEIVIKYNVNTDFNKTDDVIDKNIRKILQNRLEKFGGKNKEAFKDVQGEGKKLIKWYEDEGLERPIKSVRCFTGLSAVVPVKKDEQGKNIGFVKPANNHHIAIYIDNEGNKHEHVCTFWHAVERKKYGIPVIINNANEVWDKIQMQADGTYPDSFLEKLPVVQWNLLMSMQQNEMFVLVMTSEEIEIAFSKKDYRTIGDKLYKIQKLGSSDYTFRHHLETEIIDDPNAKICKRFFRIKSIGSLFSLNPIKIKINCIGDLKV

SEQ ID NO: 8463 - protein, 1059 aa, unidentified
  REGION 1..1059: note = Description of Unknown: Cas Enzyme sequence
MDDRQPVIVGIDLGAKSIGWAVLTCGPDDNGRWEPTGLLDAGARCFDAGVDGNLEQGKDEARAVARRMQRGARRQLYRRAQRLRRSLRALTECGLLPGAVASPPEARHTYLSSLDQRLKELMLADGESARLVQDSPIYQLRRRCLTGHRSLDEIGRALFHLAQRRGFKSNRKDTSKEDEKGKVKAGIADLAKMIEASGCRTLGAYFSTLDPHQKRIRNRWTARSMYEAEFNAIWESQAQHHPTVMTDEARGKIHHAIFHQRKLKSSADLIGLCELEPHHRRAPMGCLVFQRFRIVQKINDLTWRDENAAICGPLGIDDPLRTALIDRLDTEGDLSMAEAKKTLGLHKKAAFMLEEGAAKTLPGNRTVAKLKPKLLRHWDNWSHGQREMFVNELISDIDQDVWRKRLVKYWGLSEEEADDIDDIGLQNGYASLSRRAMRRLLVEMEAGIPFATAKKKLYGDRSMGRPALKTLPGVLRPETRRFLGKINNPAVARSLTELRKVVNAIIGKYGKPVRVRIELARDIRNTRKQRQDITKKIKERTGEREGFRKEMADKLPHRFGGREPSRSDIEKWALAEECTWVCPYTGKIITPELLFGTHAEFDVEHIIPRSRRPDDSFVNKTLCHNDENRAKDNQTPFEAYHGTSRWEEIMGRVKRFQGPGARAKLRLFEVEKIDDDFTNRDLNDTRYASRLAKDYIGLLYGGCDGVDEAGNRCVQACCGQITSTLRYELGLHTVLSDDGTKNREDHRHHAVDAVVIALAGPRAVQMLATAAGNASAVGRRRYAPLTEPWSGFRPSVQAIIDRTIASHRLDQTLSGALHEATNFSSPKAHINRKTGKTDEVRHVRKKLVGITIGQIENIVDPRVKKAVVAFLNGRDPKAVFKENAPVPTLPNRQTPDRPVPVRRVRVWEKKNVISIGNNGAARHVAAGENNHLEIVASTNKRGNEVWDISNIVSRYEANRRLCAGESVVKREWGQEKELRMVLRKGDYLQIDIEGRRELVRVTSIGSGEIQCYRPNDARPSGASHPDRNLARFRSGTAFAAVNPRKVSVSPIGEVRPCNE

SEQ ID NO: 8464 - protein, 999 aa, unidentified
  REGION 1..999: note = Description of Unknown: Cas Enzyme sequence
AGLEDLVRDGRGKSRNLRRREARLTRRGLERHSRRMRNLAVALQRAGLLPSGTLTDGEDRHLFFMRLDEELDSRYALRARALDEKLTSFELGRALYHLAQRRGFLSNRKTAPKSTEDLGVVKKDIGSLREEMEHAKARTLGEYLAGIDTAQRRVRGRYTAREMYAEEFEAIWDTQSRYYPTILTESLKTELHHNIFYQRPLKSQKDLIGDCELEPGRKRAPWGILAAQRFRYLQLVNNLRAVSGSTGEITELTGEERQILVDALETNGDLTFAGIRRLLHLPRGARFNLELGGEKRMPGNRTAAKLIEVFGLDGWQVLTEQQREAIVEDMRSIVLDDTLKKRGMTAWGLDEEAATRLSQIRLDDGYCSFSRQALAKLLPPLHKGVALQTAIRELYPERWERNTQPLEALPPVRSEYFPELRNPIVERALTELRKVVNAIIHEYGKPDLIRIELGRDLRQSAKQRQSTWKRMRETEQRRARAAKKIAEEVNIENPSYDDITKILFAEECDWTCPYTAKRISMSSLLGDQPQFDVEHIIPYHRSLDNSFLNKTLCNAEENRNVKRNRTPFEAYHASDKWEEILARVKKFKGDGRQEKLRRFRMNQEDVQQMLDSFTARQLNDMRYAARRAKEYLGLLYGGVNDDGIDADGKRRVQATAGQATAILRNAWGLGGILGDGPVKSRDDHRHHAVDAIVVSLTDAGRISQISKAAARMVSTQRRLSAHLDEPWDGFSHDARDAINKIVVSHAVTRRVRGALHEETFYGKPHKGDDGKDYVHIRKPVGKLKPKDVNCIVDPVVRQCVRKRLDELGGTPERAFSDIEKHPVMKAGDGRLVPIHRVRIRKVVTTFPVGEAHRMRHVKSGSNHHMEVVEVLDENGQTIKWEGYVVSMYEAYQRHRNGETIIKRDHGEAKRFRFSLAWGEIIQIRREEGVDLRRICSVWPECRGNTQIGRLSHVAVNDAQKGKDIKKAGGFHSPTVNSLRKLDCQKVTITPLGDIRYAND

SEQ ID NO: 8465 - protein, 1161 aa, unidentified
  REGION 1..1161: note = Description of Unknown: Cas Enzyme sequence
MKLLGLDIGSNSVGSAWIDTEAKTIKMGVSVFPAGVEESDTKRGAPKNQARRGYRGQRRSIERRAKRKHQMRRFLLEKGWMPYNPVDEKKWLQEKNPWILRREGLRMELNPDEFGRVLLHLAQRRGAYGFDVGEEEKEAGKIKDAISGTKEEMKKYSTKTFGELIAMKFEERRKEVGKKNKSVGIPIRNRKKSSGEGTYEFCADRSMIWDEFDKLWTKQKSFGGELAGQLTDDCRKELDDPEGDETWRYKGVLFGQRRTYWDVGTMARCDLEPTDLRCPKVDMYAQEFLVLETVNNIRITPRGEVKRRLKPEERVAVINVLEKQKTASESTIRKALKIDKGQKKTQYTLSLEKDPERGLNTNWFRREIVSAVGANKWKEMSTEAKESLNRAILKFEPKVEKDVHQLRAGCQRWWEFSEEQASRFVEAWKKRARIDDRVNYSRRAIKNLLPYMREGFTVNEARKLFAEDAENGASNEQRERYSFCAKVENRAARRYVVKHPDLLPPAPEKLSNPVVRKAIHEVRRHIQAYIREVGRKPDRVVVELAREARQSAIVRNRQLAKNREREKERKEILKKFHLERETKTQQAKAVKRVLLSREQRYRCTYCGDERDTISEELAASGEGVELDHIIPESRGGNSYLSNLVLCHSRCNRGKGNKTPIEWLTEEQFGLLEQRLKHLKKENEVKWDNLHKEAPDLDGFVESQLTDTAYASRQVAGWLRDVLYEGERDGRRRVFTTKGRYTSILRSDWGLIPDKSIKKKDRSDHRNHALDAVVIALSGPERLSQLAKAAEKQELAKSEGYEYPKRKRLEPAWGNFDSFRANVMKEWKKLVVAHRPEGRKITGSLHNDTQFGPVIDESGNPTGDFTIRKAIGELTHNHLRVPQGWEELRDQLEQSKSEVQRRRMRSQMLSLADVKPGKAGIVRDRWFREELRGWMRRNGLDPDSFDKNKEDKRKFKELVKGGCVALASGVPVRRVRLLRRPTVIEIKRKHWDPETEKMEYDPNLKSRRYYEPQNNHHIEIRKNTKGKWIGKVIRNFDAAKRVRVKPPRQKPRGWAPPSAVNREDTKQGRFVMSLSIGEIVYMKHPENEETDYFVVFKIDGTGCIHFTPHWDAGRDKETERCPAREDIRLSAAQLQKLGVEEGGHPQKVWVGPLGDVKFLQLD

SEQ ID NO: 8466 - protein, 996 aa, unidentified
  REGION 1..996: note = Description of Unknown: Cas Enzyme sequence
MKSYTLGLDIGSKSIGWTLLRDKPKPSIVDIGVRVFPEGVDRDTKGAEKSKNATRREARGARRVHQRRNLRREKLIKTLRASGILPEGEQELQELLKKEPYQFRAKGLDEKLSLFEFGRALFHINQRRGFKSNRKTGREKEDGKVAKEAGELRQKIKEDGCRTLGEYFAGLNSEEQRIRDQYTFRSMYEEEFDKLWEKQSEYYPDVLTEELRKKIRDEIIFYQRPLKPTDELIGECELEPGEKRCPRGDWYARRFRILQDVNNLKIHSPDGTERGLEDDERRIILKELDAHEKVKFSRLRKKLGLLETQEFNAEYEINKKGKKREKLKGDEFSAAMRSRNLFGAKKWDSMDKEEKIGLNNACLELDDDELVEKMMAEYGFSEEQAERVLKMPLPQRYMSFSLKAIRKLLPLMEEGKRTDEALDKIYPDRNKRDVGEGKDKLDLPEDLRNPIVNKALFEVRKVVNAIVREYGKPARVVIEMARDVKGSRREREEIQFKMRENERRNDEARTRLIQDMNILNPSRDDIIKYKLWEECGKKCPYTGKSISQTALFGPNPEFQVEHILPYDRSLDDSYMNKTLCCVIENRVKGNQTPCETYSHDDEKYEQIKQRIKVLPWPKRRKFLQKEINLDECINRELNDTRYICKEVVGYLRKLGVSVRGTKGKITSELRHQWGLNNILDLSNSDMKNRDDYRHHAIDAVVVAVTKNEHLRRLAKSKYSKVDRSFGEPWRNFREELAEKVKHINISHRATRKVSGALHEETSYGLTGETDEKGQDVFVYRKKLEDLTGPMVGKIVDPVVRQIVKDRLLENGIDPGKVKKIPKEVWNKPLYMKNIKGDKKVPIKKVRVRDVFKNMILLKDKEGRPYRAVAPGSNHHLEIFEYKDEKGNIKRDAKVVTMFEAAQRNKRGENVVQRDHGDGRKFVCSLSINEMVMMKDKKGEMDLYRVQKMDKNKMVRFRHHKAATIEKREEYIDKTAYLFDGHKVTVDPLGRIHRAND

SEQ ID NO: 8467 - protein, 1101 aa, unidentified
  REGION 1..1101: note = Description of Unknown: Cas Enzyme sequence
MNKERIVLGLDIGVGSIGWGLVQIREEEYCDEREDGTIDKKYRIKDGKIIDMGVRTFQIPQDRQKKSLALQRGTARRSRKTTRRKAQRLQKLIRLAKEFNLIDNNFNRDEILKPQKGDKEAKWDIWFIRKEALERQLTNTEYFRVLYHIAKHRGFFFHTKAEEIQKEDSKSETGEVKKGLARIRKKLEDGGWETIGQMFCDEFKQTNKKYKRKRNKQDKYENSIHRSLLKEEIEKIFEEQQKLGNSRAKDELKQRYIDDILMKEEGIDDERLQKMMSKCEFIPGKMCAPKESYTAERRSFFDRLNTLELVDTQNKDKHLKLDDKQRDKIEALAYKNSKVTFAQIRKELDLENDLDKQLNLCSYKGKDPEYNKKLTCEIKNGQLKFDEKHKVPIVDINTGEVKVIEKEIKKIFNSKKLWPNSKNIYVYYSDIRKQLNLSGDFRFADLKGYTKSTAELGSESKYIKQFEDDTFIELKGYHKIRKAVENCDKNKWDELAGDTNKLDIIAEALVYHKSDETRTDYLKENGIIDEDIINAVLPINMKQVANHSKEALKKLLEYMETGDLFHEAKEKAGFGGIEYEKQAILKPYGGFFENNPVVARVISQTRKLVNALVRKYQKQFPIDQIHIEVATELASSEKRKNQIRQGQNRYREDKKAAAERCREWKLNPEEGQNLLMFRLAEQQNNKCPYTGKAITFYPTGADNEVYIKDCEIDHIIPMSRSFNDSLNNKVLCSPEANQNKRDRIPFEWFEDNYGKDSLQWMEFENRAIKMYGMPYPKRKNLNRKSWTEKDKEKFLSRNLNDTRYATRHIADYLRKYFDFSKSQRNDIKDVSRIQLRSGGITAFLRHMWGLNKNRGENDLHHAVDALVVACSTYGHVYLVSNLAKQIERKGKNWYKHFGRDKFKPWDNIRGDIQAAVDKIFVSRMPRHTVTAAAHKETTLSKAEATKKRVIEINRGYAEMGNMVRADVYVDKAGKNYVVPIYSVDIFSKKPLPDKYLHKNDAPYDQWPSVKDDNLEFRFSIFKDDLISIDGQKYYVDYVRATRSKISVKKNDGSFIDKIKGEKTKEVSYKNKELKKYSVDMLGKYKEVKQEKRLGNKFKSGV

SEQ ID NO: 8468 - protein, 1124 aa, unidentified
  REGION 1..1124: note = Description of Unknown: Cas Enzyme sequence
MKKRILGLDLGPNSIGWALIEEDQNKPLSGELIDMGVRVFPEGVAAFDTGKEESKNERRRVARSMRRQTQRRVRRRRQLKAALRESGLWPQDENEETELYKLDPYELRAKALHEKLTPHEIGRVLLHLNQRRGFLSNRKKDRADKEASEMLAEISENEKERAESGFQTMGELLASKASSIDHRDRSKNDHVRNRHLARSQFDQEFDAIWDAQRKYHPALLTDSLQYGRTGKTPESIKPRKPKHVSDDSSLLQEFGIYGLIFFQRPMYWPKSVIGLCELEPKQKRCPLSDRRYQRFRLLQEVNNLRYGDPDAHEEVALSPEQRNLVIEKLSVTKERSFDQIRKDLGFLESCRFNLERGERSKLKGVPIDAMFAAGKVLGKKWYQRPSEERDAIVAELLDNEDEGGRFIERAVSEWGMSAEEADLALTVDMPASYGRLSLKAIQKLLPFLEKGMVYMGEDETNSAMHAAGYLRRDQLKRRIFDLLPIPGRTANSPLGDIPNPVVKRTLTEIRKVVNAILREYGKPDAVHIEMTRQVRQGKKARQEYSKRIREREKVREFAANKLRENSIRVNRDNILRYLLWEEQRHECIYSGKTISFAKLFQEGGGVEVDHILPYSRTLDNSQLNKVVCLREANQTKGNKTPHEWLASSQPDQFAEVCQRANKLLQSARMPYAKYRRFLQKELELDDFINRQLSDTSYITKATLEYLRCLFDKDHDVLGLKGQLTAELRYQWGLDTLLSEIPDSPGWQDAKADNLTAGEKNRADHRHHAIDALIIATTNRVRLRQLSKLVKTGGAKAHGEILEDPWPDFRPSVFEVAKRINVSHRVDAKVRGQLHEETLYGKGPNAETWVVRKPLVDLSANEIEKIRDGAIRRLVIARLKSHGIEFGRGKKPNAKQMKEALSDLRMPSGVSIKKVRILKPEKTIRPIREQSGDQAYVKPGSTHHLCIFEYEENGKTKREAVFTTLLEAIRRKNTGEAIIKMTWNEHPNARFVMSLSNGEQVLADAKGEQKLLFFKTASSTQGQIWFCEHTDARKSADYRQVVFNANTLKGEKVVVDCLGRVRSVNRKTKPEESLESIDSRVLEIAKDSIASGMTNTQIRKRLKQENLSGFGADLSIALKYLRANH

SEQ ID NO: 8469 - protein, 1440 aa, unidentified
  REGION 1..1440: note = Description of Unknown: Cas Enzyme sequence
MNKRILGLDLGTNSIGWAYIKEGENPDQSSIEQIGVRVNPLTVDEQTNFEKGKPLTTNADRTLKRGARRNLDRFKLRREQLLEILKSSNIINEETKLTEDGANTTHSTWRLRAKAATERIELDEFARVLFAINLKRGYKSSRKAKNEDEGQAIDGMAIAKRLYEDKLTPGQLTYHLLQEGKKTVPEFYRSDLQAEFDKIWAIQKRTHSDILTDEFYKELQGKGQRATAALFWTKYKFNTADIKDIEDSLKNEQTIKLSNREKKRLQAYKWRNDAVSIPLEKEQMAFVLTEINNNLNNSSGYLGAISDRSKELYFNKETVGQYLYHQLKKNPHTSLKNQVFYRQDYLDEFEKIWETQTQYHPQLTKELKEEIRDVIIFYQRKLKSQKGLISFCELENKEIEVNKNGQQVKKTIGLRVAPKSSPLFQEFKIWQMLHNVVIRKKGTTKRNTSKENDQKELFVNENEFVFDQEAKQILFDELNLKGNLTASAVIELLGYKANEWEMNYTALEGNRTQQSLYEAYLKIIEISGHDLRDFLKIKSNKDEIELKDLDVSATEIKRVVKEIFSTIGINTAILDFDAMLEGKAFEQQACYQLWHLLYAYEGDNSTSGNETLYALLQEKFGFSKEYASVLANINLQDDYGNLSAKAMRKIFPHIKENKFSEACELAGYRHSKHSLTKEELENRKLNDKLDLLPKNSLRNPVVEKILNQMINVVNTLILKNSEKDAEGNITKYFHFDEIRIELARELKKNAKERAEMTSNINAAKMEHEKIVKLLQKEFGVANPTRNDIIRYRLYEELKITGYKDLYTDTYIPKELLFSKQIDIEHIIPQSRLFDDSFSNKTVVYRKDNLDKGNQTAYDYMDRKFGAEGLTAYQTRVEELFKTKVISKAKYKKLLMPESEIGDGFIERDLRDSQYIAKKAKEILFTITKAVVSTSGQITDRLREDWGLINVMKEMNLPKYRALGLTEMEERKYGQKVEVIKDWTKRNDHRHHAMDALTVAFTKHSYIQYLNYLNARKNEKHKLHGNIIGIETKETEIKMDDNGDKKRVFKQPIPNFRQVAKEHLEHVIISHKAKNKVVSKGKNKVAGKQIVQQTLTPRGQLHKETVYGRYQFYEQKEVKITASFDKETAQKVSNPLFRKLLLERLEANNNDPKKSFAGKNVLSKQPIYLYESKTTTLPETVKIVWLEEDFSIRKDITPDNFKDEKTIDKVLDEGAKRVLKARLSAFGGDAKKAFSDLEKNPIWLNQEKGISIKRVTISGIKNAEALHYKKNHFGELILDNNGKKIPVDFVSTGNNHHVAIYKDENDALQENVVSFYEAVERVNQGLPIIDKGFNQSIGWQFLFTMKQNELFVFPNEKTGFNPVEINLLDPKSRKLISPNLFRVQKIATKNYMFRHHLESQLIDENMTRSITWENIRTPLNLFSLVKVRTNHLGEIVSIGEY

SEQ ID NO: 8470 - protein, 1405 aa, unidentified
  REGION 1..1405: note = Description of Unknown: Cas Enzyme sequence
MKRTLGLDLGTNSIGWAIITEENGKKRITAHDPETHEGYNPVLAGSVIFSEGVARVKGNEVPSVSTRTSARRTRRLYMRRRMRKQRLLQHLIKNGLCPLSEAGLRDWKEKGNYPTEDAFTAWFIMNPYELRAKGLNEKLTQLELGRILYHIAQRRGFRSNRKGGDGEQKTLHEGSPDRGITGYNETKKLIERYETLGKAGAELHKTHTPIRNRYVMRVDLVDEFNKFWEVQKDFHPILSDALKAELGDGKNGDLFFQRELKGKKGDVGRCTLEPGNKRAPLSSPIAEVFNVLHAVNNIKMDKHMLSEAGREAVLPLFFKKDSKGNVTFTIEHVRKALKKAGIEGELNYEKWESRAAKESKEVKLTGAKTIAHLADLWNTDAMDIFRAYAQMRKEDEAERQKWDDRWNTIHREQNAWGEISERKEKGQYVRKPESKHEQRDLKEYATNAPDWKFNDDQLKALKAFDPKQGYHNLSARAMGRTLPYLYQGVPYHDAVLFANLPAVFKVVHWQRDANGMPILNAQNQPIAVVVKDERGKKVPKVDDRWSAMNEDERESIRNGIRDQVKSQRVYSIETILLNGLIRNYRDQFGDAGRRNQFWNGEWDNRLDRSVDEAFSTSQKREMGDEGRTQLRSKVKAAFLHHIESHDKVLFEKVSSMEDRIKFWLIDNYPEYELAKTVDKRGLTRRVDQLYHHSAINTYRERDDRLGNPVTRGMKNPMVYRALHTLRKLVNEMLPEHGKPESGLINKKTEVHIEMARQLDSANKRRAWERYQAVMRTKNEEAADKVREYFKKEGREREPSDDEIERMWLLEEARDLFKQAKCVYTGKIIGCADLFNGGAEVEHTLPRSKTADNSMANKMLCDTRYNRDVKKGHLPGALPNFEKPFHAAGHDCPAISDSTKPIYARYMRYKNEVETLRDKSKAAGNAGNKDKKDKAIQDRWYAQFFRDYWRTKYEHLMAEEIKPRFLNRQLVATAQITKLARRYMNSYFDKVVCYKPEALSAFRKEWMGESFVKEKDRSKHSHHALDAAVCAAVDWNAFTALAHHYEVHDEKDVAGSFDHPWDNFGTDMHKLRDGALIHHVDKASIGRSSNFKKKVKLKDGTTREVYATGDSVRGSLHNDTYYGRIKRQIKGTEDFETVTVIRKSLLGTTQFPFKEADKANVVDKKIKELLADKNLEKIKAEGGLEMKTKNGDSFTVQKLKKVRVLEKRIKNPVAIKMHRDTIRTSSRHKAHEPLEHKQHLWVTGGENPVMAIYADAKGRINGYVFGLLELTRYMQGRSGRNALAGSIPRVHPDPKRVGYTLAERKGKPFLLHAGQKLVLYKQSPEEVDRSNPTEMNKRTYVIRELIEDGRIRMHNVLDAREDAVIKEQTLTEWDPERSVIQLRISVSKLNALCDGIDIELSPLPMA

SEQ ID NO: 8471 - protein, 1200 aa, unidentified
  REGION 1..1200: note = Description of Unknown: Cas Enzyme sequence
KQQMKRTLGLDLGTNSIGWAIVEQEDGVKKLAAAGSVIFPEGVARVKGNETPATAQRTRSRATRRLYMRRRMRKQRLLLHLIKNGMCPLSEAGLKNWKVKDSYPLEEAFITWFKLNPYELRAKGLVEKLTPMELGRILYHLSQRRGFQSNRKGGDGEQESFHEGLEDKGIAGYNDTKRLIEEHGTLGKAGYELGKDHIAIRKRYFKRSNLVDEFNQLWDVQKNFHAILTDGLKAELGDGKIGDLFFQRPLKGKKSDVGRCTLEPGKKRAPISGIEAELFGVLHTVNNIKMDGRPLNEAERRKVLPKFFRKSSATFPFEDVRSALKEKGVEHSFNYDRADIRSKEDGKHVKLTGAHTIAHLADLWDADPLTIVDAFGTMAPEKEAERKQWEDRWSVIYNANDWADISERKEKGQYVRAVGAKRDKRDLKEYASTVWGLNEEKLEVLKKFDTKQGYHNLSSRALGRIIPLLYQGIPYHYAVLYANLPTIFKVVHKAADGKTVMSIDDRWAKMTADERKAVHQGIHAQVASHRQYNVETLLLNGLIRHYRDTFGDEGMRKGFWNAEWDARLERAIGETLSLDQKRSKGAEELAKLHSDVKKEFIRNIESHQKVQFEELYRMDARVKNWLQANYDLEPKALEKLYHHSAIDIYKNRQGDRLGDPKTPGLKNPMVYRALHSLRMVVNKMIDAKLIDRKTQVNIEMARQLDSANKRRAWERYQGVMRKKNEEAEKAVREYFESIGKHDNPTDEDIERMWLLEEARQVFGKVTCIYTGKEFGVADLFNGGVEVEHTWPRSKTVDNSMANKMLCDTNYNRTIKKERMPATLPNYDKETMVQGKMLPGIKESAEPILKLWEKYKRIVDGCKQSSKTAATKESKDKAIQDRWFNQFFRDYWRTKYEHLTAEEIKPGFMNRQLVATGQITKLARAYMNSYFNRVDCLKPEALTAFRKEWMGESFVHEKDRSKHTHHAVDAAVCAAVDRTAFNALAHHYEEHDEKNIAGSFDHPWDSFGTDMRNLRDAALVYHVRKPSIGRTSVYVRKVKLKDGKTVVVKATGDTVRGTLHGATYYGRVKRKKAGTDEYEVKTVIRKTLDHSSFYPFKEADKAKVVDKRIKELLENADLEKVKADGGLEVRVKNGNGSVIQKIKKVRVFEPSVKNPKALKAHRDALPGAEHKHHLWVTGGENPLLAMYENSKGRGAHRIFSL

SEQ ID NO: 8472 - protein, 1003 aa, unidentified
  REGION 1..1003: note = Description of Unknown: Cas Enzyme sequence
MRVLGLDVGIASIGWALIEIDDIGGEEGARGEILAAGVWKFDSPEEKTQNGSRLKSEIRRNFRGQRRVLRRRRQRMNEIRRVFARHELLPRDDRDALKQPGLDPWKLRTEAFERALRPVEFAVALGHIARHRGFKSNAKDVKSAQAANANSAMSKAFAATKDKLARFRTPAHMLCADESFLVSGTSVRRLRNRDGDHSRTQLREDLLSEAAALFRAQARLRADHATTAFEEEFTKAAFFQRPLQDSEHMVGRCPFELDQKRSPKRGYSYERFRCLSRLRNLTLVEGRETRALSASEMNVAMLDFGADAKFTYAVLREKLALPASVSFAGVAIGEEKRLDFVVRSGAAAAGTHKLRSLIGAALGETTWRELLATPERLDRIAEVVSFRNRYDLIRQDLLASGLDEALTRTLVTAAKDGGLDLFAGAGHVSAKAARNIIPALMQGLTYDKACARAGYDHTDSRSRHAFDVGVFGKEALARILSEKRVSRELVDSPTARKALIEALKQVKAIVETHGVPDYIHVELARDVGKSIDERREIARRGEARGRLRDELIERFTREMGRAPRGGANQDKKGRTPFEWFHVERGPNEWEAFVARVDSLRIDGFKKRNYKLRDAEAAADKFRARNLNDTRWTSRLLAEALKQLYPGVEKNAEDKGMRRVFARPGALTDRLRKAFGLQWIKKNEKGERIRDDRHHALDAIIVAATTESLLNRATRQIQMKEREGRPFELTEIFPPWTGFREACLDALEMVFVACAERRRARGKAHDATFRQVATRDGERKAYERKMVADIKIADLERIKDPDRNMATVRALRAWIEAGKPAGEPPRSPKGDPIRKIRLAAKSKVNILLNTGNPNRPAAVDRGDMARVDVFRKPNAKGVFQYFLVPIYPHEIAMLAAPPMRAVQGGTVEENWPRIDSSYEFMWSMTSMTLLEVSRSDSEIIRCYFRSLDRNTGALTVSTVSSALPVKMRIGTRTLFGLRKLHVDRLGRVHKVEREQRTWRGKVCD

SEQ ID NO: 8473 - protein, 942 aa, unidentified
  REGION 1..942: note = Description of Unknown: Cas Enzyme sequence
MSIKDKISRGTDANLQLAFDVGHSSIGWAVLKAHTGKIPTLLGCGSVIFPSDDCLASERRGFRRQRRHIRATKQRIARIRRLLGHLGVLTDKQLEAPGCAWPWLLAARVLRGGEKLTWPELWDVVRWYAHNRGYDGNKGWSKHDAASNEDSDKEKRAGELLAEFQKKHGQPGTMAEVFCDVLKVDPLGAVKSSMQRVRNLGAAFPREGVEGEVERVLHTHVGVLPQVDDRLINALMRDHTALPSPDRPPPARYGQRLNDGSLSPGGLLFGQLVPRFDNRIIARCPITFERVYQAVKTETGNEGKAKREAEKQAKVPSVDCVEFHRFRWAMELAKIKVATGNSGAPRNLTVAERQTVNTEMERHGYLTPGELKKVVRAQTGGAPDNLDQILTHPDAERALVLDPVRRYIQSDQLVSALWPALPRRLQKRLSGQWRRGHAVSLAELLDDCGEVRDAIEVICERYLDAQNTKKRKKDEPLTREQLLRTPLHVKPPNGRAPHTRAVMREVVGFVFSTDRHPAEEGGPIFRSEAIRQAQIQRALDEQTNNHLVRHRLKLLVGETEEEAKKHPKQRRLKGLFRDLVDSYAAGEFARIVRITIEVNREVREMSGKTAQEQAKLLGQQLAHFKSVAKKLAEDYEGLGIHVGPGLIRKGRIAEDLGWTCPYTGKPYDALDLLHRHVDKDHIIPRSDRASDSLDSLVITFSEINKWKNKRTAYRFVEEEQRKPVPGLPQLTIKPLSTYLKDVEALETFKGHDDDQRRKKNRKRLLLLRDYVEKEFTPSDLTQTSQLVRLGAQALQKQYADCEQQPVITSLPGSVTGAIRKSWNLIGCLAAANPQVLNPDELDQDGRPKVRTKTEIRGITHLHHALDACVLAFASYFLPRDGGAWELLVKRRLNADEQRRARQLLGWAAEVTKDGELRLADLPPTVKAQVCERLKERRVVQHL

SEQ ID NO: 8474 - protein, 1354 aa, unidentified
  REGION 1..1354: note = Description of Unknown: Cas Enzyme sequence
MKKSYSIGLDIGTNSVGWAVITDDYRVPAKKFKVHGNTDKVCIKKNLLGTLLFDKGETAEGTRLKRTARRRYSRRRNRIHYLQEIFSEEMGKVDGGFFQRLDDSFLVAADKRGKRHPIFANITDEVKYHQKFPTIYHLRKHLADSSEKADLRLVYLALAHMIKYRGHFLIDEPIDIRNINSQKLFDKFLATYDLTQEDSHLAEIKIDITEIIVSKESKSRKVEALLSLFSGQKKNSFFDNLLKLTFGLTPNFKSNFDLAEDIKLQFSKDSYDEDLENLLGHIGDDYTDVFIAARNLYDSILLSGILTVSDPSTKAPLSASMVERYEKHQKDLVRLKEFVRENLQDKYQDIFSDKTKNGYAGYIEGKTSQEEFYKYLKGILNKIKGAEVFLEKIDREDFLRKQRTFDNGSIPHQVHLAEMKAILRRQEEFYPFLKENTERIQQILAFKIPYYVGPLARGNSRFAWASYNSDVKITPWNFNDVVDKSSSAQAFIERMTNNDLYLPEEKVLPKHSMLYEKFTVYNELTKVKYVTENGESKFFCANLKQEIFDRLFKTERKVTKKKLIDFLDKNFDEFRIIDIQGLDEETKTFNASYATYHDLLKIIKDKDFMDAAENADILEDVVLTLTLFEDREMIKQRLAKYAEHFDKKVFDNLSRRHYTGWGRLSAKIINGIKDKQSSKTILDYLIDDGYANRNFMQLINDDNLSFKDEITKAQVIGDNDSLHHIVQDLAGSPAIKKGILQSVKIVDELVKVMGHAPKQIVVEMARENQTTAKGRRNSQQRLKGLTDAVKEFGSDILKDHPVENAQLQNDRLYLYYLQNGKDMYTGNALDIDRLSDYDIDHIIPQAFIKDNSLDNRILTSSKENRGKSDDVPSEEVVKKMKGFWYKLLKAKLISQRKFDNLTKAERGGLTEDDKAGFIKRQLVETRQITKHVARILDERFNKDFDENNKRIRNVKIITLKSNLVSTFRKEFELYKVREINDYHHAHDAYLNAVIAKALLVRYPNVEPEFVYGEYPKYNSYRERKSATQKVFFYSNIMNMFKTKVTLADGRIIERPMIEANEETGEIAWDKTKHIATVKKVLSYPQVNIVKKVEEQTVGQNGGLFDNNMVSPCSVDPTKLIPFKQGLDTSKYGGYQKPTTAYPILLLTHGKQLIPITVMDKKIFEKDPVLYLEKRGYKQVEKNSFVKLPKYSIVDIGDGIKRLWASSKEVHKGNQLIVSKKSQELLYHAHHLDSDISINYLQTYRWQFDNLFYEIITFSKKCKLGKEHIQKIEEAYSQKKNTASIEDLSTSFIALLGFTQLGATSPFNFLGTKLNQKQYTGKKDYLLPCIEGTLIHQSITGLYETRIDLSKLGGD

SEQ ID NO: 8475 - protein, 1354 aa, unidentified
  REGION 1..1354: note = Description of Unknown: Cas Enzyme sequence
MTKKILGLDIGTNSVGWAYVKEDENSEQSSIEQIGVRVNPLTVDELTNFEKGKPLTTNADRTLKRGARRNLDRFKLRRKQLLEILTSSKIINAETKLTEDGANTTHSTWRLRANAATEKIELNEFARVLFAINLKRGYKSSRKAKNEDEGQAIDGMIIAKRLYEEKLTPGQLTYHLLQEGKNTVPEFYRSDLQAEFDKIWAIQKQTHSDLLTDEFYKELQGKGQRATAALFWTKYKFNTADIKDIEDGLKNEKNILLSNREKKRLQAYKWRCDAVTMPLEREQIAYVLTDINNNLHNSSGYLGAISDRSKELFFNRETVGQYLYHQLKKNPHSSIKNQVFYRQDYLDEFEKIWETQAQFHPQLTKELKEEIRDVIIFYQRKLKSQKGLISFCELESKEIEINKNAQVVKKTIGLRVAPKSSPLFQEFKIWQMLHNVVIRKKGTTKRKTSKDNAQKEVFANENEFVFDQEAKRILFDELNLKGNLTASAVIELLGYKANEWEMNYSSLEGNRTQQSIYEAYLKIIEISGHDLRDFLKIKSNKDEIELKDLDVSAAEIKKVVKEIFSTLGINTAILDFDAMLEGKAFEQQASYQLWHLLYAYEGDNSTSGNDTLYRLLQEKFGFNKEYASVLANINLQDDYGNLSAKAMRKIFPHIKENKFSEACELAGYRHSKHSLTKEELENRKLSDTLDLLPKNSLRNPVVEKILNQMINVVNTLILKNSEKDAEGDIIKYFHFDEIRIELARELKKNAKERAEMTCNINAAKIEHEKIVKLLKKEFGVANPTRNDIIRYRLYEELKNTGYKDLYTNTYIPKELLYSKQVDIEHIIPQSRLFDDSFSNKTVVYRKDNLDKGNQTAYDYIDRKFGAEDLTAYQTRVEELFKTKVITKAKYKKLLMSESEIGDGFIERDLRDSQYIAKKAKEILFTITKAVVSTSGQITDRLREDWGLINVMKEMNLPKYRALGLTEMEERKYGQKTEVIKDWTKRNDHRHHAMDALTVAFTKHSYIQYLNYLNARKNEKHKLHGNIIGIETKETEIHIDDNGDKKRVFKQPIPNFRQVAKEHLEQVIISHKAKNKVVSKGKNKIAGKQTVQQTLTPRGQLHKETVYGRYQYYEQKEVKITASFDKGTAQKVSNPLFRKLLLERLEANNNDPKKAFAGKNALSKQPIYLDESKATTLPEIVKIVWLEEDFSIRKDITPDNFKDEKAIDKVLDEGVKRLLKARLNAHGGDAKKAFSNLDKNPIWLNQEKGISIKRVTISGIKNAEALHYKKNHFGELILDNHDKKIPVDFVSTGNNHHVAIYKDENDALQEKVVSLYEAVERVNQGLPIIDKAHNQSLGWQFLFTMKQNELFVFPN

SEQ ID NO: 8476 - protein, 1058 aa, unidentified
  REGION 1..1058: note = Description of Unknown: Cas Enzyme sequence
MTNISTNPYSLGLDLGSNSIGWALIKLDENENPCGIEKVGVRVFKAGMEGLIEQGKEKSRCKNRREARLSRRQIERRSRRYKKLAGLLQKIGLLPEGDIRNGVERQRIFEDLDNELRKIYIDSNLPEKEKHLINQKFIYYLRSLAVEQKLEPYALGRVLYNLGQRRGYLSNRKGQKEDDSEKRKVVKGIAEIRQEMEALGAETLGKYFSKIDPTKQRIRGRWTARDMYEHEFYAIWNFQSKFYPDIFNKENKRRVFESIFFQRPLKSQKDKIGYCIFENVARGAIRNRRRAPWFILKAQYFRILQNVNNLTVRTNRKDVRSLTQDERRMLIDYLNHHREVTFNNVRKLLNLSDEYKFNFEKNKKGEAKLIGNRTAGSIYKIIGDKWDQMTPELKDKLVHDIYSIVDNRHLKKRLIKYWKFTEEEAEKLSNMPIEDGYCNLSRQAIDKLIPGLEEGKSFSTVAKEIYGVNKNTCGDVDLLPPLNEAPISIYNPVVKRVVSEMRKIVNELVKLYGKPRFIRIETARELKKNKKERQAIYESNEKRHNEREKIKEQLRSQGLSNPSEKDVDKYLLAEECGWVCPYTGKAISFRLLFFEPEFDVEHIIPYSRCLDNSMRNKTLCHVAENRSFKNNLTPYEAYGSMEEKYNEILSRVEKFNSQDKDEKLRRFKMNNEELGEFLDNFTSSQLNDTRYAARVAVDYCSLLYGDDWRKHIFTVSGGITHALRTMWKLNNILGNSEKNRIDNRQHAIDAIVIAMVSPRMVRSISEQSSKISVEEKRNKHWWNYIEPPWETLYNEAFDKVTNIIVSRRIDNKVSGRLHEDTLYSFPEKRGENEYVSRVRKPLSSITSNEVDDIVDPVVKELVIKKIEELGGEPNKIFKDPKNLPMLPNKNGDPVPIKKVRIFKKDRFLTIGQNERRRCVRVDENHHMEIFEIKNKKGKIKWDANIVTMFEAYRRRKCGEPIISKILVRDGEVVEDAKFLFSLQKGDIVYMKDSNGKYDYFYVTIIYECSRGDKGLKLVPHFVSKKDKDYPNISKSVNKLFKEDAKKCVVDVLGCCTLR

SEQ ID NO: 8477 - protein, 1375 aa, unidentified
  REGION 1..1375: note = Description of Unknown: Cas Enzyme sequence
SLAAERRKNRSKRRLYNAKRYRKWELLKCLIDNNMCPLTFEELRMWSVGNWIEIDGKWKNKGRIYPINNVDFQRWLAFDPAIFGDKGKSDKGNPIRKNPYDLRCELINRKEENEYLRKLKTGRALYHLAQRRGFKSSRKSGQSTYAKNEDIEKLKLENPDFQIALLAKEKLNEGKRFRASGVIQRKYFEDEFYAICEKQEIDQDLVEILHKAIYFVRPLRSQKGLVGNCTLEKGKPRIPISHPKFEEFRALQFINNIKWREKGSKEFVEIPISLKKKILEELFFRKLSSGKNKGKISEDNYFKFEEIIKKYSENGTYEFNYKNLPNVSTCPTIASIMNVFQDEWSDCFIQDENRYGINWDGLSIKYKTQDYKNLGRRLKRKIVKGKIKYIEAELKEEKTLGIDEIWHLLFDYIQTKDNQDALEIFCKEVLGFDENKAKSFAAIDIPQGYGSLSYKAISKILPFLQEGYIYSEAVLFANLKSVLGDKFEDNKEDAKRIIAETIKEVSQKKEILNIVNGLIQNYFSKAEISHAKGVDKFIKDLAWQETNNRLEQYFGVADWNKKSETEKEKLEQKVFELYLRFLNGEQKDDEKASAKGIKVPEIDYYKLPRLDIAIKEQLKTQFKVSDKALNLLYHPSDIEMYPVSKTEIKGTDIKLLESPQPPSKGWKNPMAMRTLHELRHLVNYLLKIGKIDKDTKVVVEMARELNDANKRWAIETNQRYRKEENKEFAKAIVGVVKQKYPNIKENDIENINRIRLWWEQIDNNEEIYRQIKSLKEDVEKYRLWKEQDCVCMYTGKLINITNLFDGTQTQLMHTFPRSISFDSSLANLTVGDAFYNNEIQGNKIPTQLPNYKNDITINGRTYTAIEPRLKKWQDKIQHLRDLIDDNKRRTKKTQDVETKNDLIRKRHLLQFDYEYWQKKVDTFTLEEVPLKWKNSQLVDTEIISKYARAYLKTVFEKVDVQKGTTTDSFKKIYQIKGEEQKDRSKHSNHAQDAAVLTLIPGSAKRDAILEEYYKSLEKKEKYHIKPYESYVSAHIIEIENNVIINHIPHDKTLTPTIKHIRKRGKKTGKIAQGDSIRGQLHDATYLGAIKPNVYNKNGRAIKDDQTGKYLNLQSNGENIIWVVLRKKIDKADIEAIVDEALKKHIKNQLEKGIKITEVKDFAGKIIRHVRVKNFSPTYDKALKVKPHIYTSKHQHKSLYLANNAANYLCLFYKGFNEKGKEMRAFRFISLFELSKLENKKMDDIIKNPEYNQYVKKKNKKEYKFHLNNIFKVGQKVIMFKNSIDEIDKQNVEDLRNRIYQIYKFNNSGTDYIFLQNNIEARNETDLKEAGYNIDGETKFIPTTYQPRLKLKADNFNCLFEGIDFEIKPDGTIIFK

SEQ ID NO: 8478 - protein, 1322 aa, unidentified
  REGION 1..1322: note = Description of Unknown: Cas Enzyme sequence
MSIVMKKKMNYSIALDIGNTSVGWAVIDENNNLLKHRGRNMWGVRRFEEGQTAATRRNFRATRRRLLRRRQRLDLLQELLAQDVLAKDESFFMKLKESFLVKGNGNKIYNFFNDSDFTDQNFYDKYPTIYHLRYKLITNKEKEDIRLVYLALHHIIKYRGNFLYEGQTFNIQDSTIITDLENLLEYLKENFEYDIEFTKDDLKEVEKILTDSSVIKSDKVKEASEVFKADKDSQKVLKEVFKAVLGNKFDFLVICNLGEVENQEDYKTNLSDEEKEPLFETLLGDHFEVYSLLKNIYSSIILREILGTDEEGKVRLLSQAMINRYDDFKKDLAILKRLIKEHFKGKYNYIFREVDDKTPNYYNYMNRPGKTSQIDFYNFLKKVLNQKREELADNDDYKYCIKRIEDNNFLLRQRIKVNAAIPYQIHKQELIAILENQAPYYETIRKNKDKIISLLEFRIPYYVGPLNYDRNNNKYAWVVRKKNGEKIYPWNFEEVVDVKASAEEFIRRMTNKCTYLPKEDVLPKYSLILMEFNVLDELNKITINGDKLSYELKLEIIEECFKKYKIVRESHLVKVLRKYYKYYNSEKLDIRGYRKEKQFAGSLTSYIDFTNIFGEVNDSNFEMIETIIKWITIFQDKKILKEKIKENYPEITDAQLKEILALNYSGWGRLSRKLIYGITTPDQSGLESTILHIMRKTNQNFMQVINSNKYCFAKKIEKIQKESIQKKEKVTLADVQDIPGSPAIKKAIWQAIKIVNEIIKIMKCDPQNIYIENTRSSGKKERTRSRVTWLKECYKKLKVETDIYNQEVARELNEHLETIDNEKLFLYFIQNGKCMYSGETLDPQRLIDYEVDHIIPRSLIKDDSIDNKVLVLKKYNQLKADRDVLPYDIISKMKPYWEKLKDCGLISNKKFYNLCRKEFNEEDIAGFINRQIVETSQIVKHVVNLLYANYPNTKIHTIRPLLVSILREQLSLYKVRDINDYHHAHDAYLTGCVANFIRIRYPKLEKEILYSEYLRLPTDRRKYNSGFIVNSFVRNHIDDTTGEVVWDANEQISKIKKVLNYKDCFITKKVEESTGEFYNQTLVGPNKATAPIRASLDPKIYGGYTNVNIAYMVALEYRKGTQMKKVLAGIPIMFAQRFKRDQEALIEYLKEQFRTNEIIILKPKILKSQLVDFDGHLLYLASSEEFNNAKQLILDYEFNELVYLIDKDKLSESDENHKRLNKFYQVFIEKLEKHYPFYQNIARKFKNATNDFEKLDFTKKCKFVLEMLKITQANSTNAYFKNFGIGNLGDRMDRLNGKSLDFDKTIFIDQSVTGMYEKRYRL

SEQ ID NO: 8479 - protein, 1090 aa, unidentified
  REGION 1..1090: note = Description of Unknown: Cas Enzyme sequence
MNQAANDTPPTVQFLTLGLDIGIASVGWAVLNETRIVDIGVRCFDKAETAKEGESLNLARRQARLLRRRLYRRSWRLTKLGRLLKQQGLIDSAAFFKQQPSASVSTWQLRVEALDRLLSNQEWASVIYHLCKHRGFHWASKAEEIQAEGDTKGEGGRVKKGLADTAAKFASKGYRTAAEMVLAEFPHAQRNKRGEYDKALSRVLLDQEFALLFEHQRRLGNAHASADFEARVRGDGDRKSGLFWDQKPALAGADLLKMLGHCTFEKAEFRAPKASFTAERHVWLTRLNNLRLVVDGASRPLTQHERALALLLPYQTEQFKYKTLKTALVKAGQIPDTARFGGLAYPSEAQKENGKTKDPEDQPLAKLPAWHELRKALSKAGLQDVWQQISVAALDGKPQWLDSIGWVLSVYKDDSEVERELAALALPQAQAVIPVLLGLRFDKFHALSLKALRQIVPHMERGLRYDEAVAQISAYGHHSQRVVLGTGTRRYLPSFYKDERCSNGSMVFRDDIDVPRNPVVLRALNQARKVVNAIIKKHGSLSAVHIEMARDLTRPLDERREVKKLQEEFRDRNDKARDSFEQDHGYRPKGIVFEKWMLYREQHGKCAYSLEGLDIDRVLNDANYAQIDHALPYSRSYDDSKNNKVLVLTRENQNKGNRTAYEYLTSFSGGEDGDRWRNYAAWVNSNKSYRMAKRNRLLRKNYGPEEASGFKDRNLNDTRYICKFFKNYVEEHLQLAPRADGNANKRCVVVNGQLTAFLRARWGLSKVRTESDRHHALDAAVVAACSHAMVKALADYARKKEVAYLKEGFPDPETGEIINPEAHARGVLHFPEPWAHFRHELQARLYTDELHALREDLQRLGTYSAQDLLEVRTLFVSRAPQRRNDGAVHKETIYAQPESLRKQGGVVQTVPLASLSLKDLDNLADPHRNAKLYAAIRARLEAHGGKSDQAFGPDQPFYKPGKDGGPTGPIVRTVKLVIDKLSGIPVRGGIAKNDTMLRVDVFTKAGKFHLVPVYVHHRVTGLPNRAIVAFKDEEEWTLVDESFEFLFSVYSNDLLEICLRKERYVGYYSGCDRSTGALNLWVHDRASGVG

SEQ ID NO: 8480 - protein, 1269 aa, unidentified
  REGION 1..1269: note = Description of Unknown: Cas Enzyme sequence
MRKMRGLLVRGCVEVWIRPLWVPSLFSWRAQPNPTICTMEFRWFCRNETPRGRLRKKEPQDVGYTRYGGSPEGWCLRIFRLVVKNTQTRISYNAAMMACMRQVVKPKSDDSLENERKSDMKILGLDIGTNSVGSAWVDTDQHAVRMGVSVFPAGVEESDTKRGAPKNQLRRAYRSQRKNTARRAQRKHQMRAWLRENGWMPADEIAYKEWIQLNPWILRAEGLHRALSTSEFGRILLHLAQRRGAYGFDVEEDDQDAGKVKEAIDHTRQMMRQRDVGTFGELMATLYCERGKAVGYKGKQARLPIRNRTNAAGEPVYEFCADRDLVREEFLALWNKQRSFDGELAHQLTEERRRQLDDPTGDDTWRCRGILFGQRSTDWDTGVLGRCDLEPTDLGCPRADMHAQEFLVLETVNNIKIIPPGQSKRALRDDERQAVIAALRSQKTASASTVRKALGLHRGMAKTQYALSLDADPKRALNTDWFYREVVCNAVGLSAWQALTQTQRESINQAILKLDPKRQPHAERFERGCRDWWGFDEEQTKRLIRAWHDRPNPNVRLKLSRRAILNLLPYMRAEGATVSEARKRFAEDADNGATPEQRERYGFGGTRPSGAIRRFREKHPDLLPPAPQMLSNPVVRKAIHEVRRHVQAYLRKFGRPDRVIIELARDAKMPAKVRNEQLAANRAREKRRNEIIEQFGLGGLTPTQREKAVKRVLLCQEQGQQCAYCGNGNNTITEKAAAEGVEVELDHIIPESRGGGSGLNNLVLCHTRCNRGKANRTPKEWLSAEAFAKLEQRLQHLKKSNPVKWDNLHKDVPDITGFSESQLTDTAYASRQVADWLREALYGGAISGTRHVYTTKGRYTPWLRRHWGLYASAGMKNRGDHREHAMDALVVALSGPERLQELAHAVEASELAKSEGVAMPDRERLLPPWGDKDTFRVQVMEEFGRLVVAHRPAQRKITGSLHNDTMYGPVLDGEGRLSRYATIKKSVIELTPKHLRVPTQWDELRRHLESAPGEAARRAIRRRMLALEDVKPEKSGVVRDRWFREELRQCLRDNGLDPDRFTSKQIKELVTNKGISLRSGVPVRRTTLLRAPSVVAIRRKRWDDRMGRLTYDEHPQAVRLYEPQNNHHIEIRENAKGRWVGKVVTNFEAAQRVRPSKNSGLDSCSAVDRRDTCEGRFVMSLSIGEMVRMRDRTTRTLDYYVVFKIDSTGTIHFTPHWDAGRSKKTEEAAVRADIPLSPAQLQQLGESETRPPVKVWVGPLGDCKVLMRD

SEQ ID NO: 8481 - protein, 1706 aa, unidentified
  REGION 1..1706: note = Description of Unknown: Cas Enzyme sequence
MKKKKVLGLDIGTNSIGAALVNLPDKFDDYGNDGSIEWLGSRIIPLDGDYLQKFESGTQAETKAAFRRGKRGARRLKHRYKLRRSRLIKVFKTLGWLDTNFPLDDSKKFKTEINDNGYSLKISDYLPFSKETIDEFEEELGIAGNKSKKGKSIVPEDWIIYYLRKKALTSKITIPELVRIIYMLNQRRGFKSSRKDLKTTNVLPYDEFIERKNKNDFGEDGIETQFVSITKIKSVTFIEVKKDKKGNVTNTYLIEAEDQRLHKWEEIRKKEPDWAREVNDKGEKIEKKEFTFLVTQKIDKNGKFTQNKPQLPKESDWALCTTALSEKIQENNQHPGEYFYEQIKEAYKVGRNFKARQYPVYRWRYEKELKDIWEKQCELNPELQKINSDQSTLIKLAELLYPTQTKYNMPKLAEFKIHDLLHIISKDIIYYQRELKSQKNSISECRYEKRKGIDGETYGLKCIPRSSPLFQEFRIWQDIHNIRVFEREVKIEGKTILDVDVTNAVINDMVKEKLFELFNSKVSITEKDILNTLIENRPETNIKLDIDKKEKIHSHRINLYARRDDLKGNETLARYRSLFKKAEFDGHEMLTDKDKLIKLWHIDYSITSSDEEKSKKGITTALNKLLPDNPNKSKVIELFTKLSELKKEYGSYSACAIKKLLPVMRCGSYWNEQEVSDTTKQLATQIKERLENINHNIRRLNEIADDDVQKQVLKSFIGNEDLTKSLNTYQAGYLIYDKHSEKDKTPINSVEDFGKYIQKAIPNNSLRNPVVEQVVRETMFLVRDVWNKYGEINEIHIELGRNLKNNSDERKKISDTQEGNFKEKQRIKKLLYELINDGFEQHIDKDEANPFTFENENFEWKTQIENTTFEVKPNPESPIDVEKFRIWRNLSKQSEIDWAKKVKDEKIPTEQEIKKYALWLSQNCRSPYTGKIIPLSKLFDNAQYEIEHIIPRALMKNDSFNNLVISEWGVNKAKGKKLAANFIDECKGKCKYGDKEYTLFTYQQYEAHCNEAFKFQKAKRKNLLSHEVPEGFVERQLNDTRHIGRKLAELLAPVAKNENGIIFTGGSITSELKNNWGLNKVWKELMKPRFDRLEEETGNQYVIHDKDEHGNPIIHFNVKENEQLDIKRIDHRHHALDALVIAATTREHIRYLNTLSAADTDEEIKNFKRTLVKGKIRDFKTPWESFTKDTKDKLEETIVTFKTNNKITSTPKNRTAYLKVENGKAKRDYKEQQPNNKWMAVRRSMFKEPLGVIWIKQIKDVSVKEAFAIEIERQISFNDLAKRKTASYIYDKLARQIIKSIIQQCNAGIDEKDVLIKEIESYLLKNSKKVETGKINKKGKPQNKTIYILNGTEYETISVASFVAYKTKRMALTKKDYVEKLTIEKMKNDFPYFSENEKRNSAFNNLFLQHIKEYGNDPKEAFNAEGLEKLNKKAVENSKIGKEIKSVTRLDGTVDLDDMFNGGFYETDKGAMAYFVMYENQKTKERCGFESIATHKAIENIVKGYKIGEDKEGFDKIILSPGDLVYVPTKEERECSELIDWKNIKTLLKRIYKIVSFSGKDLLCVKADISDPIIPTNIKEKVKGEIDWHNKSTSTMEGDVTIKNVCIKLNIDRLGNIKPYNNSIKLKTNRANVVNEPATPYFSKASISTLQQADEQMLLHTSKMNPEERMAYLQQLRETTQNSNLSEEEKISILSKFKINPSDENS

SEQ ID NO: 8482 - protein, 1365 aa, unidentified
  REGION 1..1365: note = Description of Unknown: Cas Enzyme sequence
MPAYLGLDIGSNSVGSAWIDTDEKTITCGISVFPAGVDESDYKRGEPKNVKRRMARRTRITLARRAARKRLLRQKLLAVGLLPRDEGDFKRLLETTDPWELRSKGLDHELTPHEFGRVLLHLAQRRGALGLKLPDAEDGQVDTTDDEGRVKAAIGHVRAQMLERKARTFGEFIAKVRAERVSPITTEDRRPPARRKGPREYRDPIRNRAGSYEHCADRAMIRDEFTKLWEAQTAFNGETARLLTQANGLRTALDDEAGDSIWLHKGLLFGQRRQSWDLGTLGRCVLEPTERCVPHADMYASRYLVVETVNNLKIIERGREARPLTPEERQKIKDYLSGPLGTERARKKRGDTGPVADKPKTSVTITDVRNLMGWGRATRTSQFRFNIESDPDRVINTGWFSREIIHGAITPAKWAEMPQRLRDGINRAILKYDPDHEGAADKLTLGVMQWGGLNETQADALVAAWKRRPRPDAKRLNMSRRAVRNLLALMDRDEPWPNPRQPGQTCWLTQIEARKLIAEDADFKDVTTGAPLDLQTRVRYATGAKGATARDRYYMQKHLLLKNGKPIFGPDGLPLAEPPPAPLITNPVVRKAIHEVRRHLVDYMLRFERKPDAIVVELAREARMGKVDADRVLFRTRLRNRIRNDIIASFGLGALTSTQQRAAVARVVLCVQQGGICPLCGNQIVTTQITPRMAASGEGCEVAHIIPKACGGDNGLGNIVLAHTKCNRDMGRRTPRQFWEGTFQGGFEEGMRYVEGIYRDIERPKLSEVRSATGQSLWACYFSGRPGRFGPTFDELKIEQFTKSVTDIQEMTPRQEAATKYATRQVMTYLANALYGGQGLPERSGQRRIFATDGLWTSHLRREWRLFFDPHASRTNGLSEEQEHVRKEKDRGDHRHHAIDAVVIALTSPRVQNAWEQRERMADRDGVNTADEVALENYRRAHPLPPPVPFANAQELKQLVHAAVFGSDSLERPVCHRPVKRKLIGELHEAFPRGPVLDRAGSLTDRFTRRISILELDPNHLREPRPETKNEAIKRLAERRRRQTGEDESAARKWARAVVSASGYMPAIVDQPPGKSGIVRDLALRRRLRDCLSAEGLDPDNFTANQIKKLAEAGKVRHVSGVPIRSVVLLWTISDPVLASRWATDHGTGKRRMLFDAVTHQGDARAARAYIGGNNHHIEFRVAPQPDGTEIWSGKIVTAFEVARRKSQRLRAFRQAGIPKPGDFRKLPKSQRAQFKPTLRAIEAAYPLVDRSNDDAKGGEFVMSLAEGEMLMMKHKVTGKLGYFVVAKLEKRGGNNRDCAVLVPHWDARAAGERKDAEGKRVPDSKREQFTITPVDLKLLAPPDHPHAIKVRATPLGDVYPLQRD

SEQ ID NO: 8483 - protein, 1007 aa, unidentified
  REGION 1..1007: note = Description of Unknown: Cas Enzyme sequence
MIRLRWNDETKRDEPIAVIKAGVRIFSDGREPAAKGQVGTSLAATRRNARAMRRRRDRLLKRKARMMRALIEHGFFPADEVERKALERLDPYALRAKGLDEALSPAEFARALFHINQRRGFKSNRKTDAKESDSSVMKGAIHSLRALLDSGEARTVGEWLHKRTQRGEPTRARRRENIITNEDGRNKKEVRYDLYIDRAMVEQEFDAIWAKQLLLNPAVYTDAVGRELKDILLHQRPLKPVRPGRCTLIPTEERAPLALPSVQRFRIYQEANNLRVLGRGLESVALTKEQRDKVVDALERNGKQTFTQLKKLLALGGGATFTHEDVKRTELKGNGTSAVLSKTANYGKAWFAFDSGLQDEIVTRILTEESEVALVNWLMSNSGVDEVHAESIAQVGLAEGYGSLSRVALARIQPELAREVVTYDKAVIAAGFDHHSNLNPAATGEILPELPYYGEPLQRYVGFADPRATESDPPEKRFGRIANPTVHIGLNQTRKVVNALIRKYGHPAEVIVEVARDLKQNKEQRDEESKRQRANQDRNTRYRSVIAAQLGISEEKVRRDDLQKVLLWEELNLGDALNRKCPYSGVSISLGMLLSDEVEIEHILPFSMTLDDSLNNKTVAIRRANRDKGNATPWQAFGERTVAGYDFNAILQRAELMPKNKRYRFGQDGYQQWLREDKDFLARALNDTRYLSRVAREYLRLICPGARVIPGQMTAMLRGRFGLNNVLGVGGEKNRNDHRHHAVDACVIGVTDQGMLQKFASASASAREKHLTRLVETMPEPWPNYRAHVERAVNAIWVSHKPDHSHEGAMHNETAYGLLAEGQVRHYKLVDGKRERAIESLKVVPMASQRAASRHGRLDDGSPRPYKGYKGDSNFCIDIVRNEKGKWDGEVVSTFSAYQIVRTEGVSRLRDSRLSISGKPLVMRLIVNDYVRLDVNGVLRTMRVASINSAGRLSLAEHQEANVDARNRDPNGVWRYTYKQAGSLLAAKARRITVSPIGEVNDPGFRG

SEQ ID NO: 8484 - protein, 943 aa, unidentified
  REGION 1..943: note = Description of Unknown: Cas Enzyme sequence
MKFKKRYRLGLDIGTNSIGWCVLQLSDDDQPIGIIRAGSRIFSDGRSPKTLASLAADRRAARQMRRRHDRVLKRQARFMDGLVRFGLMPNDDGERLALSALDPYELRRKGLDEPLTAFELGRALYHLAKRRGFKSSRKSKGEDENEAGKIAAAISKTRDSIEAAGCRTMGEYLAKRHAQRDTVRARTTADGKEYLLYTQRAMVAKEFDALWTAQAPHHQDVCTDEAHRYLRDTLLFQRPLLPVQPGRCIFEIDEFREPLWSPLQQQFRVLQELNNLLVIEGLEERPLTLDERNILRDALYRKREMSFAAITKELKLPKGTRFNLESDKRKGLKGDVLASQMSAAEALGEAWFAMSLQRQRDLAELIDHIDDAEELKKRLLAAPWSFEAIVAAQLVKVRLPDDYGSLSRKALEKIVPILDAEVITYDKAAQKAGYNHSDFYSGEIFERLPYYGEILRGYTSPTPKAKDPSEQAFGKLANPTVHIGLNQLRQLVNEVIRRWGQPTEIIVELARDFGLSGQKRRDLEAEQKKNQDRNEDLNQRLARLRQRENRENRQRLMLWDELGREDANDRHCIYSGQRFSMNQLFDGSVEIDHILPFSRSLDDSLSNKVLCLARANRDKKNATPYEAFGHSPSGYAWTEIEERASRLPKNKAKRFKEHALQDFLGEKNFLDRHLTDTAYLSRVARQYLTAICPPHKVWAATGRLTAMLRQKYGVNEILDPEHMGKNRDDHRHHAVDAAIIAVCNRSLIQRVATAAKKAEADGENRLLRSLDVPWVGFREELANVVSRIIVSHKPDHGREAGLHNDTNYGKRGEPDARGAMLVSVRKSITALTSKNVDAIADRTLRDELKPLLDGLSGKELKAALDAYATRTGVRRIRMEERLSVIPIQDRATKQPYRYVKGDGNYCYDIYRTENGKWNGDVVDIYTANRPDFKLDSKAAYQSG

SEQ ID NO: 8485 - protein, 1351 aa, unidentified
  REGION 1..1351: note = Description of Unknown: Cas Enzyme sequence
MTTKKAFGEYFLGLDIGTDSIGWAVTDLSYELQKLNGKALWGIRLFEAGKTAAERRIFRTARRRLARRKQRIKLLQDMFAEEIGKVDQGFFLRLAESRYHPDDKKLPLPYTLFSDKTYTDKDYHKAFPTIFHLRKALIEKKERFDIRLVYLAIHHIIKNRGHFLFEGQSMSNIPSFSEAFQYLQQSLRDELELDFSCLSVEEVEKTLLSREMRKSDKKAELIRLFDANARDDESKQKQAFISLVLGTPVKIDALFPELDLEEADTVKIDFSSGKFEEEYDQLAALLGDKILCIDKFKAIYDWALLAEIRKNARYLSEGKTRVYDKHKSDLQTLKLLVKTYLPKKYSEVFKNPTVAGNYCSYAGVAKKGGRKIVVEKRCDQDAFYKFIGKILKELPKDVNQPVLQEIENRTFLPKQVTTDNSVIPYQMHLEELSIILENASDHYPFLNQVDNTGFSVRQKIELLMQFRIPYYVGPLNTYHKENGGHCWAERKQSGAVRPWNFEQMVDVDKSAEAFIKRMTGKCTYLIGADVLPKNSLLYSEFMVLNELNNLKINGSGIPVGLKQRIFNELFLVQKKVTMRRLREFLENEGEITSNDDLSGIDGDFKSSMASYHDLKRILASKAGDVNMVENLIRWIVLFGDDSKLLKRRIESFYRDKLSESEIRQLAKLRYSGWGRLSKEFLVDVVHVDKTTGECVSIISALRGDLGENLNLMQLLSGRFDYLQAIARRNEKTSGPISGIGYDTVKELYVSPAVKRGIWQTMLIVAEVAKIMQHPPKKVFVEVAREEGEKKRTRTRQSILLDLYKKCRDDSREWAKELQGKSDAELRSDRLYLYYLQMGRCMYSGESIDLLSLFDEKIYDVDHIFPQSKVKDDSLENRVLVRRVINAEKSDAFPLPEAIRQKNSAFWRSLYEKGFIGKKKFDRLTRATSFSDDELADFISRQLVETRQSTKAVAEMLKRVFPPTEIVYVKAGNVSDFRHKFDLVKVREVNDFHHARDAYLNIVVGNVYNTRFTHSPANFIREREGKNYNLRKIYDFDVVRNGVVAWKTAGDETITRVKRVMQKNNILFTRYAIARHGGLFDQNIMKKGKGQLPVKGSDSRLTIERYGGYNNIAGACFMLVEHDTGSGKKAKRSRTIEVLPIHLARKISGDKKNGLDYCVNELGLCNPRILLSAIKMNALFIFDGARMHLSGRSNERLEFKGAHQLCVCNDSERYIKKILKYQNRCREARRPLIIDSHDGITPDDNLKLYDVLCRKLNDTVYRKLFPTPAEIVAKGREKFVALPLADQCGVLEQVLGLFKCGKNRIDLSGIGGASNTGILSRSKKLDNSNVVLLNQSVTGVFEQIVDLQKIGA

SEQ ID NO: 8486 - protein, 1195 aa, unidentified
  REGION 1..1195: note = Description of Unknown: Cas Enzyme sequence
MKTLGIDLGTNSLGWAILDEQAVLKAGVLVFEEGVSIEQRDSLETPAAVRRAKRMARRLRFRRQLRRRLILEILIENNMCPLTAEELNLWSQKDIFPKDNAKFVAWLKSTDTRNPYCDRARAATEKVEPLTLGRAIYHLAQRRGFKSGRKDQLEEGDTGTSARAKELGIVKGEIARISAELAKTGLTLGQFFYNEIKAGRKVRKQHTGRDEHYRKEWERIAAVQNLDKTLADKIARTLFWQRPLREQSFLVGKCPLEPTRNRAQIGHPEFEEFRALSFVNNIRVLDGETRNPLTPEQHAVAVDCFNRKTPFDFQTIRKKLEKQCKELRGAEFNYEDNISLTPSKITASLEEVLPGIDGTGRQKAFDALTFFDDNEKLTVWARKHFDLSPEAADKFVKIRVPEGRAAYSLHAIRKINRFLRKGVELSEAICLAKLPDVIPGFDAKEDEIIAKVHEHHELYRENKRVAYRDIRTENRIGVIPLEKRLGSWLQEEYGIDTKKANLYFRNPRADSSYASLTKEEKTGVERGILPKVNLGMIRNPIVQRSMTMLRKLVNELRQKGAIDAETRIHIELARDVNTHNDRMAIQEWQKQNEKKRADAYAELQKYTGNITDDLVLKYILAEEQNWTCLYTGRKISMKDLIEGGFDIEHTIPRSRSGDDSQANKTLCDTAFNRETKKGQMPSELANHEEILTRIGPWLNAITDLKKLRGKQSKAVKSVPKDNPEVRAKARQRLLITKLNLKYWEDKYHRFTKRPDEITPSFINRQLVDTGVMTRHAVALLKTVYRDVYPVNGQAVAFARKLWKVQGEDTVKDRTDHRHHAKDAMVIAALSRDRFHKICTELKTDDERKNPKIVVEPPFPGFAQTVFETTQDILVKHVTRHNELKQTKRKSIRLSSPKQTRIGTITRAPTGGDTVRGQLHKETFYGKIRKPGETETVCVVRKELNSSNFSDTKVLEKIIDPAVRKAITDEIARRGGDFKKAMDAAVEEGTFKLPGERGALIKKVRVEATTVKNPQVVRVRTVTPSRHDYKNAYWAESGADSNFRLAVYKRPNEKSASKAYEFIAENLLKYVKEAIKSQGDDSVRIGYIRPGAMAIVRGTEKTEAPFLYKVVAFGNMETEKRITLRLHTEARGSVDLGKALGEAGASRYGESTIDKERPHPLLRLHIEYAWDSLLFEGIHFKMDLNGDITYRPDASE

SEQ ID NO: 8487 - protein, 1139 aa, unidentified
  REGION 1..1139: note = Description of Unknown: Cas Enzyme sequence
MKKILGLDLGTNSIGWALVNEAENENEKSSIIMLGVRVNPLTVDEQKNFEKGKSITTNADRTMKRGMRRNLQRYKLRRENLIEILKENGFITDETILSENGNYTTFETYRLRAKAVTEEITLEQFARVLLMINKKRGYKSNRKAKGAEEEGALIDGMEVAKLLYEKDLTPGQYCLQLMEQGKKQLPDFYRSDLQEEFNRIWAKQQEFYSEILTDKLKENLREKSEKATWTICKEPFNIVGIPRTTKGEELKKENFAWRTKALSEKLDLESLAVVLQKINGQINNSSGYLGAISDRSKELYFNKQTVGQYQMAVLAQNPNASLKNMVFYRQDYLDEFNTIWEKQAEFHKKELTEELKKEIRDVIIFYQRRLKSQKGLIGFCEFESRQIEVEIDGKKKIKTVGSRVIPRSSPLFQEFKIWQTLNNLEVSGKGRKSKKKKEHSLSLFTNQEDPLLIYGKRELYQEEKELLATELSIKEKLTKSDILKLLFDNPQELDLNFKEVQGNLTQAKLFAAYRDIIEQTGHILDLKKSASEILENVEQIFSGLGYNTDIIRFNSDTDNLDNDPMYKLWHLLYSFEGDNSKTGNENLINKITNLYGFEKEYAAILANITFQDDYGSLSAKAIRKIFPYLKEGNKYDISCEYAGYRHSASSLTKEELENKIYKDCLEILPKNSLRNPVVEKILNQMVHVVNAIIADPQLGKPDEIRIELARELKKSADERFLLTDSVSSNTESAEKIRKRLKEEFSIFKTHEPSRNDIIRYRLWEELAPNGYKPLYGSKENLQKGISSEILFTKEIEVEHILPKARLFDDSFSNKTLVYSSDNKEKKEQTAIDYVMKKEGDLNDYLDRIISVYGTKTTKKVITNKKTRNKTIKTETKTFDTLYKEHEKGLKKQKEKIEKWNKATEKERKKLVKPWGLMSDIEKKIEIINKYYSNKLKKLVITESELPEGFINRDLANTQYITKKARKMLSDLVKSVVTTTGSITDRLREDWQLVDVMKEINFPKYKQLGLVENVERIDYETGEVLYTNKKIKDWTKRNDHRHHAMDALTVAFTKRQFIQYLNNLNARRTDENQSISNTEEEEYDNFAITTEDVLLNTRDVLGIEKNYLYRDHRNKLRFYPPIPLNDFRAEAKYHLENTLI

SEQ ID NO: 8488 - protein, 1448 aa, unidentified
  REGION 1..1448: note = Description of Unknown: Cas Enzyme sequence
MAKKLGLDLGTNSIGWALRESDVDVRKRYLIDYKNYNDETDKDKKILSNEIVDYGVVIFKKGVGDGKNGEFSLAAERRTNRSKRRLYNAKRYRKWELLKILVENNMCPLTMEELRLWSNGNWKQIDGKWKNLGRIYPVFNENFQQWLAFEPNIFDQKGTSHNNKAVRKNPYDLRCELIMNEEENDYLKKLKIGRTLYHLVQRRGFKSSRKSGKSAYAKNEDIEKLKTENPDFQISILAKSKLDNGLRFRASGVIQRKYFEDEFFAICSKQKLDSEMTDKLYKAIYFVRPLRSQKGLVGNCTLEKGKPRIPVSHPKYEEFRALQFINNIKWREKGKKEFNEIPITLKKRILEDLFFRKIEKGQNKGKISTDGYFKFDEIIKNYSENGQYEFNYNNLPNVSTCPTIAELMNVFDADWHEKFIQDQNKIGINWSGLQIKYIPKYGKLKRVIKNGKKIYVNKDFSEKTLRVDEIWHLLFDYIQTKDDAEKLEKFCKDVLGFDDTKANSFSAIDIPQGYGSLSYKAILKVLPFLQDGYIYSEAVLFANLKKVLGNKFEENKEPARKIIAKTIKETGKIKEKLNIVNGLIQKFFEDTEMTHAKGVDDTIKEMAWQDTKDKLKKYFGETDWNKKPESEKEVLENDVFNLYIKFLNGEQTKEEKASAKENKIPEIDYYKLPRLDVAIKMKLKETFNVNDSELKHLYHPSDIEMYPQSKTEREFVINGYKTNVKLLESPQPPSKGWKNPMAMRTLHELRHLLNYLLKIGKIDSDTKIVVEMARELNDANKRWAIQTYQKFRELENKEFAKAIVGVAKEKYPHLKENDIENINKVRLWWEQLDNHEEVYKQIKALKDDIEKYRLWKEQDCTCMYTGKLINISNLFDGAQTQLMHTFPISSSFDSSLSNLTVGDAYYNNEIQGNLIPTQLPNYFDDAMINGHKYTAIKPRIKKWEEKVEHLKELIEDNKRRTKKIQDPEAKKGLIQKRHLLQFNYDYWKKKIETFTLEEIPLKWKNSQLIDTQIISKYARAYLKTVFEKVDVQKGTITDTFKKIYQIKGEEKKDRSKHSHHAIDAAVLTLIPGSAKREAILKEYFKAIEINQKFYATPYTKYDSLHVHEIENNILINHISNDKTLTSTIKNIRKRGELTGRIAKGDSIRGQLHKETFFGAIKALERNEQGFPIKENGKYKVIKNKNGEDEIWIVSRKQIKDINIEKDIIIDELLKQHIQKQLEKGIGIANVIDFNNKPIRHIRTRVKAGIGFLSKEKAIPIKKQTYVSQHNHKNEYLVQNEENYLFLLYEGFNEKMKIIRHYRILNLFDIAQLKIKNINEIRNEKEFQTITKGKIELGLKAILKTGDRVIFYKDSKDEITMDNAKFRLFKLFKFNEMGCPFLYFQNHLESRSDVEIEKPENTFNFSKYQARLTLVLDKINCLIENMDFEIKPDGAIIFINQKFDNSPHI

SEQ ID NO: 8489 - protein, 1257 aa, unidentified
  REGION 1..1257: note = Description of Unknown: Cas Enzyme sequence
MKKILGLDLGTNSIGWALVNADEDGKPCSIAGMGSRIIPMDQATLSDFDKGNSKSQTAERTAFRGVRRIRERYLLRRDRLHRVLYRIGFLPEHYVQSIDFEKRLGQFRSGAEPKIAWQKNDNGQYEFLFQNSFNEMLADFKVHQPQLLEEDKKVPYDWTIYFLRKKALNYKIEKEELAWVLLNFNQKRGYYQLRGEDEEENPNKLVEFYALKVVAVEATDEKKGKDIWYNVHLENGWIYRRTSNIPLDWVGKTKEFIVTTDLNDDGTLKLDKDGKEKRSFRAPKEDDWTLVKKKTESDIDQSKKTVGWYIYDTLLQKPDQKIKGKLVRTVERKFYKTELKAILEKQKEFHAELQDRDLYAECLNELYPNNESQRNSIFSRDFTYLFMDDIIFYQRPLKSKKSLISDCPYEERKYQDQDTGEIKTVPVKCIAKSHPLFQEFRLWQFISNIRIYQKERWINEKLHTDVDVTSEFLKNEDDITDLFDWLNNRKEIDQRAFLKYPGFGLKKEADNYRWNYVDDKTYPCNETRALILNRLEKIENVPANFLSKENEEALWHILYSVEDKQEIEKALKTFAIKFEFDDCFVDIFKKFPPFKKDYGSYSAKAIKKLLQLMRRGKYWNEDDISNGTRERLTSIYNRLKTINYNSEQIDKISDDDIPKQVLRSFLKLVDEYSGLNTYHACYAVYGRHSEAKEVAKWEKPQDIDVYLKSFKQHSLRNPIVEQVITETLRTVRDIWKTHGDFSEIHVELGREMKNPADKRKRMTEQINENENANLRIKALLMEFINPEFEIENVRPYSPSHQEILRIYEDDVLKSGIEIPEDVEDILKKFKEADSKKQPTRSEVLRYKLWLEQKYRSPYTNEIIPLSKLFTTDYQIEHIIPQSRYFDDSSSNKVICESEVNQLKDNCLGYEFIKNHHGQKVELNFGKTVEILSVEAYEKLVKDNYSRNRGKLKKLLMEDIPDGFIERQLNDSRYISKVVKNLLSNIVREEGEEEATSKNLISCTGGITDQLKRDWGLNDVWNTIVYPRFERLNELTNSNQFGQWENKNGNRVFQTQMPLELQKGFNKKRIDHRHHAMDALVIACATRSHVNYLNNEAAKANAKESRYDLRRKLRRIETVQIEKLIGGKKVLKNIEVAKEFYKPWDTFTQDAQTALENIIVSFKQNLRIINKTTNNYQHFDENGKKVIVKQKSGESWAIRKPMHKETVFGNVNLKKIKTVNLSSALDYSELIVDKSLKFRIKQLLAEGLDTKKLFKFHL

SEQ ID NO: 8490 - protein, 1108 aa, unidentified
  REGION 1..1108: note = Description of Unknown: Cas Enzyme sequence
MNNWRLGLDLGTNSIGWSVLGLDDENAPDSLIDMGVRIFSDGRDPKTKEPLAVARRTARGIRRNLHRRKQRRRKMFKLLQEMKLYPESREEAQKLKAMNPYELRAKALDTILEPKELGRALFHLSVRRGFKSNRKESQNPENVETAEKETKETSKMTQADKCQSLVDTLKESDARTLGEFMWKQLQRGEGVRFVPGRSTYYPLRSLYEDEFFRIKEAQEKKHKNVDWEALHHAIFFQRPLKPQERGKCQFMPENPRTFKAMPSSNRFRILQDVLNLDMYDELNHKVPLSDEQADTIIQLLDTKDKATFDVIRKALKTAYRFNLETDNRQELKGNETSRKMRMDRHFGALWDTLPLEEQDDIVELLITADEDEQVFSLLNRYDLSDAQKEAIARLVLPSGTTSFCKEFTQKIVKVMQENRLQYHLATKALGYEHSDQKVDAYDLLPYYGKVLTGSTLGGDAGKYTEEQPEKKYGKIGNPTVHVALNQTRVVVNALIKQYGKPSQIVVELSRDLKSSRDAKREIMRKQAENAKRNAILNTNIKDLMKNIEYPGRFERQKFKLWEELGKDKASRCCLYCGKNISDSELFSPNIEIEHILPFSRTLLDAESNLTVAHQKCNAFKAERSPYEAFGTSPKGYDWEAIMARVNNLPGSTKKKRFAADAMEVFEKESGFITRQLTDNAYLSRISVRFLHAICDNVWTVNGSMTKLLRDKWEIDSILKKKINKEEIMAFGLKDDMVGTYRKNRYDHRHHALDSLVIGLTDRSMVKTVADLNARSHRNRLEAPAMPISRMDVIEKLKNIVVSFKPDHGAEGKLSKETLLGKIKQEELIPIGSLEENDIPNIKDERVRTDFMERCENEGSFKNAVKALRDVYPQIKVFREQFVSRTPITSIKAEKNIDDIIDPVIRKKLQDYIAINKGQKFESVLVQFSQDTGIKKVRCKTRIQTPIEIEPNPRNPLAVTRYLNPEDYFAAIVWEIPPAKEGGKPKFEAQYARRTEVDKAGKPVEVKPHPAAKKVCTIHKDDYIEFSEDGIWKKARIAGYAANDNRFDIRPIYATSIIFDWLIASNEGIIEKGWKPAIGQNYISVNILFGSLSARKITVSPIGKVFRKG

SEQ ID NO: 8491 - protein, 1152 aa, unidentified
  REGION 1..1152: note = Description of Unknown: Cas Enzyme sequence
MRKIVGLDIGVSSVGFAVAEASDKKESIDLLASGVRIITEDPNFHGRFYTGNSASKNADRTTKRSIRRLNNRYKNRRAELIETLSLAGMMPDEDLLYRATSLELYFLRENAIKSKISLNELGRIFYHLNQKRGFLSNRKSQTEEENNSEYLQKIKDLEIKVKDTTIGSYFYHQLCNNPLTRIKENIFPRKEYIREFDIIWNKQKEFYPELLTGGLGENNKGTLYQRIRNEIIYYQRPLKSVKHLVSNCRFEPLKKVSPKSSPLFQVFRIWQQLNNLEAKSPANEIYKPDTAQRIILFDALHSQKELSARNTLTKAKILRLLELPKDYFLNYDEIEGNKTFLTLYNALRSANVEKADDYLFYSPLAPQEEKGGLWQLWHITYSLPNERDVVTALQKHFQFTEEQATIIASRTGYTADFGSLSARAIKKLLPHLHDGLHYDKACKEVGYDHVDDIGLDQERALLDKLEVLKPNTLRNPVVEQILNQVVNVMNTIIEKYGRPDEIRVELARELKNNAKQRQRITKQNKDLNKKNDDIRLRLVKEHGFKRVNARDLLRYRLWQETEHICLYSGKPIKFSDLFNGKTEIEHILPKSRSFSNNMSNYIVAYETENTLKGQRTAYDYMKSKGEKALKDFVDRVNHLHDEDRISKSKRDILLCPGEEIPNDFLERQLKDTQYISREAVKMLKKIAPKVTTTTGSVTDYLRDKWKLSHLMEEINIDKYRAVNQTERRTIKDQQGNEKEIETIVNFSKRDDHRHHAIDAIIVALTSQSIIQRLNNLNKEFHTYAALKENPLNFPEPMKDTRNKVKMHLENTLISFKKPSSKVVSKKKNRIKTKNGIKVQETWAPRGSLHEDTVMGQIKRYKKVPIDKKFNSIELVINEELKAALFERIKQHNNDPKKAFDKLSKNPIIFNGLEITEVLVWDRRYTKRVVISEHITSAQISKIVDKKVKELLESRIEEAGSIKEAFKEYRTNPLFLDSARTLPIRNVTVFDEGNLQQVRDGFVYTKGNHHAIIYTDGNGNFKEKVVPFWYAVEQCLLNLKTAGSIYPTIDKSPSEEGWKFYTSLQINDLFVLDLDPNEIDFTAQKNRSLIAKNLYRVQKISKGDYVFRHQYETTLERNEPFALRRLRSAKELQKATKVRLNHLGEIIEVENNK

SEQ ID NO: 8492 - protein, 1459 aa, unidentified
  REGION 1..1459: note = Description of Unknown: Cas Enzyme sequence
MKKILGLDLGTNSIGWALVEQDFNNRQGKILGMGSRIIPMSQDILGDFDKGNSVSQTSERTRLRGIRRLRERHLLRRQRLHRVLKILSFLPEHYAKQIDFERRLGQFLPDKEPKLAYNDRGFIFIKSFEEMLNDFRSRCPELLIDKRGESRLIPYDWTIYYLRNKALNQKIEKEELAWILLNFNQKRGYYQLRDEEEEENPNKLSEYYRLKIIDVIIDPEKNRKGETWYSLILENGWVYRRSSKTSLLNWKDRIRDFIVTTDLNEDGSVKKDKEGNEKRSFRSPGEEDWTLQKKKTEHDIGEMNVTVGTFIYTALLRGPQQKIKGQLVRTIERKFYKDELKKILEKQIEFHSELQDESIYNDCIHELYRNNESHQNLLMSKDFVHLFINDIIFYQRPLRSQKSSIGNCTLEFRKYKDKNSHEQTQYLKAIPKSNPYYQEFRIWQWMYNITVYRKDDNFNVTTDYLSCVKDWEDLFAFLNDRKEIDQKGLLKYLIGQKGVKGKKLTEEIEKFRWNYVEDKKYPCNETRTNIIHRLGKVENVSDKFLTREIEQTLWHIIYSITDKADFEKALKTFAIKFGLDTTSFVTTFVKFPPFKSEYGAYSEKAIKKLLPLMRIGKYWNWDNIDEKTKERIDKILTGEYDGGIKERVREKALHLKTTDDFQGLQLWLAQYIIYDRHSEASLVGKWNSLTELEKYLLEFKQYSLRNPIVEKIVTETLRVTRDIWSSYGNGDSNYFDEIHIELGREMKNTAEARKRITSQISENENTNLRIKALIAELKRDASIANVRPHSPLQQEALKIYEEGVLNSDIEIPDDIARISKSSQPERSEMLRYKLWLEQKYRSPYTGEIIPLSGLFTSNYQIEHIIPQSRYFDDSMSNKVICESAVNQLKDNQLGLEFIKKHHGEIIPAENGNKVKIFLEDEYVAFVKMHYGKNRTKQNKLMLEEIPDKMIERQLNDTRYISKFISNLLSNIVRGSENDDGINSKNIISVNGKITSILKKDWGLNDVWNELILPRFERMNQITHSDKFTSKNTSGKTIPSIPIEISKGFQKKRIDHRHHAMDALVIACTTRDHINLLNNKHANERNQRFDLNRKLRKFEKVSYIDVKSGKQIDREVPREFIKPWGNFTVDSKNTLSKIIVSFKQNIRVINRASNSYSKWIVNNGDKAKGILKQAGTNWAIRKSLHKDTVSGKVDLRRIKIPKGKILTATRKTINSSFNLKTIESITDTGIQKILINYLSSKGNDPELAFSPEGVEDMNRNIRQYNDGQFHQPIYKARIFELGNKFPLGSVGNKKTKFVEADKGTNLFFAVYENEEGKRTYETVPLNEVIEYQKQSAHLQKEQRIPIQPNPDKGKFLFVISPNDLVLVPKNEDIGDVMNENDLYDIATDRIYKMVSCTGNECHFVQANIASLIKNYESRSKIGELGSLNKLETTMDLIDPCRIKEKCHKIKVDRLGNLCRN

SEQ ID NO: 8493 - protein, 1394 aa, unidentified
  REGION 1..1394: note = Description of Unknown: Cas Enzyme sequence
MEKILGLDLGTNSIGWAIRDTSEKENQIIDKGVLTFDKGVGEIKGIEIPLVKARTEARGKRRNYQAEKYRKWELLKFLIENKMCPLEIQELDEWRKYKKGVGRKYPQSEKFIQWLRFDFNGDEKPDFELFGFDKHESYYVFRMLVVSEKAEHKKLLKSNPHILGRVLYQIVQRRGYKGRDDEDEEAKTILKGSEKNGTAGAEAIMPFIEKNKTLGAALYYLQKEKNERIRKRYNLRIDYEQELKEICSIQNLDEAVYKRLWKAIIWQRPLRSQKGLVGVCTFERNKARCPISHPLYEEFRAWVFINNLKIYLPESINKQTFIKENIYPLFYKVSRDFKLSTINKEVRKVSGYIQSKHSKGDGKNKEDDTKVITCNLLNTLKDLLGKEWKDKYGWKEALQNQPKNCSYSFEDIWHILFTFDSKEKLKEFATNKLELSDEETEKFAKIKLQQGYATLSLSAIKKILPYLYQGFIYSEAVYLANLHKLLGDKSVTIETTKTFSSIIKDVIKEHNNEKQINNIVNGLISNQLNNEYRFGMDTSYQLDDDDRKDIRTKIIETIGITTWNEKLQAEEKEKIIDFVETSYLSFLQKPINAKKEDLFLRSGRLHDKIFEHLQETYDVPDKNKKYLWHPSEQETYPDAIEKNGIKILGNPRPISNGFKNPMALRTLHELKKLINYLHEIGKIDDDTRIVIEIARELNDANMRKAIEKYQRDREKENEDLKKKVDEINTECNTSYNREDKNLIDKIRLWNEQKFQCMYTGKIINSCDLLNGSKYNFEHTIPASISFDNELKNLTIADIDYNMNIKANKMPFDCPNYDKDVLINGIEYTAIRPRLQFMEEKVEHLENLLDEWISKTRFASTKDIKDACIQRRHLIKFELDYWRKKLSSFTATEYKAGWRNSQLRDTQIVTKYALPYLKTVFKKVEVQKGSVTAAFREIYKIQPRLEKKQRTKHSHHAIDAAVLTLIPASAIRDKILFRYNEEKDKNPNNTYHEKPRSWIGFETHHILSIEDEVFNNFQPQNRILTDTYKNVRKRGKQQFVKYKDVDGKWHYKLDNEDKRIPLIAKGDTIRGQLHKESFFAAIKLPEAEEINGKFIPKTDGEGNFIFQTNEKRKDNIFIVKREEDLNSFTKLEDFDIVIDPNLRQYLKSEIQNRINQGLTFAQAMVKPIWAFGKATDKNGNPINPMRHLRTKVKGGGGGFVTNPAFIKTINAFISKQGHKRNIYALNGETAVCVFYQGIVNGELERIIQPYSILEIAQLKDGNNFENIVSPNYEKTIKKVQYPIPLYAILKTSQKVLFYENDIDELLSLSNKELGRRLYMIVKFEDGRISFKHHLNSMSEEDIKKEMKNLELADVGASSFNFIKPIPKLRLSKSSFNFAIEGKHFNVMPDGEIKWK

SEQ ID NO: 8494 - protein, 1067 aa, unidentified
  REGION 1..1067: note = Description of Unknown: Cas Enzyme sequence
MSATRKRDLILSFDIGHSSIGWNVLMNSPDGLAELGLGTVIFEADGCLASKRRDFRRQRRTIRSRRQRIEWLEKVFLTQGLLNPKQIEAKHNAGGGNSAPWLLSAAVLAGKGKCVLSAEELFDVLRWYAHNRGYDGNRRWSGTADENKEDTEREQAALNLMEKHGTTTMAETVSAQLGLAPDGHKRASMNYYKGRDIGAAFPRSVVTAEVKAILQIHAGKLKGCTEEFMQAVCGEADEAWKAIQTEGIRMAKNFKGSLLFGQKVPRFDNRILSFCPVSNTPTPLKSCREFMDYRCAMFLAAVRVAAAEDKALRALNAAELKELWDRIHLTGYMPAGEFKKAVRKMTGCTRDNLDGLMVIEDAGTNLITDPALKLVHSNTVLKIIWPEIPEDASSALLARLRAKQRITVADILAGAGTATDGLNTAVDSAYKKERKKIPDKTRWIERKSFHAEYDSGRAPYSRSVMTKAVQEVLSGKDPRAEGGCLYVTSEMSARQAGRSLDKMTNNHLVRHRLLILNRLMKDILNEFAAGDKDRVETIVVEVNREVASMSGKTIKEIKTEEGRKRADHKRARKIMEDAVQEAGSDAEISAGLIRKARIAEDLGWTCPYTGKKYGPLDLIHKQVDMDHIIPRSERLSDSMAGMVITFSEVNRWKDKRTAWQFVEQEQGKPVQGNPALTITSLNAYREFVEKLKTAGGVDEDQARRKARKQYLLMPDYIEKSFTPRDMTISSYVTKMAVQQITNTFNTCKRKPQIVSLPGRLTGEARKSWKLTGLLHAVNSEISGSTLKDEVRGMTHLHHALDASVMGLLAANISDLSDGAVWQLLLKRHLTRDESRYLKEHTRRISIDSEGRPHLQDIPKTITGQLQKLLAERRVVQHIPASMTGLHVKLNTHGILGMDDQTGKVILQQKKEGKHKPELDSEHPVKVLGFAAPAGSKLKKQKGARIIDQNYGVALTLPEPQIIPWHKVWPRLNEIREKTGKWPQVLRNGMVISVPKGRYMGTWHIYSVKNNKGGLALDMGKPDEIKPSKINVSLKTVLNDGMNIQKTKLTGNGLCRIISSISTAPTSG

SEQ ID NO: 8495 - protein, 1020 aa, unidentified
  REGION 1..1020: note = Description of Unknown: Cas Enzyme sequence
MKQNKYTLGLDLGTNSIGWVLIEPGKSSKKHIVDLGVRCFEAGMNINEATGKRDSHALERRMARGRRRNLSRRQMRKETTRKRLAEANLLPLGKPNHKDDTWRGMLDLDPYSLRAKALDEKLERYELGRVFYHLAQRRGFLSNRKAGKSDKEEGVVKEGIKALSAEMEESRARTLGEYFNMLDPHAQRIRTRYTHRQWYLDEFNAIWQAQKMHYGDVLTDELHKKLKKAIFYQRPLKSVEKFIGHCALEKGRRRAPMACLAAQRLRYMQDLCHLRVVSPEYESRPITADEFELLRRELEVSSRLTFSQARKRLGIKRGFKFNLEGGDRKDLKGNTTVAKIMEAIGSRWLNLNSDEQNMMVEDLMSFTSEEALEKRARKFWKMAPEEAEAFSSIDLEEGYSSFSRKAISKILPLLKPGCSIAEAVNEAYPDRGNAAAVDILPPLEDLRNPVVQRTLAETRRLVNAIIAKHGKPARIHIELARDLKMPSKIREEQIRRMRAREKERKDAVARIIKEMDIVEPKRSAIEKVLLAEECGWECPYTGNPFKMSDLLGGQPTVDIEHIIPFSRSFDNSFANKTLCDVHENREVKRNRTPWEAYGSTDKYDDILERVRRFTGAFAKVKLERFSQKEVAAEDAFIEQYSSRQLNDTRYISSKAVEYLGQLYGAEWRKCITCVNGQTTAYFRNAWELNKLLNTENLKNRDDHRHHAIDAMVVALTNQHNITALNTASKYSTDRGDFYEYQPGRFRDMPEPWPGFLKEFSDALGRVIVSHRVSRRTNGQLHKDTVYGFIKSKEHNDELRPVVRTPLASLTEPDIRKKLIVDPVIRAKVEEVLAEKGQPPAKAFADRADHPVIVHPNGQKQVVHKVRVYQSVTPVEISDVPPRHMALGNNHHLAIYAGKNRKGEEVWNCEVVPLLEVKRRVASGKDAVRKTNERSDPLVFSLAIGDTVKMMWQGEEVIAVVQKLCHMPYPDYYFKLHNDARMAKERKDDRIRIRSDAKLHKEFQIQKLAVTPLGEIHPAND

SEQ ID NO: 8496 - protein, 1275 aa, unidentified
  REGION 1..1275: note = Description of Unknown: Cas Enzyme sequence
MSVILGLDIGSNSVGSAWVDTDKQEIHLGVSVFPAGVDEQENKRGAPKNQARREKRSQRRNLARRSARKRHLRSLLTQAGLLPRDPESLKKLFEANSWHLRRKALSERLTPHQFGRVLVHLNQRRGAVGIETDPEDPDEGKVKEGIDRLDSLMRERNATTVGELFANLMDERRMKGTHADSKDVSRGVRSRRRRRKQDADLASSEFWVQGAIRNRQYRMDEKDQLYADRRRVRDEFLKIWERQKTLGGPLAAMLTDDLRKQLDDPRTDDVWRHKGILFGQRRTYWDTGTLGRCDLEPTERCVPVADMFAQEFRVVETVNNIRITKRGEPERALAREEREKVIAALRRQKTGSVATIRKALGIDKKTVKDFFTLNIERDKDREINTDWFYREIVHGVFTEDCWTTISTAKRESVSRALLKFDPDNEEHERKLRNGAVQWWGLDDEAVDRFITAWKHRPKLENRLNLSRRAIRNLLPYMNVFDEGAGRWPTQIEARLRFASDSDAVDSATGRAATPEQHQRYALGTKRLTKADRQFLRKHKEPLPPAPMLANPVVRKAIHEVRRHLIAYWRKFGRVPDRTVIEYVRSATQPEKVRNAALALNRKREGVRKQIIEQFDLQSLSKTQQGRAIERVLLCRQQKWKCPYCGDDRPIPERIAAEGQVVETDHIIPLSRSQNNGLNNKVLCHRTCNRGKSNLTPKEWLGEVSPEFRRLEHRLQHLEKGESPDNYFTSRDCDRKWENLHRDAPSTSEFLASQFTDTAYAAKQVGQWLREVLYNGERDGNRHVFTTKGSYTSILRNDWGLSESELDRQWHDITEPGEGDGDKESRRARKQKSKDRSDHCHHAIDAVCIAFAPDRIQELAQIAEEQEKARARLGYWPRRKGVRPPWATTDVFHDQVLSVARQLVVSHRPVKRRLAGRFHEDTAYGPVLLPLPRHRREDAATLFTNRIQIDALTPNHLRVPEGWDQLSARLDDRSVPGSEKNAIRRQLNALLDPPPSKSGIVRDRALRDRLRKCLRQGGLDPDEFSKEESKKLIQEGGLAMASGVPIKSVVLLRTNSDPVTIPRKEWDPISDRTLLDEDPRTKRVYIGGNNHHIEIRERARERKGEIVREWGGKVITTFEVARRNTQRLNALRGAGVPSGGEWRSLSKEARRRFKSVISDINRRFPLVDRTDTDEGQFVMSLAEGEALHMRHPKTNEPGYFVVFKLDKPSTVHLIHHWDARRSQPRKDDEGNAIAHSQRESIPLPVSKMRDLGIEPGKPPVKVRVSPLGDVMPLIHD

SEQ ID NO: 8497 - protein, 1068 aa, unidentified
  REGION 1..1068: note = Description of Unknown: Cas Enzyme sequence
MKTKENYRLGIDMGSTSIGWCMLKLNDNNEPYDIINMGVRIFPDGRDDKSKEPLSVKRRNYRSMRRNLDRYLLRREQLLHFLDEHSLLPKDENERTSLFIKDPLEIRVKALDKEISLYEFSRAIIHLSKRRGFKSNRKDSAKEKGTKISDAILNLQTQLENSNARSLGEYLYNINSGLALKDHNRKKPSKFKYESDISEEKIFPTRDMVEHEFDLLWKKQSQYHKELTESIGEELKNIIFYQRPLKPTEKGKCYLEPTEERIAKAHPLFQQFRLLQEINNLQLINIRTGEVIDLTQEQRNTIFQDMNVTKEKEYEKVRALLFKSDYEDYIFNFEKGNKKKLKGNESYHALKSKLKTKYNALSDEEKNYLIELLISHEEDEVVSGKLKAKGYSYSEIDNILNISLPSGTGSLSLKAISKIIPLMMNGIKYSDACVNVGYNHSNYDPNVDLDDEKYPYYGKVLQRSVLPVARTSHDEDADQFGKINNPTVHIALNQIRRIITALTDRYGEPKEISIELARDSAPSIKMVNAYKSQLGIPIKNNEEESLFIQYQRLIKKVQEKNEENNNEIAKELAILDKKNNYDNRFRYKLWVELAENPLERCCVYTGRQIKATDLFSSNIDIEHILPKSRTYDDSYANKTLCFRDANIKKGEKSPYEAFGHNPDGFDWVEILKRANNLPENKKWRFTNKAMEKFEDENEILDRMLNDTRYMSILAKEYLQPICEKIINPTGRLTSDLRLHWGLNSLLSDSNKKERTDHRHHAIDAFVIAMASQSMIQKYANAIKDSPGRFISNLPQPWNGFSMDNLNERVNRIRVSYKPDQPNPKLLRTRMQTVGPLMEDTALSFYSEDPDNAKMALFTQYKKISSFINKEQIIIIKSEKFRDELLALRELYGDDGSFKKALKEWADKNNVKRLKVIQKNDPLNLIPIKDKNGKIYKYYASKENLYIDIYNPEPGNPKSVWQDEVINIYNAHIEGFIPRWKMSYPKAKLIMRLYKDDIVAYTNSNNERELRRVRRFSQGRIFLRELHIAQKEKNDEAGEPKSAKQLQQLNAAKAGIDIIGRVFDPNREQ

SEQ ID NO: 8498 - protein, 1011 aa, unidentified
  REGION 1..1011: note = Description of Unknown: Cas Enzyme sequence
MRTKPYILGLDLGTNSIGWACIDQSKGAPSGLLAQGSRIFEAGLEIDAGGKGTPLNLERRTARQRRRQHDRRKRRILKVRRILQSVEMLPANKPEHNDAAWKALLAKDPYALRAKALDHKIELQELGLCIYQFAHRRGFLSNSKALKKDDDFGKLMQATKHFTAEMEAEGARTWGEYLSRTNPHEQRIRANYTLRLWYTAEFDLIWQKQQEFHPSILTKELYERAKEALFFQRPLKSQAHLIGHCELEPKRKRAPFALLMAQEFRLLQSLNHLTVVSPDGTERDLTAEEREKALALLRTKGNQKFTTLRKELSLRGTKFNLERGGEETIQGNNTAARMIEIFGSRWDTFTPEEKNQIVEDRLTIADTDALISRMQRKWGLDASMAEILSETELEEGYCGFSRKALSNLLPLLDQELPIMKALQKAYPGHQQNLPVIDVLPPQKNLRNPIVQRTLSELRRVVNAIIKEHGKPETIRIELARDMKQSADKRERDYSQMRARENLRKKAIQRILDETGNPSPRPHEIEKVLLAQECNWRCPYTNEQITMGNLLGDSPRFDIEHIIPFSRSFDNSFANKTLCEANYNRNVKKNRTPYEAAAENEFSAMIDRVKRNFGGDYADTKLDRFNLREVRSDTDFIEDFSTSQLNDTRYASRLAGEYLGQLYGSDWRKHIQIAKGGTTKYLRDAWELNRILSDSGTKNRADHRHHAVDAIVVALTTPLTVKSLSDANKRAPEHRRYSFYNMPMPWETFQQDVQRAIENIVVSHRVDRKANGQLHQETFYGIIKERGTGKSRAVLRTELFKLTEPDIAKGLIVDPAVRTLIEQKLKELGQKPDKAFKDRNNHPFMIDKKGNKRFIHKVRVYQNANPTPIAENRNVKLGGNHHLEIFEAKDKKGNPTWKCEVVSLLDARKRVKDKKPVTRQQDEHCNPLKFSLSIGEAVQMDWNGERVTAVVQKMSNTQNNTGYVFRRHNDARKVSETPYNETILIASDSALFKSNLQKIVITPTGQIRTAND

SEQ ID NO: 8499 - protein, 1970 aa, unidentified
  REGION 1..1970: note = Description of Unknown: Cas Enzyme sequence
MKKILGLDLGTNSIGWALVEVDHEKGIVKVLALGSRILPMNAGEINDFERKGTIKSSTSQRTDDRGIRRNKERFLLRRDRLHIILNLLNTLPEHYKIEIDFERNGKRCGQFKDYKEPKLAYVPNKINNKKFDFLFEDSYREMLKELSVEYKKRQLIPRDWTLYYLRKKALSKKISLEEFAWVLLSYNQKRGYEKIEVENKATKENEIIEELDLRVKDVTEHIDKKGDKYFKVELDSNDGLTYNEKSNQQMTFKDDLKEVKITSKIDEFGNIESKELTLVDIYPLAIQKVNYEKNGDNHNYTLTYQNGWEELKSSKKYTYRYTNVINKPFEYIVETIYDEKGNIKTQQGKDRKLREPDFSEKSNDWTLLKKKTEKDALAFNWDNNYRNEKKEPKKFISPKIYDILKKDVQNGCRTKIIGGMFQVVERDFYREELTQIISTQKQYHTTLDDRKTFEDCVKVLYPNNESHAKTLLTNKDAIQHLLIEDILLYQRPLKTKKSEIANCKYEVKQWKDVLDKNTGKPIEIVDEETGEVFVKKTPIYHKVVSASHPYFQEFRIWDKLHNLRLIQIDKKVDGKVKTNVDVTEDYFSKETYQELFSLLNNKSSLSQTGLLKFLEAKLKEKKESSKNFVWNFPEDEEIKGNETRVSFAIRFKRCGFTEYTNFLTQEKEIALWHYLYSVSYKEKIADDFKSIKSFFSKFFEGTNIQEEIKEKLVKDFANYPKIPSKYCAYSEKALKKLLPFIRLGENQFNGHFDITEFKFDLELINYDKTRILSHIGFNSDNRTNLSVEDKQKLELKRQQLFDAIWKHSINERIQEILKRLKTIDFSADKIDLSKIISNYNRNRNIPFPKGLFNAFKAFEKQEDFINLDLTQASYLVYGRHSELAEAKYWNSPKQIRDELHQELKQHSLNNPVAEKVILEMMQIVADIWDYYGTKNPDETYQKLFDEIHLEVGRELKKSAKEKQSITDKQGENKVQNTRLRQTLEEFLSKSPYNAISQNSDHFERLKIVEDGAAHTKNLNKDFFNDKTYTKKEIEEILKKPHISKDDFEKYWLWIEQGYRSPYTNRMIKISDLFDGKKYNIDHVFPQASVTNDSLSNKIVCEFEVNKMKSRQTGREFINSPKQRSIYCSAHKSEVDIVNDDTYVTIVKSQFSGNKRQILLSKEIPSNFTNSQLNNSRHIARKAMELLSHIVREQGEIEFRSKNVLPVTGEITSKLKRTWKLDEAWRELVSPRFIRMNELTKSHLFGQEQISKSGEKYFDCNIDDTIREKDPSYDIKRIDHRHHALDALIVALCTEEHVNYINNINSNATSDNYGKQKQIEKYRETLKRKIMFSKPNKENPNDKDWFYMYPGQIRQIGVDQFGIETVLKKSYFYKDTQFNADYKTMVLSALQHTIVTFKQNMRVINKTVNLYNNTSNKNKFEAQKGNDAGNKYNWAIRRSLGKSTYYGKVYLGETENKQLHKILKEIYNSLERIIDDKLREKIITIKNENTGFDEFEKQVKREFKNIMIELKVYKVASREFLSEKFSSKKIKEITDTGIQKILLNHLKESDTIKLPLEEALAYYDYLIEKPEIEAIINSEDSKFVTIDDFVAHLKLNDYKYKKVEYKTLNIFIDQIKVRDFRNEFKKDKIDEHPEIAFTVDQIDKMNQPENLKRLNEVKNHTPIKKVRSSSGYGNQRQVSVEPQSVKSKQYIVNDAGSNLYLGIYERSYIDKNGDNITERKFQDIGLIDLIEKLKQDSSNRNNPLSEKLFDDKNNEYYWKFTISPLDLVYVPNEDEIENPSLVDFSNLGEDQINRIYKYVDGNVDIANFIPYSVAQPIWKFHDDKKKKEIYNQIIEKHSIQISEKELIKDEFGFGSQQTKNQNMIDGKTQIKKVCWKLKVDRLGNISLTKLSNKSNTNSSDSDNTAKEPGTSYATTKKITIFQSPEDAENSQLDYLAKLTPEERFERFLELMNRFYKFVKPDWSTKKIILDL

SEQ ID NO: 8500 - protein, 1445 aa, unidentified
  REGION 1..1445: note = Description of Unknown: Cas Enzyme sequence
MAKFLGLDLGTNSIGWAIRINDGFEREVYFDKFCTDKFESQKKIKKKEEIDKDNEIVDNGVIIFKKGVGDGKSGEFSLAAERRNNRSKRRLYNAKRYRKWELLKVLIENEMCPLTKDELRLWSVGYWEKYEDKWKNKGRIYPVYNEDFQNWLALDSTIFGDKGTSINGKPVRKNPYDLRCELIKQEETNEYIKKLKIGRALYHLVQRRGFKSSRKSGKSTFATNEDIEQLKKENSNFQISFLAKERLDNGERFRASGVIQRKYFEDEFFAICNKQNLSSALIESLYKAIYFVRPLRSQKGLVGNCTLEKGRPRIPISHPKFEEFRALQFINNIKWREKDSKEFVEIPITLKKRIFEDLFFRKLVGGKNKGKISGESYFNFEDIIKNYSENGTYEFNYKNLPNVSTCPTIAALMNVFNEEWENKFIQDENNYGINWAGLQIRYNTKDYKNLGRRLKRKIIKGKTTYVATELKKEKTIKVDEIWHLLFDYIQTKDKIEDLEKFCKDVLEFDEDKTRAFCSIDIPQGYGSLSYKAINKILPFLQSGFIYSEAVLFANLKKVLGSEFENKKEDAKTIIAKTIKKTGLIKERYNIVNGLIQSYFAEAETNHAKGADEKIIETAKKETIDRLKKYYGENEWNKKPESEKELIQKEVFNLYIRFLNGEQTKEEKASAKDNYVPEIDYYKLPRLDEAIKHNLKNSFNIAESNLKALYHPSDIEMYPVSRTELKDTNTKILESPQPPSKGWKNPMAMRTLHELRHLINYLLKIGKIDKETKIVIEMARELNDANKRWAIQTYQRYREDENKEFAKAIVGVVKQKYPNLNENDIENINKVRLWWEQVENNEEVYRQIKSLKEDIEKYRLWKEQDCICTYTGKPINITNLFDGTQTQIMHTFPLSASFDSSLANLTVGDAYYNNEIQSNKIPTQLPNYSKDVIINGKTYTAIEPRIEKWKEKVIHFKNLIEENKKRTKKTQDPGTKKNLIQNRHLLQFDYDYWKKKVETFTLTEIPLQWKNSQLIDTQIISKYARAYLKTVFEKVDVQKGTNTDKFKKIYQIKGDEQKDRSKHSHHAQDAAILTLIPNSAKREAILESYYKAEEEKRKFHTKPYESFNSSHILDIEKNVIINHISHDKTLTETIKNIRKRGERTGKKAQGNSIRGQLHKETFFGAIKVLERNEQGFPIKENGKYKILKNKIGEDEIWIVSKKPIKDIKIDKDIIVDDLLKKHIQKQLDNGISLESVTDFNNKPIRHIRIRVKAGVGFLSKDKAMPIKTQTYSSRHTHKNEYLVQNEENYLFLLYEGLNDKNKTIRHYRILNLFDIAQLKIKDINTIKNEPEFKTIKKGKFELSLKVILKAGDKVIFYKESRDEITLENIKYRLYRLYKFNELGENTAYLYLQNHIEARPDNELDKGEKAFDPNKYQPRLEFTADKMNCLFDNVDFKIMPDGRIQFE

SEQ ID NO: 8501 - protein, 1525 aa, unidentified
  REGION 1..1525: note = Description of Unknown: Cas Enzyme sequence
MKKILGLDLGTNSIGWALVEVDETNHPYKIEGMGSRIIPMGTEKQDYEKGVGITKNSTRREKRTTRKGNKRYKLRRNKLLFILNELSMLPEQFQFKNGIPEATKLQDLELLPISKKTRQLDALGLLELKVKALKEPVELKEFGKLLYQFNQLRGYSGDNNEDDNKKKKDEDEDEDNKKKKYEVVVQKVEILKVEQSESKFTVRSGKNKGEKQYYFDVTINFDGKEIEGQSELQNLKEKEGQEEELEIRITRKNDDTVTYKFALPQKSNWRKAMELSEKTLKDEKLFISQLRLLDLQQNKWTKIRNRVFLRSRYKEEFDKVWEIQEKEHLILKDCPKEALEKIINYIFPGNSESQTQLRNVALEKGLKYIIKEQVIYYQRPLKPQNELIGNCLFEKTEKVIPTSHPFFQEFRCWKQINNLYITSKTLNGNKYTYQNRYLTVAEKTAIYEKLQTQKEVGFATIIEILNLDKNKRKLDKEQKDYFLNGLNVKAKLKGCDTLISIRKELGDYFNNFISQDEKLVEHLWAVIFDVKNHEGSEYDVDSKRVSSITDVLINHTDEGTAKELSLKLAQKIKFLRKYASLSEKAIQNIIPLMLPKPKSIPDKAQQRFKNIQHLIETGEIFDNVDFNLEDYVIDFVKNNPDVLKEGGIMESFAISLVYGKHTAETIKPQIKNYHDIKYEERNFRNPVVEQLSNETMQVIKAIWKQYKFNPENLEIRVELARDLKNSAAEREKIYKGQQNSKKINDKIKERLAELNQEYSSRNIELYKIWSRQNIEDYPKQSKEPTQEEIQKLRLWEEQKCISPYTGKPIPLSKLFSPDRWYDIDHIIPKSRYYDDSISNKVVCETNINEEKSNRTAWEYMSQQNSNYEILPLHNFIQQVNDNYFGKKKKNLLAEKIPSNPVERQLKDTQYISIAIKNELAKIVGSDNVKTSTGEVTDFLRSRWGLRKLFMELTENRFKQMELWDLDENGNPQTKWVNRYVDEKGKNQYDIKNWSKRYDHRHHSIDALVVALTTQSHIHRLNNLNKYYQDELIERKDEFNIIVKEGEGILEAFFNLEEKRRDEILHKIESSRHFEMPIKNLVEQVKNHLETMIVSHKPKDKLGIKIDDFDKNTPNKKLKKQLKVRAGLHKETYYGKLNGRDTKRVDIFSLSSSDVTRIVIDKALANEIILHKKKYDSMKEAFTGEGLKAFNDKRISNGKQPAYKVKVWYNKEEKEESGLQRLYDDNEKKSVITGDNYLFLVMEKNGKRIFDIASLFDSVSIAKDALYDNVYELKKKIAEDYRIKHKDKPEKVLFTLQQNDLVYLPTGKDDEVSRKSETEFIEWISKPDNKKAFYKRVYKVVKFTGKDCFFIPHNYANSISVAKDLSKNEQDRLKEIYGERKVPKQEKNYEEFGSFGTCAKTEVNNDFVRELVLKKNFKGKSPMKIQDFCIKIQIDWLGNISLRNPSNKSNTNSSYSDNTAKEPGTSYATTKKITVFQSPEDAENSQLDYWAKLTPEERFERFLELMNRFYKFVKPDWSTKKIILDL

SEQ ID NO: 8502 - protein, 1434 aa, unidentified
  REGION 1..1434: note = Description of Unknown: Cas Enzyme sequence
MKKILGLDLGTNSIGWALVNEAENENEKSSIIKLGVRVNPLTVDEQQNFEKGKSITTNADRTLKRSMRRNLQRYKLRRENLIKILRDNKFISDEAILSENGNFTTFETYRLRAKAVKEEITLEQFARVLLMINKKRGYKSSRKAKGTEEGVLIDGMEVAKTLYNENLTPGQYCLQLLNAGKKTLPDFYRSDLQMEFEKVFDKQMKFYPDFLSVDLKEELRGKKRDAVWAICAKSFKEKGFELVGTKRQGNTAEQKTENYEWRAKGLSEKLELEQLVIVLQQINIQLNGSSGYLGAISDRSKELFFNKQTVGEYQMEVLDKNPNASLRNMVFYRQDYLDEFNVIWEKQTLFHKELTEELKQEIRDVVIFYQRRLKSQKSLINFCEFESRKIEVEIDGKKKTKTVGSRVIPRSSPLFQEFKIWQRLNDFEVFGKANKTKKQKGASLFSETEDPLEYGGRRELYQEEKELLAAELSIKKELKKAEILKLLFNNTKELDLNFPSIQGNLTQATLFDAYRHIIELSGHEIDFDKLTTAEILISMEEIFRVLNYNTGILHFNSENELDKEPMYQLWHLLYSFEGDNSKTGDENLINKITERYGFEKEYSTILSSITFQDDYGSLSTKAIRKILPYLKAGHKYDLACEYAGYRHSASSLTSQELENKVYKNRLEILQKNTLRNPVVEKILNQMINVVNAIINTYGKPDEIRIELARELKKSAKEREELTKSIAETTKLHQQYKDILSKSPFNLSYISRNDIIRYKLYEELKDNGYKTLYSNTYISPSAVFSGDFDIEHIIPQSRLFDDSLSNKTLELRSINIEKGNMTAVDFIKSKYGETGGETSLDNFLNRMEDLHKKGVISRAKYNKLKMQEKDIPDGFIERDIRDTQYIAKYAKTMLGDLVKFVVSTSGSVTDRLREDWQLIDVMKELNWEKYKSLGLTEEFTNEEGHRIRKIKDWTKRNDHRHHAMDALTVAFTKRSIIQYLNNLNARSDKSSNIYGIEQKELYRNGKGKLLFKPPFDLDEFRGDAKKHLENTLISIKAKNKVATQNINITKNRVGVTKKIQLTPRGQLHNETIYGSLKQYVTKEETVNAKFDTAKINMVSKPTYKEALLKRLQEFGNDPKKAFSGANDLSKKPIWLDELHTTQVPEKVKTVCFETIYTIRKDISADLKIEKVIDVNIRRILEDRLKKHNGNAKQAFSNLDENPIWLNEENGICIKRVTISGVSNAEPLRDKRDKNGKIILDNKGQKQPVDFVNTGNNHHVAIYQVPVLDNNGQVVFDENNQPKYELQENVVSFFEATTRVNQGLPVIDKKFRKSEGWKFLFSMKQNEYFVFPKTEKREKVDEETGEITEEEVIAFNPNEIDLLNPDNYHLISPNLFRVQKIGEKDYWFRHHFETKIEDKSELVEITYKRRRSPKSVIGIIKVRINHLGQIVSVGEY

SEQ ID NO: 8503 - protein, 1133 aa, unidentified
  REGION 1..1133: note = Description of Unknown: Cas Enzyme sequence
MAQLIFGLDIGIASVGWAVLGETRIIDLGVRCFDKAETAKERDPLNLTRRQARLLRRRLFRRAWRLKKLARLLQHEGLIPNAQRFVEALANGHASAPGDPEHPNTWELRRQGLDRLLTPAEWARVIYHLCKHRGFHWTSKAEEARADSDAEGGRVKQGLKNTQALMVAKGYRSAAEMILAEFPGSQRNKRGQYDKALSRVLLGQELALLFESQRRLGNPHASERLQALILGNGDRRSGLFWQQKPALSGADLLKMLGTCTFEKSEYRAPKASFSAERHVWLTRLNNLRIIDDGRTRPLNGAERQAALALPYQTENFKYKTLKNALVKAGLWTADVRFAGMAYPSQAQMEDGKAKDPEEQALVKLSAWHELRLAFKREGHEALWQRIATPALEGKPELLDQIAWVVSVYKDGEEISEQLRRLPLPDPELSVAVLEKISFDKFSALSLKALRRIVPLMEQGLRYDEAVALIPDYGHHSQIVKPDAAKHLYLPPFYQDQRKYENKSDRVGSMVFRDDANIPRNPVVLRALNQARKVVNALIRRYGSPTAVHIEMARDLSRPMDERNKVQRAQEEFRDRNAKAREDFERDFGYKPKSAVFEKWMLYREQHGQCAYSQQALDIQRVLDDPNYAQIDHALPYSRSYDDSKNNKVLVLTRENQNKGNRTAYEYLTSFPGGEDGERWRNFVAWVQQNKSYRLAKRNRLLRKNFGQQESRGFIDRNLNDTRYICKFFKNYVEEHLQLAPREDGDTNRRCVVVNGQLTAFLRAKWGLTKRREESDRHHALDAAVVAACTHGMVKALADHAKAKELAFLHEGFPDPETGEILNPAAYAQGQRHFPEPWPHFRHELQSRLFTDDLDALRADLQRLGTYTEDDLKGLRTVFVSRAPQRRNGGAVHKDTIYAQPQRLKATGGVIEKVPLSSLTLKDLDRLVDPHRNVKLYDAIRQRLEAHGGKGDKAFGPANPLRKPDKNGLPNGPLVHTVKLLREKQSGIPIRGGLAKNDSMLRVDVFTKAGKFHLVPVYVHHRVTGLPDRAIVAFKDEAEWTLMDESFKFLFSVYPNDFVRVQQKGKPPIAGYFASAHRGTGNINIWLHDRNTSNHNDGAIEGIGVKTALSFEKLNVDVLGHIYPAPPEVRRGLA

SEQ ID NO: 8504 - protein, 1125 aa, unidentified
  REGION 1..1125: note = Description of Unknown: Cas Enzyme sequence
MKSKPQNIDSWTLGLDIGIASVGWAALAPTRIIDLGVRAFDKAETAKEGESLNLARRQARLLRRRLWRRAWRLTKLARLLKRHGVIDAMDFFKAQPGFADSTWVLRRDGLDRLLTATEWARVLYHLCKHRGFHWFSKAEEAKAESDAKGEGGKVKKGLAQTQALMKEKGYRSAAEMVLAEFPEAQRNKQGDYSKALSRVLLDDELAKLFDAQRQFGNPHASADLELALRGAPGQRGGLFWSQKPALAGKDLLKMLGHCTFEQSEYRAPKASFTAERHVWLTRLNNLRVIVDGVSRPLNEAERRFALPLPYQSGEKFTYKNLRSALVKEGLLPEFFRFGGLSYPSERQQADEKAKNPEDQPLVKLPAWHEMRLAFQRAKLADAWLQIATPALEGQPDWLDQIGWVLSVYKDDAEVSAKVAELNLPGGEAVLDTLLTIRFDKFHALSLKALRRIVPLMETGLRYDEAVKAIPEYGHHSQLFVGGAGGQRTLPPFYDGRDATGRMKFREDLDVPRNPVVLRALNQARKVVNALIREYGPPVAVHIEMARDLSRPLDERRDIEKLQKEFKARNDQARDEFASPSGFGRKPTGAEFEKWQLYREQHGKCAYSLEALDLNRVIEDPTYVQVDHALPYSRSYDDSKNNKVLVLTRENQNKGNRTAYEYLTSFPGGEQGDRWRSFVAWAEGNKAYRQAKRSRLLRKNYGEEEATGFKDRNLNDTRYICRFFKNYVEKHLQLADNSEARRCVVVNGQLTSFLRARWGLLKIREESDRHHALDAAVVAACSHAMVKRLADYSRTRELEYLREGFTDPETGEILNPVAHQKLVEHFPAPWAHFRHELEKRLKTDDVTELRAEMARLGTYTEDDLNALRPLFVSRAPKRRNGGAAHKDTIYAQPLSLVKQGGVTQKVPLTGLTLKDMDRLADPHRNAKLYTAIRERLEAHGGKADKAFGPNNPLHKPDKDGNPTGPIVRTVTMVIDKMSGIPVRGGIAKNDSMLRVDVFTKGGKFHLVPVYVHHRVKGLPDRAIVAFKDEAEWTLIDDSYQFLFSLHPNDLVRVSQKGKAPIEGYFASCHRGTGAISVWLHDRNTTNTKDGAVEGIGVKLATAFEKFNVDTLGHVFPAPPEVRRGLA

SEQ ID NO: 8505 - protein, 985 aa, unidentified
  REGION 1..985: note = Description of Unknown: Cas Enzyme sequence
GNFQSAQNFIRISATWVKIWQNLSNVIIRKKGSPALKKKKPSSGDSSLHEPEEYIFDLDARVSLFEELNIKGNLTAKKALELLGHDANQWEVNFVKLEGNHTNQLLYKAYLDILEYEGYDIKELLHVKSNKDEVDLDDLNVPALQIKNMIKDVFGALKIDTSILDFNAELDGVDFEQQPAYQLWHLLYSYEGDDSNSGNERLYRLLNKKFGFTTEHAKILAGISFQNDYGSLSTKAIRRIYPYLKENKYSDACVLAEYRHSKNSLTKEELESRELKDRLEPIKKNSLRQPVVEKILNQMVNVVNALIDKENDQLEASGHQRNFHFDEIRIELARELKKNAAERAEMTSNINAAKLNHDKIVKIQQKEFGILNPSRNDIIRYKLYEELKNNSYKDLYSNRYIAKEDLFTNKIDIEHIIPKSRMFDDSFSNKTLAFRDVNLRKGEKTAFDFMQIDTDDEGFELYLSRVENLYKLGMRSPEEGISKAKYKKLLKKESELDDGFIERDLRETQYIAKKARQMLFEVTRSVISTTGSITDRLREDWGLINVMKELNFQKYKALGLTETLERRSGQKIEVITDWTKRNDHRHHAMDALTIAFTRHSHIQYLNYLNARKDEHHKLHSVILAIENKETLSRPDADGSKKRVFKEPITNFRKIAKEHLEDIIISHKAKNKVVTKNKNKIAKNNHVQTTLTPRGQLHKETVYGQYRYSVKKEESVGAKMTYDTIMKVTKPAYRNALLERLKESGGDPKRAFTGKNAISRNPIFLNEAKTECLPEKVQLVWLEKDYSIRKDVNPDNFKDEKLIDKILDEGIKRIMKERLRQYGGDPKKAFTDLANNPIWLNKEKGISIKRVTISGVSNAEPLHYKKDHHGQFLVDENGNIQENVVSFYEAVSRKNQGLPIIDRSYNQHLGWQFLFTMKQNELFVFPNAQTGFDPLNIDLFDAENKKIISPNIFRVQKIAQKDYFFRHHLETNVENNPATKNFTWKR

SEQ ID NO: 8506 - protein, 927 aa, unidentified
  REGION 1..927: note = Description of Unknown: Cas Enzyme sequence
MSGKEKIFAFDMGVASLGICVRQGEEVKRLDSLIIPAEYASTKDAANRRRMIRTRLAHHKREGWWKKCCSECGIEVLETLQPIYDSSGKLLRHVPDPRMLREFSAAGDDTVYNSSLLRISLLQGRTLESWQVFKAVWSAIQHRGFLSAAELPWAKTAKRNLSEEEAGAEEEGAKDLEDETRNAVAADVYLKRLATYSEDCRFPCYYEAERMGLWDPQHPRDIKLRHEFPSPEAARNKDGVKVVASRRLIEAEVKLLLTQAAKQFPKLKGRENYIMYGEAGVAFPSVVKPQEWRHIRGGEKEAEGILSQKTPRFDNRAVNKCCLIPRLNVCAAKDELNKEVFFLLALKNIRYSFGDKPDCALDPAQLKEIYLGFVENSWPQAFPLTENKKTLDSAQAAWCSLLFQKGVWKKQFHLTATQWRKWLENRIACEVNPAHPKIPAPKIGGRSSYCRPALRLVKELLLSGQAPSDFYKSKVGEVNNEDSRKGLVRSEYDFLKNMGNSWYAIHIPDNRLADAELITTPSVRQRRIEEIINDVRNPVVRHRLHYLVSRLQSMKDAHGEPDKVYYEFVREDFMGEKAKREYEKRIRDNQKARDIAFKEAEQLGLKGDGILKMRLYREQCGVDYYEAGENEKIAETEIASCEIDHIVPRSMRGPDAFYNLILTRYANNQAKKERTPFQWLGNTPAWDKLAEKIGRNSCDLSSRKQRLLLSAKPEELVEKYTALAETAYIAKLAQKITALYFGWPEGVRGTHKRIFVSNGAQTARVRRRYKLDRLLHADISSDEEFAKLVREGKLDKKNRGNHRHHALDALVISMEADLENNKETGDFSLPAWFHAGFAQKHLDTVVPTNVKFQKPLIAQTIYGLRKAAVGEDGYVAISTAKTSATKPTRLEDWAKLKLADAKKRVHDIYSEQMDCALFGRQSEPVFV

SEQ ID NO: 8507 - protein, 1161 aa, unidentified
  REGION 1..1161: note = Description of Unknown: Cas Enzyme sequence
MKTLGIDLGTNSLGWAILDSEKSAKNAIQDAGVVIFEEGIKREKGNDSLETPAAERRKHRMARRLKFRRRMRKLKILEILISNGMCPLTMDELKRWKQDDAYPVGNKDFRNWLKSTREDNPYGDRAAAAARKVAPDVLGRAIYHLAQRRGFRSSRKDARNEKEERQGKKQDKRSKVKNSIAELTAKLEKKQCTLGQHFFDLYQNGEKVRGCYTGRKEHYEKEFDAIAKDQDLDGELAERIRRVLFFQRPLRPQTHLIGKCPLEKKHNRCQVAHPAFETFRMWSFINTIRIVAADGERIPLTSEQRAKVAKAFFKSARYVHFADIVKTLKMPKETRFNYPPKKTVATCCVTHQLDKVFGGDCAAWSRQTQAPDGRSVTYTCQTAFNALTFFEDDDKLLAFAKTKLGLGNEASAAFIRIVCPEGYAQYSLAAIHRINPFLMKGIELSQAVFLAKIPEVMGPSDFSVHEAEIIADMQERNEDYRKNLRDHSQNAKIGVVPLQTRLWQYMQAKWSFTEDQFNRLYFRDSHADASYADVPPSDILPPVNLGMLRNPLVQRTLTVLRKHVNYLRRTGRIDANTRIHLELARSVNDRNTRMAFAAWQKQREEIRLEARERLAEMGRPNPSDTDILRYILWQEQSQKCLYSDDPHRTISQHDLFSGACDIEHTIPRCRSGNNSQANLTLCFHAYNCQRKKGRIPAECDNYDEILVRLKPWQDKVAELEAVYLNQQQIARNTPADNPEARARNRQKALVTRFELNYWRDKVAAFTQDAERLTEGFLNRQLVDTGIISRHAIALLRTAYRRTYPVNGTAVAWARHGWGIQKITEKKERSSHLHHAIDAMVIAGLDRDRFNRICSYCKDDGEKDYESTFPEKLHPFPGYAQAVFDAGESILVKHLPRHVEMKQTARCAVRLSKAVHLQDGSTLSKVATRGDTVRGQLHKDSFYGCIQNPENGGQKGFVIRKPLTTEAFASIDDLDKIVDPAIRKIVQEEVRRRIDGGAAFKKAMDEGGFQMPSGVSIRKVRIRAETVSDPLQLRSHVFPSRHEYKNPYYAVSAEGTNFRLALYKREVRGKIKFKFFADSLLDWARRSSPQEEPHRRSDLGDFVGYVQPGRMALVYDHSPDELQTMPAAEIKKHLYKATSVRMFDALGFPIVSRKACCDETSL

SEQ ID NO: 8508 - protein, 1445 aa, unidentified
  REGION 1..1445: note = Description of Unknown: Cas Enzyme sequence
EKRLGQFFEETEPKLVYNDKQFIFKKSFDEMLLDFKQSQPQLFYTKSNGKETKIPYDWTIYYLRKKALTQKILKEELAWIILNFNQKRGYYQLRGEEETENPNKLVEFHSLKIVDVIADEKPNNKGDIWYSLQLENGWIYRRSSKTPLFDWKDKVRDFIVTTDLNDDGSVKIDKDGNEKRSFRAPSEDDWTLLKKKTEQEIDASNKTVGTYIYENLLQNPSQKIRGKLVRTIERKFYKDELKQILEKQIELQPELFIDDLYNDCVRELYRNNEAQQLILGKRNFTHLFVEDIIFYQRPLKSQKSSVGNCTLEYKIHKINKKDEKGNPIKNQFEKDADGKDFEVKEYFKATPKSNPLYQEFRVWQWLFNLKIYNKADDTDVTTQLVKGIDDQEKLFAFLMQQKEVNHKDILKHILFPILKEQYPNAKPQAFDKELDKEIAKYRWNYVFDDSKEKEEDKSKKYPCNKTGYEIRGKLGKVKNVPVDFLEIIDVKEVEIKNGKNKGKIIPISLGTREYQLWHIIYSVTDKKEYETALKSFANKYNLDETSFVGEFKKFPPFPSEYGAFSEKAIKKLLPLMHLGKYWNENEVIEPVNDIANSIKKRLEQIEYDEKRIDEVADDDILKGVLKSFIKRQNLYFTQGLQLYQASYVVYGRHSEAEIADKWTSITDLEKYLEDFKQHSLRNPIVEQIVTETLRVVRDIWKHYGQSANDFFDEIHIELGREMKNTAEDRKYLSEQVSNNEATNLRIKALLMELKENSDGKLSVEDVRPYSPMQQDALRIYEEGVLNSNIEFPEDILKISKTAQPSTSELQRYKLWLEQKYRSPYTGQIIPLGKLFTEEYQIEHVIPKSRYFDDSFNNKVICESAVNQLKDKLLGLEFIQKYYGQEVELGLNKTVRIFTVNDYKDFVKQHYTKNNAKRRNLLLDDIPEQMIARQMNDTRYVSKFISALLSNIVRAEKDDDGINSKNLIPGNGKITTTLKQDWGLNDVWNDLILPRFIRMNELTQTSNFTSKNQEGHTIPTIPFELSKGFQKKRIDHRHHAMDALVIACMTRDHVNLLNNQSAKSEVSRYDLQNKLRNKEKESWFDKKENMQIERDVFKDFKKPWENFTVDAKHKLETIVVSFKQNQRVINKATNKYEKYKDGKKVKVEQEGINWAIRKPMHEQTVSGLVNLSWIKLKNDEITTATRKVLDKSFDDEKIKKITDTGIQKILLNYLKTKGNNSEVAFSPEGIEDLNRNISQYNDNKSHLPIFKVRVYEKGSGRFILGEQGNKRSKYVQGSPNLFFAIYTNEQQHCKGADKKPTKRCFETIPLNIVIERLKQRLNPVPETNQIGEKLLFYLTPGDLIYVPSEEDNLTSIDFNNLTEEQKKRLYNVNDFSSSTCYFTPNRIAKAIMGKEVDLSFDKKRDKLTGSFDTKTASLEGVQIKEICIPIKVDRLGKVVSIDRKNI

SEQ ID NO: 8509 - protein, 1480 aa, unidentified
  REGION 1..1480: note = Description of Unknown: Cas Enzyme sequence
MKKILGLDLGTNSIGWALVNEDFEKRQGEILGMGSRIIPMDQGILDTFSGGKPLETQTAARTGYRGTRRIRERYLLRRERLHRVLNVLDFLPKHYAYQIDFEKRLGQFFEETEPKLVYNNKEFIFKKSFDEMLVDFKQSQPQLFYTKPNGKETKIPYDWTIYYLRKKALTQKILKEELAWIILNFNQKRGYYQLRGEEETENPNKLVEFHSLKIVDVIADEKPNSKGDIWYSLQLENGWIYRRSSKTPLFDWKDKVRDFIVTTDLNDDGSVKTDKEGNVKRSFRAPSEDDWTLLKKKTEQEIDDSQKTVGTYIYETLLKKPDQKIRGKLVRTIERRFYKEELKQILQKQIELQPELFTNDLYNDCVRELYRNNEAQQLILSKRNFTHLFVEDIIFYQRPLKSQKSSIGDCTLEYRLHKDKAGNDVKEYLKATPKSNPLYQEFRVWQWLFNLKIYLRADDTDITAQLIKGIDDQEKLFNFLMKQKEVNHKDVLKHLLIPNLKEQYPNSKPKAFDKELDKEIAKYRWNYVFDDSKEKEEDKSKKYPCNTTGYEIRRRLEKVENLPENFLTPEIEQHLWHIIYSVTDKKEYETALKSFANKFGLDETSFVEEFKKFPPFKSEYGAFSEKAIKKLLPLMRLGKFWNENEVTELGRDRANSIKERLETIEYDEKRIDEVTDDDVLKRILKSFIKRQNSYFTQGLQLYQASYVVYGRHSEAEIADKWASIADLEKYLEDFKQHSLRNPIVEQIVTETLRVVRDIWKHYGQSAKDFFDEIHVELGREMKNTAEDRKYLSEQVSNNEATNLRIKALLMELKENSDGKLSVDDVRPYSPMQQDALRIYEEGVLNSNIEFPEDILKISKTAQPSKSELQRYKLWLEQKYRSPYTGQIIPLGKLFTEEYQIEHIIPKSRYYDDSFNNKVICESAVNQLKDKLLGLEFIQEYYGHEVELGLNKKVRIFTVNDYKDFVKQHYAKNNAKRRNLLLDDIPEQMIARQMNDTRYVSKFISALLSNIVRAEKDDDGINSKNLIPGNGKITTALKQDWGLNDVWNDLILPRFIRMNELTKTKGFTSTNQEGHTIPAIPFEFSKGFQKKRIDHRHHAMDALVIACMTRDHVNLLNNQSAKSEVSRFDLQNKLRNKEKESWFDKKENKQVERDVFKEFKKPWESFTLDAKNGMQTIVVSFKQNLRVINKATNRYEKYKDGKKVKVEQEGINWAIRKPMHKDTVSGKVHLNWVKVPKGKILTATRKTIDTSFDLITIGSITDTGIQKILKNYLEKKGNNPELAFSPEGIEDLNKNLKLYNDGEPHKPIYKVRIFELGSKFPLGETGNKKDKYVEAAKGTNLYFAVYHDKNGMRSYDTIPLDIVIERQKQGLAPVELKSEYDFFLCPNDLVYIPNEDEKENINGIDFENMTYEQIKRIYKMVSSSGSQCFFVRHDVSTSIVNKTEFSTLNKMEKSIEGVMIKEFCIKLIVDRLGNISPLITH

SEQ ID NO: 8510 - protein, 1372 aa, unidentified
  REGION 1..1372: note = Description of Unknown: Cas Enzyme sequence
MKKILGLDLGTTSVGWALVNEAENKNEKSSIVKLGVRVVPLSTDEIQNFEKGKSITTEADRTLKRGMRRNLQRYKLRRSNLIAVLKSNHFITDETILSENGNRTTFETYKLRAKAATEEISLEKLARVLLMINKKRGYKSNRKANNQEEGSLINGMDIAKKLYNDNITPGEFVFELFKEGKHYIPDFYRSDLQNEFEKIWNKQAPYYSEYLTQDFKKQISNKSKTQTNKIFLGKYKIFTADNKGKDKKLQAYQWRVNALKEKLDINQLAYVISDVNGDITSSSGYLGGISDRSKELFFKKITVGQYKMLKLDENPNYSLKNKTFYRQDYLDEFEIIWETQAKFHKELTSKLKKEIRDIVIFYQRNLKSQKGLIGYCELESKQIEIVIKGKKKIITIGSKVSPKSSPFYQEYRIWQKLNDFTVINEKSEEKRALTQDEKQLIAKELCYKEKLSKSDILKILFKNYKNYDANFKELVGNRTNSSIYHALSLIIAESGNGDYDFSKTNADEINRITNEIYNGLGYKTDYFTFDSKIPGNPDIQPYYKLWHLLYSYEGDNSKTGDEKLIADIQTITGLPKEYAKVLSRIKFEPDYGELSTKAIRKILPFLIKGNNYSSACVLAGYNHSKRSLTKEEIENKNLVKKLQILPKNTLRNPVVEKILNQMINVINQLDDTYGKPDEVRIELARELKKSADDRQELTDAINKSTAEYEGYKELLTSDSNFHLQGSHISRNDLIKYKLYLELKDNGFKTLYSNTYISKEQLFSGDFDIEHIVPKARLFDDSFSNKTLESKSCNIEKDNMTALDYVESKGHIEEYLNRIEQLMKSGAISRAKYNKLKMHESDIPDDFLNRDLGNTQYIAKKANEILSTYVKTVIPTTGAITGRLREDWQLVDTMQELNWNKYDKLGLTETFANRDGKQIRRIKDWTKRNDNRHHAMDALTIAFTKHSYVQYLNNLNARSDKSSSIYAIEQKELTRNNHKKLVFNPPIPLNEFRAEAKKQLENILVSIKPKNKVITDNVNITRKKGGVNKKVQTTPRGQLHNETIYGHIKQYSTKEEKIGATFDEAKISTVANKAYRVSLLNRLQEFDGDAKKAFTAKNSLVKNPLFTDAAHSIKVPEKVATIQFADLYTIRKAVDKDLSVDKVVDAHIRAILESRLKEFGGDANKAFSNLDENPIWLNREKGISIKRVTIKGVNNVVALHDKKDKDRKLILDKENNTQPTDFVSTSNNHHIAIYKDEKEELQEVPVSFLEATIRANNNIPIVDKTYKQSEGWKFIFSLKQNEYFVFPNSETGFDPSQIDLKDPNNYTAISPNLYRVQKIATKNYFFRHHLETNVNEPNELKSITYKNIRSESGLKGIVKVRINHIGKITNVGE

SEQ ID NO: 8511 - protein, 1337 aa, unidentified
  REGION 1..1337: note = Description of Unknown: Cas Enzyme sequence
IGWSFINEAENENELSAIINTGVRIVPLTTDEEADFKKGNTISINADRTLKRGARRGLQRFKQRRNALLETFTKIKFIPTNFVYAETGFATTFSSYQLRAKSATEAVTKEELVQVLLMLNKKRGYKSSRKAKTVEEGDAIDGMKIAKEIFDNNLTPGQWIYNSLSKGGKFIPDFYRSDLQKELEKIVSFQNQFHPEQMNDKLLEDIQGKARTVTSQYFSKTLNIPLAENKGTREEIKLQHYKWRNDALANELDLKILAFIITEINNQINQSSGYLGAISDRSKELYFNQETVGQFQYKQLKENSHAKLKNQVFYRQDYLDEFEKIWETQSKCHPELNDKLKSEVRDITIFYQRKLKSQKHLVSFCEFEKGHKAIPKSSPLFQEFRIWQNLNNIVVKNETTKEVFELSEDLKQLIAKELEFKESMTDVQMLTFCELKKGTHTVNFKKIEGSRTNTSIFKAFEKILEVEGYEMDFSKMKPLEIKEAVTPIFETLNINTNILDFNPAIQGNDFDKQPYYQLWHLLYSAEDDDKLKETLKTKFGLKENHLPFLLNINLQTDYGSLSAKAIKKVLPHLIDGHIYNKACLLAGYNHSSSLTTEQNNERILKDTLELLKKNSLRNPVVEKILNQMINVLNAIMKDPAMGKPDEIRVELARELKNNNEQRSEMTKAINKSTAEHEQIRKLLHNEFGISRVTRNDIIRYKLWKETDGISLYTGKPIEPSKLFSKEYDIEHIIPKSRLFDDSFSNKTVCERQLNIDKSNKTAYSFLQEKLSPEEFDQFEKRVKSLFGKISRTKQNKLLMADNEIPEGFIDRQLRETQYIAKKAKEILLEVSRNVTTTIGSITDKLRDDWELVDVMKELNWEKYDKLGLTHIEEGKKGERLYKIKDWTKRNDHRHHAMDAITVAFTKPAYIQYLNNLNAKTQGEKKAGAIYGIETKYLERDKNNKLRFKSPMENFREEAKKQLESILISYKAKNKVVTKNKNTTKKSGGTNQKIQLTPRGQLHKETVYGKLQQYATKEEKVSASFTKEYIQKVAKKDYREALLKRLEENDNDPKKAFTGKNALNKTPIYISLKDNIVVPEKIKIVWFEDNYTIRKDITPDNFKDLKSIAKVMDSGLKTILENRLAEFNNDPKKAFVNLDENPIWQNKEKSIAIKRVTISGVSNAQALHTKKDHFGNEVLDENGNPIPVDFVSTGNNHHVAIYRDEKGNLQEEVVSFYDAVIRRNLDLSVINKNHVKGWEFLFSIKQNEFFIFPSNDFNPHEMDLLNPSNYHLISPNIFRVQKIATKNYMFRHHLETTVEELNELKDIAYRSVRSTSPLNGIIKVRINHLGQIIQLGEY

SEQ ID NO: 8512 - protein, 1121 aa, unidentified
  REGION 1..1121: note = Description of Unknown: Cas Enzyme sequence
KKILGLDLGTNSIGWALTEQDFKEKSGKILGMGSRIIPMDQTSIGDFEKGNPVSQTADRTNFRGIRRLRERFLLRRERLNRVLYKLGFLPEHYSDQIDFDCHFGQFLNHAEPKIAYQQNETGKYEFIFKDSFDEMIEDFKKIQPQLFENNKKIPYDWTIYFLRKKALTYPIAKAELAWLLLHFNQKRGYYQLRGEDEDDSKDKLVEFHALKVVEVLDSGDRKSKDEIWYNVVLENGWIYRRTSRTPLDWVGKIKEFIVTTDLNDDGSIKTDKEGKEKRSFRSPGADDWTLVKKKTEAEIERTKHTVGTYIYDTLLQFPGQKIKGKLVRTIERKFYREELKLILDRQQTFHPELQDKKNYAACLEELYRNNQDHRNTYSQKDFTHLFINDTIFYQRPLKSKKSEISECRYESRSYLDKEGITQTDALKCIARSHPLFQEFRLWQFLQNLTIYQREKYIDGRLYTDINVTAEFLKSEEDWVALFDFLNDRKEIDQKAFLKYPTFNLKKNVELYRWNYVEDKTYPANETRSQMLTKLKASNIAPEFLTKDIEEQLWHILSSIDDKVEIEKALTTFASKRSLQKEFIENFKKFAPFKKEYGAYSAKAIKKLLPLMRRGKYWSDEAISIDTKKRISAIVERLDSINYDKSKIESITDDAIPKQVLKSFIECRNPLTALNTYQACYAVYGRHSEEGEVVKWEVPTDIEHYLNHTFKQHSLRNPIVEQVVTETLRVVTDIWKQFGNGEKDFFDEIHIELGREMKNTADQRKRLTSIVTENENTNLRIKALLAELKNDNTVQNVRPYSPSQQEILKLYEEGVLSAVADIPDEILKISKNAQPTSSELTRYKLWLDQQYRSPYTGEIIPLGKLFTSSYEIEHIIPQSRYFDDSLSNKVICESVVNKDKDNKTAYAYIKEQHGKIIELDFGKKVTLFTLDAYEDFVKNRFAKNRSKMKKLLMEDIPDDFINRQLNDTKYISKLIKNLLSNIVREEGEVETTSKNIAACNGSITSTLKQDWGLNDVWNELITPRFERLNDLTKSNNFGHWTNKDGKRVFQTEMPLELQKGFTKKRIDHRHHAMDALVIACASRSHINYLNNESAKSTSKETRYDLKQKLCFKTKPDENGNYK

SEQ ID NO: 8513 - protein, 1015 aa, unidentified
  REGION 1..1015: note = Description of Unknown: Cas Enzyme sequence
MRIIGLDGGIASIGWAVIDMDDANPEASRIVAAGTWMFDAPETAKERTPTSAIRRQKRGQRRVVRRRAQRMASIRRLLRAHDLLSDDSAQALALGLDPWTLRAEALERQLSPAELAAILGHIAKHRGFRSNAKQDSGGNAADETSKMKAAIAATQQRLSQYRSVGEMFAKEPEFADRKRNRGGGFTRSVLRADLEAEVRTIFAAQQRLGNPLATDSLAEAFGTAAFTQRALQNAEHLVGACPFIDGQRRAARRAPSFEYFRLYSRLAALRITTRGAGERPLTADEINRAAADFGSQKQLTYRWLRKRLELDEGAGFADIAREEETKRDFVARTGNAAEGTAALRDAAGAAGWRSLLAMPAVLDEVAAVLTFRSDLSDIRDGLAKLPIEPVLADAIASATEAGKFNAFSGAGHISAAACRALLPHLASGLNYADACREAGFDHAARAEVKVDDIRNPTARKAVSEMVKQVKALVHEFGLPDRIHVELARDVGKGAEERDKITAEIEKKNKERDRLRDRFAELVGRPPQGRDEMLRFELWHEQNGRCLYTDAEISPMQLVATDNSVQVDHILPWSRFGDDSFVNKTLCLASANAEKRNRTPYEWFTADKTPGDFAAYERRVESLLGMKGRKKRGFYLRRNAAEVEERFRARNLGDTRYATRLILDLLARLYPEDGKRHVLARPGALTAKLRRGWGLEGLKKDEKGERRPDDRHHALDAIVVAACSESMLNSLTRAFQRAELEGRARDFSALDQPWPGFREAAQAAFAQVFVARAERHRARGEAHAATIRQVRERDGKLVVFERKSIDALTLKDLERVKDADRNAAVIESLRVWIEAKKPKDALPRSPKGDVMRKVRLESKDKPAILIRGGTADRGDMARVDVFRKDDAKGRARFYLVPVYPHEVASLPAPPNRAIDAHKAETDWSVIDSSFTFMFSLFGHSYLEIGKPDGEIVHGYFKGVDRAGGQIALADNENLLSLRRGLGARTLLSLRKFQVDRLGRRFEIKSEIRTWHGAACT

SEQ ID NO: 8514 - protein, 1044 aa, unidentified
  REGION 1..1044: note = Description of Unknown: Cas Enzyme sequence
MSKKNILGLKLGPNSIGWALLGSDGNKPNAIIDLGSRIFIKAVNDKTPTPKNVKRRDARLARRVNQRRARRKQRMLNYLVKLDLLPKELQGHLQPEALLNNLGDPYQLRAKGLDHPLLPHEMGRVLLHLVQRRGFLSTRKTLLGDMADDPDVQDVLAEMEQEDGGSSESAKEETAFKQDISELRSAIQAAGCRTLGEYLASFDHHNCQRNRVREGGHLRTDRQMYREELDLIWQEQRSHHPVLNDDVKDQIEEIIFYQRPLKLRADRIGKCSLEPRRNRARVARLECQRARYLQDINNLRYFDPNQEKYCTLNKDERNKLVALFESKANVTFPQIRKTLGMDKGFEFNLEMATKKLKGNITASDIRAVYPEWDSLNAEKQLAFVEDLLTIKKKSVLKKRLITHWDIDKRTAVNLCMLEFEPGHSSHCAKAIKLLLPFLEQGQRYDEARISAGYGYETKAIEVVDRLGLPPEITNPIVQKALHEVRRVINAIIAEYGKPDAIRIEMGRDLEMNTKNYTSFIKQQNANTKANTEAADKFREVGKNTPQLNLKKYPGKTDKLKYRLWEDQDHRCVYSNKPISLAQLFGSDIFIGHILPYSETLDDSYMNKVVCFAGEAQFKGNRTPLDAFGGNKGKWDQITQSIGHWHRSLKSKRDRFYMSASDVQEADFIGSQLNDARYICKEARGYLAQLGASITTCKGAITGWVKHQWGLNDLITVDDPGKTTDYRQYAIDAVAIACVDQSFFKTLVGIAKDLERAQSDVDISDIHFDSPWDGLRNDLLVKLEETVVSHTPQTKINGELHTAIASGFSDELGTIYRQDLNGNMTAKKVDSIIDETVRGIVKAHLEKYKGDAKKAFAQGVNVYHKDGVTPIKRVRVVRSNQIKSVTKLESEQFGTKNQSGTVFKWQPYGNIHHVEVLRHSENGKITGQLITMMEAHKRAMTGTKSATNRGIQREDVVNQQSEGDKDYVLALHKRSTVSLAVGGARRYYVVKALGSMAQNPQPRITLIPHNISDSKDDLISDSISNLIQKHELKLHSINCIGKLID

SEQ ID NO: 8515 - protein, 1044 aa, unidentified
  REGION 1..1044: note = Description of Unknown: Cas Enzyme sequence
MTKKIKPNLSPYILSLDLGVRSVGWAIIDTEKGNPVALRDAGSRIFEAGVEGDIEQGKDSSRAAVRREKRAIRRLQFRRSRRLQKLFLLLRDVGLLPSGGSATPEQRHDLLLKLDQELRMEHCADDDRVQLHLLPYILRSKGIDQKLKVYELGRALYHLAQRRGYLSNRKADREDDDERGKVATGISELSQLMNGRTLGQYFATLDPEEIRIRQRWTSRQMYRDEFEKIVTEQAKHHNFLDDELKRKMYLAIFFQRPLRSQKHLIGRCSLEHDKKRCNIAHLLAQEFRLLQTVNNLIIHFPDHASRPLDDEERDRLIETLKNTSVLKFSDMRKILELPRGSKFNLEFEGNRLIPGNKTRAAMLEVFGVRWDEFSESMKDQIVYEVLNYQKPHALERRGKERWELNSKAAHRLSEARLEQGYANHSKQALRKLVKTMRTGVSYSTARKELYPESFQSEKPRERLRPVANALPDLRNPAVMRTLTELRKVVNALLGKHGKPELIRIELTRDLKRSKKERKSYSERNYQNQKRREKAKETILKEFSGYNPRRSDIEKVLLAEECNWECPYTGRRIEMRTLLGPEPQFDVEHIFPRKYLDDSFLNKTLCYHEENRNVKRGRTPYEAYADESNGWNEIIGRVKKFQGTAMREKVKRFLMKEISDDFVERQLNDTRYISSQAADYLAELYGGRTEESGKMRIHTIPGGRITAFLRNEWYLNSILGDGGQKSRDDHRHHAIDAIVVGLTDWNAVRKLEQAAEKASDLGSNKMFVSVKDPFPGFLDQTRDCIESIFVSHRMDRKLNGLLHADTLYSKPKKDRNGEEVVHIRKRLEQLSISEIKSAKIVDPVIRELVTKKYEQLGGGNPAKTFEDRANHPFLLAKDGRNIPIHKVRIQARANPWKIGTKSQTRYVAAKAGSNHHTVIVAQLDEHGNEVKWIDHCIYRFDASQRKVHGLPVVQRDWEDGCCFKFSLAPKDSLIMADEEGNEQLYVVSSISQGDYTLRLHNDARTMKEIKKLKKNVRITNIDKFRKRHARKVSVGPLGDLFPAND

SEQ ID NO: 8516 - protein, 1005 aa, unidentified
  REGION 1..1005: note = Description of Unknown: Cas Enzyme sequence
MLLKYRLGIDVGTNSLGWAAVQLKRSDDGALVPGPLLDLGVRIFSDARHPEDKSSNAAQRRKPRAMRRNRDRRLGRRSLMLREITRTGLFPAAPTEREALEQLDPWILRARALDEPLSAFEVGRALFHLQQRRGFKSNRKTDGGEDGTMFDAISAAREKMKAEGARTLGELFGRPRLEQARLNSSAAKGQGKPMPQARVKARIVGAKMAYDYYPDRAMILDEFDQIWAAQALHHPAIMTDNARHRIRKVVSFQRPLKAQPVGKCTFIPDELRVPRAMPSFQYFRILQEVNNLLVGAIGERARPLTEAERSKLLRFLLNPSSKTARRSFKQIRKQLNLPKSQRFNLETPKRDYLVGDTTAAVMMQDNVWGKDWLSLDRQSQDSLVSKLLDAETPDNFIPWAVEKFEIDKDKARAVFDARLQDAHGKLSLKAIGEITPMMEKGAAYDEAAKAAFGDHRPMGDGVIYEDELPYYGEVLSRHTAFEKDDPQTDEERYGRVANPTVHVALNELGKVINDLIKRWGAPEQVVLELARDLPLSDRGLRELKKLQTRNEKANDERRQMLETLKQADTYENRLRLRLFEEAIEAFGGVAICAFSGSAISKTDLFSSDIEIEHILPLSRTLDDSIANKVLATREANRIKRNKTPFEAFGDATGKFAWDEIGQRAAQLPPSKAWRFAPDAMDRWEARGGDFLARQLNDTRYIARLGKTYVEALYGGAGVAGQRRQVWVVPGQLTADLRHFAGFNSLVGLTGGNRKDRTDHRHHAVDALVVASTDQAMVKCASDLAKAEDRVAHYEIMQAMAEPLKRHRASAEDRLAKLTVSHKPDHGFQDAMHKDTAFGITDRAAGKGQKLLVTRKPLDSLKSAKEFEAIVDENIRARLIDVTQGLSGKGFVTALVQAGEEMSPPVRRVRIETPMAETSFVEIRHGQNGEHTKAYKGNSNYCYDIFEGLNGKWAGEVVTTFEAYQRAQGDKDWWRKLVTGDGRPIIMRIRKGDMLEIDGPEGMRRK

SEQ ID NO: 8517 - protein, 1505 aa, unidentified
  REGION 1..1505: note = Description of Unknown: Cas Enzyme sequence
MKKILGIDLGTNSIGWAITEREVKVSNQKTEIITPLQKEERMMAGVIVFPEGVKNEKGSEKSIAAERTAYRGARRLKFRRKLRKYETLKVLIQNNMCPLLLEELEQWRGSGFRTYPHSEHFLNWLKTSEDENINPYYFRDKYSRVKHNWEDNQRAAYELGRAFYHLAQRRGFKSNRKDQTDEGTLERLRDDIELILDESRDTEELKTRINALFETFDIKGKSNKDLSETEKKIKRIESKVLKTFKINKELEPLKNNIQAIMQDRDNLGKVEQGIEELNDAILASGAETLGQYYWILYQKDRSDAKNKIRNHYTHREKHYEKEFRKIAEVQELPKELENALYRAIFFQRPLKSQKGLIGKCTLEPNKTRCPISRPEFEEFRMYQLLSSIRIAPNSDEFRWRKLTNQEREILIPRFYLKRRHFKFEDLINTLSKYHSKVSGKTVKIAHRKSDEASHADYFINYYPDQNVSGNPVSAELASIMGSDWKSKKYEYQVLKYNVEKHHRVGYEEIWHVLFTFEDEEHLYRYAREKLGLTKKEATRFSRIILPAGYANLSLKAIRNILPYLSRGLVYSHAVFMANMHKIIKPELCLNAQIRKDIEEAIGIEIENHTKMTRALQAANGMIKESIEEKSSYSETASESLKNDLKHHLKNKFGDKSWSKLEDKELFFENIWEKVKKELEKAPVHRKFLKIPRLDEQIIYFLKSNDFLSSTEAIKYLYHPSDLQKFKSIEQKIETGNGIETIHLLPEPKNDSIKNPVLMRAMYQLRHLINTLLIKGVIDNTTRIQIEMAREVNDSNRRAAIRKWQNKLQKENQFIEEVLSELFREAGKSGQVMPDDIVKARLWSEQVRDNNGNAPDLFVNKDLKTRYKLWKEQKGRCLYTGENISITELFDGTSFDIEHTLPRSRSWDNSLKNKSISSARFNRDIKKNQTPYELMQTGQLDRHDLKARLRPWKERIEKLRKEIGKIVTGGIMDIEIKNRMIQKRHLLQMELEYWQGKYDRFFIKEINESFKNSQITDTGLITRFAREYLGCVFQRNGHPNVRVVNGESVAEFRKAWGLQSYFEKKLRSNHIHHAIDAMVIASISREKYDAFAQIWREEEEYRTKSEKLREMMEQTKPWPTFTRDIRGFDIQLPVVHRSKDKLPIQNRKKLRKRGKIQYVEKETLPSYLKEKQEGKDYYIIENEGKRIFKIPIFQQGDTVRGSLHQESFYGAIAHDKNGKVIRDKNEKIQAQLVIRKALDTLKDGEISKIVDPRIREIVRKDRLKEKNIRKEIENWKKKKKPELSEEMEAEINSKIASLEEEAKLLYHIPPRAGKNKFTPIRKVRVYAHINKDLPDFKKHAAPFLSKKEYKQKLHVANDENYYMVIYQHPENRKKRSYELIRNIDAGNYFKLSNKAERKQGILELYPRRHIESDWPVLKVKGKDLIIKKGMKLMLLKSHDESPQMEKPEWIIERLYVITGFDDNGVKMMHHQEARPRTDVLKYMNNVISTEKANQALNYLERKGASI

SEQ ID NO: 8518 - protein, 1085 aa, unidentified
  REGION 1..1085: note = Description of Unknown: Cas Enzyme sequence
MSYRLGIDLGTASVGLSCITLNADTQPTNIAYHCAHIFPEPVEPATAGGIGSTKASGRGMARRTRRLIDRRVSRLRNIASVCELLAINPQNIPADNGQSLHEARSQATTQPISLEDLARIFFRMAKRRGYAGGFQVKKEGDEGQVEGGISQLKQLMKEAKCDWMGQYLLHRFNNGKTLKLKEAKPNGLYVSREMVEAEFEQIWKIQSAAHPVLNKHHNDRPLKEIFHNAIFYQRPLKSVAAMVGQCPLEPNLPRAPMSQPAAQAFRIEKQIADLRWGMGRRAQKLSSEQQSVIRELLATKDKATFLQIYKALEKAGHPKPEHRGLNFDRPSRPELKGNSTLKAMDKLGLAEQWQALDEGTQISVINLLADLGSPQEVDRDDWPTRFRGKNGTPRKFKPKVIDFINAMVASGKFERLSKMGFDGGRSAYSIKALKRLTEKMREGMDEYEATAALYPPPVKQAERLTHLSPHKPTGNIVVDVALRQMRFAVYNAIDAMGGEPPKEVVIELSRDMGLGLKRRGEIEKGMDRNQRERKKAKEDLEKNGHSAISTNIFRWRLWQEQDTNCPYCERKISLGAAVDGHETNLEHIIPRTLTRVGRQQDHIMLSHRSCNDEKGNRTPYQAWGHDANKWKIIEERAKALEKKRRFAKARFLTLQDWKPEIINSDIIDDFTNRQYHETSWISKLAAQWMRTVCSDVAVSRGAMTAHLRRIWGLNTVIPKIRFEDGLPVFDTEKNLIDKTTFEQYKPYWEGHNNNHSGVQRTDQMIEKRIDHRHHVIDALVIALTSRSLYQKMAKNYKTLSERAQIDKHVKLKLSVNPPIKNVRAQALEMVRNYHIVHKPDRHVGGSLFKGTAYGVTWVENDKDPNADPKQQLTLRQNLVTLADDKSKPDAVRKKLEKIASLDTRRIVLNAFDKHIAAGKTAKEALNNIQHPQYRTVIRQVKMLRDSASTAWKIEFNSRHSTPDKPHYKYLQYDGYAYLELTETPGEKPEPRLVTQPEALQKKGQPIPPNNRRFFKGDTVEDTKDGKIFIVKSFREQGLQIFLIPITEAREIADMDATKRLHKLSQKEQGRRVVGGASIARLRILS

SEQ ID NO: 8519 - protein, 1141 aa, unidentified
  REGION 1..1141: note = Description of Unknown: Cas Enzyme sequence
MSKVLGLDVGTNSIGWALIDDTKNEILGVGSRIFPEGVNKLGEGESEISKNASRTDARGTRRQFFRRRLRKRYLLRELAKNNLCPIDYSLVKIWTNNEVFNDSDFKDWIKLNPYEHRAKATNEKISLQELGRVFYHMIQRRGFQSNSRSAGAENNEKSVIFKGDEKIGKIGIAETQENIKTAKTLGSYLNQIQPKEHEPFKQGLERIRNRYTTRQMYIEEFEKIWEHQKQYHSELTNELKTLLGGRKKDGYAEDGILFHQRPLRSQKHLVGSCTFEPKKTKCPISAIAFEQFRVYQWVNTVECNGQKLSKEDNEILTQQLFSKEKLDFKTLREAIKKHDSTFQFNYKDDDKIIGTHTISQLSNKKFFGSNWFDFSEKEQEDIWHILYFFEDRDKLKEYAIKNWSFDEDKAEKISKFNLKDGYANLSRKAIKNILPFLKLGFSYDIAVVLGGIKNAFGNDWDKLEESRRGLIIDNIFDIVRQGEKGGFIEGLKEILQTEYNLSEKQLGKLYHHSASIESTEILDNLPLGKEADKEIQSIRNPVVITALFELRKLVNGIIEDYGKPDEIKVEMARDLKISKTKRNEVRRTQQLNEAYNDYVVGRLREHNQIVSHDNILKYKLWEECDKKCPYTGSTISLEQLFSGAVQIEHIIPWSRSMNDSFMNKTLCFADENRAKGDLTPYEFYSKQGEQKWEEVKTRALNCFKDKIIEFDRKYKIKAYNKFKQFVRKDLPEDFISRQLNDTRYISKEAKNYLSKICKNVQVSPGQMTANIRQKWGLNSILNDENMKSRDDHRHHAVDALVMACSTRNHLQELSKWNRYDRDYELKKFPLPWNTFREDVDKAINQILVSHKKTDNLLTIKTTKVKKGKNEYKNIGIAARGQLHLDTIYGKRKDVYTGKEAYHVRKPVSSLTLAEIPKIVDREIHNLIEKRIIALGLKINKKDRKPIVKTAGEKKLFEQLFIEPLYLPNKNGEPVPIKKIRIKKNFGNAEPLNNEQTQWVDLGKNHHVLIYKDEEGNLKEDVVTFWTAVKRKKQNQPVVQLPHDGKEIVTTLQINDIFILGLNGNDIDWYNPDKTLLVNHLYRIQKLSSKFYEFRLVTESKIDKNKMPYYCRIQSFGKGKTGWQTFNPIKVKITPTGTIQRK

SEQ ID NO: 8520 - protein, 1139 aa, unidentified
  REGION 1..1139: note = Description of Unknown: Cas Enzyme sequence
MAVKQSSSETLVFGLDIGIASVGWAVLGEKRIIDLGVRCFDKAETAREGESLNLSRRMARLMRRRLRRRAWRLTKLTRLLKRQGLIADVKVLKQPPAKGFKTPNLWQLRVDALDRALNNEEWARVLYHLCKHRGFHWINKAEAKAADSDKEGGKVKQGLAGTKRLMQEKNYRTAAEMVLAEFPEAQRNKRGEYSKALSRELLCDELKELFRRQRAFGNPHADEQLELTIVGNGDKKSGIFWAQKPALSGEALLKMLGHCTFEKNEYRAPKASFTAERHVLLTRINNLRIVENGSIRKLNDEERRIALWQPYQQAGDFTYKQLGSALVKAGHLAKDSFKFAGLAYPSEAQEAGKAKNPESAAMVKVPAWQELRKTLTGAGLESEWREMADAALDGQPELLDQIAWVLSVYKEDDEVERELGTLALPDRVKMIDALLLVRFDKFSNLSLAALRKIVPEMEKGLRYDEACIEAGYHHSLPDLDDDNTRTKYLPPFYVGRDKDGRLKFNEDMDIPRNPVVLRALNQSRKVVNALIRKHGSPHAVHIEMARDLSKPFDERRRISGEQEKYRTRNENDKVTFAEHFNITGPPKGREFEKWQLYREQQGKCVYSLNPIDLNRLLEKGYVEVDHALPYSRSYDDSKNNRVLVFTAENRNKGNQTPYEYLDGKKESERWRRFEMFVKTNKAYRQAKRNRLLKKDFGEEESKGFRERNLNDTRYICRFFKNYVEQYLQLHEESDVKRCVVLSGQLTSFLRFRWGIVKVRSDSDRHHALDAAVVAACGHGLVKRLSDYSRRRELRQARAGIEKVDTKTGEIINHFPAPWEHFRDELLARLNMDDPAALRAAVERLGTYPAKALDTLHPLFVSRAPQRRNSGAAHKETIYGQPEVLKEKGSVTQKVPVTSLKPADVDKLIDPQRNWKLYSYLRTWLEGKDAREKQAKAIEAGAGRGKDKRTLTAAEKAEVERLRALPRKPDKQGNPTGPIVRSVTMVIDKLSGIPVRGGIAKNDTMLRVDVFRHKTNKKFHIVPVYVHHAVTGLPNRAIVAFKDEDEWTEMDENFDFCFSLHSNDLTRATLKKESHIGYYASCDRSTGCISLWVHDRNKKMGKEGLIRSIGVKTALSVEKFNVDVLGNVYPAPPEQRRGLA

SEQ ID NO: 8521 - protein, 1530 aa, unidentified
  REGION 1..1530: note = Description of Unknown: Cas Enzyme sequence
MKKILGLDIGTNSIGGALIELDTENYGKNGNILWLGSRIVPVDGDALQKFENGGQVVTKAANRRIKRGSRRLKHRYKLRRTRLIETLKILDWVPDNFPTDFKKDKSNGIEFKMKDYLPFSENIIKEASKALNIKPNKKGEINVAEDWVVYYLRKKALFEKIDLCELARILYMLNQRRGFKSSRKDLQDETTILPYDEFIDLTNKGIYEENGKTFETKFVEVTKVKSVKLFEKGESSTDKDTYEITTESSKIKSWKEKRHKKPEWEGQEFRFLVTQKSDKKKKEIVQKKKPEIPSNKDWNLAMISLDNEIEASGKQVGEFFFDKLIENKNYLIRQQVVKRERYQKELRAIWTKQCEFHPELTDSNKLAEIARKLYPSQAEQKSAKWKEIMNNTLFDLVSKDIIYYQRDLKSQKHLIDRCHYEKKTYTYNDKEGKEITVTDGYKVAPKSCPEFQEFRIWQDIHNIRVLQKEDEKTGKVDINVFPEGLSNEIKAELFNYFDTHEEVKQNQLLKKIDKTFSEKTHRINLFSNRKTLKGNETKALFKKVFNKYSFNGEHLLNDKDKFQLLWHILYSITGKEHEKGITRALTNPKHDFNLPEEVVVQFAEKTKEFPSQYAAYSRKAIKKLLPLMRCGEFWNADNVIPHVSKFLEWKETEAFKKLGSVIQPQLQPLEALEDFEGLQTSTACYVVYGRHSERESDTKYTNWDDKAFDISKLIPTNSLRNPIVEQVVRETMQVAKEVWKQYGRPDEIHIEMGRDLKNTVDERKHIAENQGKNYIEKQRVKRLLKELNEGNPESPLDIEKFRLWKHNGGWEADEKFNKLFDSKNNFVRGADIEKYRLWAEQHHHSPYTGKQIPLNKLFTSDYEKEHVIPRSKLKNDSMANLVICEAAVNDFKGNRLAQIMINEDGGREHTHKGVKFSLLSIEDYRNNCKFFNKAKRKNLTTEEVPEGFIERQINDTRHITRRLSDLLYPVTKDQEGVIFTIGHITHELKQKWGITKIWKELIKYRFERLQKILGHDLIIEDGNNFHFNKPDDKVDLKRIDHRHHAMDALVIAATTRRHIKYLNTLNNFQGKKEWEKQMLAKKDIRDFIAPWPNFTKDAKDKLCEVIISHKYNNRVLRKPHNRYWKWEKQPDGNWKKILKKQQENDLWRTVKLAMFNENPQGSIFIKEPKPVKPIDAIKIQIERAKGIKDDLGKPRDYIYDKHSRKQIIEVVKEFNSDLNAIKKHLKKNPLMDNNGNLLEKVIVAYFIEYAAKRMTVDNTFDEKKIESLPYAKRTIERCGQKLNSNKIFAQTKSMWPLPFLLTKHLEEYNGNPKEAFVGEGLEMLYKKAGRPIKKVTKYEKKVNPLKLNCGIWETAKGGNVYFVIRENLETRKREYYTPPLFNLSPKNEQEYGIINRLLAGEPIAGEQEGWRNIILKVGDLVYVPTPEELEHPHHINEIDWNGEDKKRVFERTYIAKSFNKYQAFFAPHNVATPLEPNAKEMGANNKAEKAWDGTFLNNGTMIKEYCIPIIVDRLGNIVKVNGRSTTVRNI

SEQ ID NO: 8522 - protein, 1044 aa, unidentified
  REGION 1..1044: note = Description of Unknown: Cas Enzyme sequence
MARVFGFDIGTTSIGFAVIDHEPERNTGKILRLGVRVFPEGRDPDGTPFNQQRRQKRMVRRQLRRRRLRRRLLNEALHAVNLLPAYGSDEWPKVMAMDPYDLRKRGLSEPLGAHELGRTFYHLAQRRHFKGRDLEEDGDTTEQAADEKEATTSRELTLQTLKKEKSTLGAWLSKRGPHDRKRGLHAHRTVVQDEFEKLWTAQATHHVVLRDKLFKEQIENVIFAQRPVFWRRNTLGECPLMPGEALCPKGAWLSQQRRMLEKINNLALAGGNVRPLDEEERAAIVERLQSQVSMSWAGVRAALKSLYMSRGEPGGEISLKFNLELGGEKKLLGNAVEAKLSKIFGESWSKHQHKQAIRDAVHQRLWSADYGEIGTQRVVILPAQERDKRRAEAAQSFIDDFGVSSEQAKALRELSFPAGWEPYSIAALEAFLPPLTKGIRFGTLTNGPEFEEWRNTTFPDRDRPTGEVLDKLPSPATKEERERIAKLRNPTVVRTQNELRKVVNNLIDKYGKPDLIRVEVARDVGKSKREREEIQSAIRKQEKRRKDAAKDLESNGIAQPLRSDVEKWLLWKEGQERCPYTGDQIGFAALFGEGRYQVEHVWPRSRSFDDSFRNKTLCRQDINLEKGNRTPFEYLGHDTDKWAAIQTRMQNMITPKGGIGMSPGKVRRFLAQSMPDDFASRQLNDTGYAARQAVIFLKRLWPDVGPEAPVTVQAVTGRVTAQLRRRWKLNNVLADDGEKTRADHRHHAIDALTVACTHPGMTKQLSRYWQAKDDPRAERPLLPPPWSNIRTDAEEAVSRIVVSHRVRKKISGPLHKETTYGDTANDVVTKSGTYRQFVTRKKVESLTKSELGRQPETDGEGIRDRRVRATLQAWVAERGGDPKKAFPPYPRLGETGPEIRKVRLLTKQQLSLMAPVATGYADLGSNHHIAIYRKPEGQVVYEVVSLFEASRRLARREPVVQRSRDSGAIFVMSLSPGDAVEFPTGPKKGIWIATGVWASGQTVLETAIDANHSTTTRPSPGSLLRDGAKKIAIDPIGRIRKAND

SEQ ID NO: 8523 - protein, 1038 aa, unidentified
  REGION 1..1038: note = Description of Unknown: Cas Enzyme sequence
MLNPTTCHAPYVLGLDIGSNSLGWAVLKLENAECSGVLKTGVRIFPAGVDGSLEKGREESHAAKRRQMRLQRRQTDRRRRRQIKIYNLLSSWGLLPDASSSKERNDALTKLDTTLAQRYPRTEVPQYFLRARGLHQRLEPNELGRALYHLAQRRGFLSNRKAPTKDKDEDRSKVKSGIKQLWKEMADSDSCTLGEYLSKLNPHEHRIRDRWTHREMFLEEFETLWAAQAQHHPELLTEDRRQELFIAMFQQRPLKDQAELIGECELVPGEKRAPLWRPEAQRFRMLQGVNDLRLLDTAGFERSLTDEERSALITALDSNGDMTWPKIRKLLGIRKTTEINKQRGGEKKLTGNRTAAKLREAFLDKWDELTAEERIEAAQDAADEVEEDTLMAKAMDHWGLNGLQAEHYADIRLEAGKYLNLSLAALAKLLPRMEKGEAYMTAKRAEFEEVFRAGEAMEFLPPVLDTKGVELRNPAVLRALTEVRRVVNALIREYGKPAAIHIEMARDLKQGKSERERRWKHARQRQTQREKAIERIRQEGGPQGPSRADVERMLLAMECRFICPYTGKQFNYHSLTNGQVQVEHIVPFSRSLDDSYLNKTLCFADENKRKGNQTPWEYYGRAENPEWENIIARVRGFDSPLALQKLRRFQMKEDEVEKLLTEFSSRQLNDTRYMSKLAARYVSVLYGGTSDADRKQRIFVSPGQATAYLRRLWSLSRALSDSPEKNRGDHRQHAIDAVVVALTGPTWVKALADAAEQAQEVGRRKFASIRHPWEGFFDEVRDSVEAILVSHRPDHSIGGAFHAETNYSKQKRRDNSSVVVVRKPVEKLRAGEVESIVDKAVRERVKIAVNDAGGKIEKLALPEYRPVLKTKKGQEVPIRRVRIETRTLAASLRPMGRGMRHRLVAGGDNQHFEVFARLDKDGQVKKWDCAIVSKQDAAARVRGKEAVVRRDHGPGTRFAFSIAKNDILEIGPAAQRRFVVVKVLEGEKRVLMVPISEARRVGKDGVKPDRISINQLMSKHRCRKVTITPLGVVCPCND

SEQ ID NO: 8524 - protein, 1088 aa, unidentified
  REGION 1..1088: note = Description of Unknown: Cas Enzyme sequence
RRRVNPTTYTGFLDTSRGHHPPLGVRVFEAGLAKFGTGKEKSLNQDRRTARSTRRTYARRNARRTLLRETLVQAGFLPQDSKDQATLFKLNPYELRTRGLDEELAPHEIGRAIYHLVQRRGFKSNRKTEADKDAKGILKEMGELQQAIEESGARTLGEYLFRIGWKSGSERALRYGILRIRKRHTRRSMYVSELDLLLEKQKRFHPGLARIERTIRHAIEYQHPFEITDERREKAPSRANLHRAPQVKSCRLEVEETCCPRSDWLAQRFRILQEVANLKLREPESSVWRDLTEGERRVVLDLLSEQKELKFDSLRGKLAKQGTDPKVSFNLERGRRDSLKGNAIDAFLSTIVTKRTWRTCSQSTRHELRDALLNEEDEKCLLKAFSSYGLDDKKRARLLSFKPNVVEVGYLAYSKKALQRLVPEMENGLSEYEAITSTYGERPTAREWKALPSLVHPDLPAEFQDITNPVVRRAMTEIRKLVNAIVREHGLPAQIVVELAREMKSGKKGRDEAAKRMRSIEDGRRKAATEVRTLRGNPESRADILRWMLWVEQGRECIYSGRSIPAQHLFDGEVELDHILPHWRSLDDSQVNKVLCYRTENQAKGQQTPRQWLDRDPDRFEVQLLRTIAICVAQAEPGQVNQIRAIQKRDLSVLERAEAISRLGGPWPARLRRILRFELAEEGFARRQLNDTQNIARMTVKYLELLYPPERRRGEQAVRSTRGQLTAELRRHWGLLGRDMFSPIDTADGKGVPEKLEAATEKKLRVDHRHHAVDAVVIALSSRASLKKYQEFWKRREVRSKDGDETTANRFPPPWESFRHDVRKYLSEVNVSHRPIRRTRGSFHEDTFYGFRKAEDGAMAIYVMRKPLEKLSKRDVEGICDPIIRRLVEARLVESGWDGKESQLPRKAWERPLTMPSGVPIRRVRVELRKDTGKMVILGDHGHRHAVLGGNHHFAIYQKDGDSNGGLVGTVVPRLVVGRRVHRQGAPVVDKKPDPELIFVASFCRKDAVLAKSPKTGKETLCVIQKFSGSREPSSSCDVHLRDARDSRPATEAEKSLFKRVKSLRAWGELRIRKVQVDHLGRLVQARD

SEQ ID NO: 8525 - protein, 1136 aa, unidentified
  REGION 1..1136: note = Description of Unknown: Cas Enzyme sequence
MAKTLGLDLGTNSIGWAVIDNSSNKILGMGSRIFQEGVDNLGEGKNEMSKNASRTASRGTRRQFFRRRLRKHYLLKLLAKYNLIPIPHEEVKVWSSELFNNPKLKAWFKLNPYDLRARALNKEVSLHELSRIFYHMIQRRGFQSNSRSTGTDDGKIYEGNVKEGKVGILETQQNLHGKTLGYYLKSILPPAGLPFNYRPERIRNRYTTRKMYIDEYEAIWEKQKQYHEELTGELKALIGGRKKDGYSQDGVLFHQRPLKSQKHLLGYCSFEPKKHKCPKSAISFELFRIYQWVNTVENNGEFLSQDEKKIVINLLLSKEKATFKVIRKALNKLDSYYHFNYKDDDRIVGTHTISNLSNKKFFGPKWFNLSVKEQEDIWHALFFFEDKDKLKYYAINHWGFNEEQAEKISKFKLVDGYSNLSRKAIRNILPFLKKGYTYDLAVVLGGIKNAFGDKWDKLEENKRRLIEDNIYDIVRAGKKGGFIDDLKNFLVSEFHLTNKQLQKLYHHSASINTTTIFDKLPTDIKADREIQNIRNPIVITALFELRILVNEIIDLYGNPDEIKVELARDLKISKSSRNDIRREQKRLERENDRVKSELNLIGQIISHENIIKYKLWEECNKTCPYTGRKIEVAQLFSGEVQIEHIHPWSNSLNDSFMNKTLCFADENRAKGNKTPYEYYFNEQGEEKWEMIKKQALSCFKTKEHYPNAYNKFKHFIKTKRDDDFVSRQLNDTRYISKEAKNYLSKICENVMVAPGQMTANLRHKWGLNNILNNDDVKTREDHRHHAIDALVMTCSTVSHLQELSKWNRYQRNSSLKNFPMPWNGFFEDAEKAVNNVLVSHKKSNKLLTVRSHKTKKEGRTFKNKGVAARGQLHKETVYGKRKSPFQLEKAFFVRKPLESLTTLKHIGKIVDPVIRNLILARIDSLGGLQSDNKLPDDLFFAIDDNGNRLPQIFLPNKNGESVPVKKVRISEQIGGAEQLKENINQFVNPRNNHHVLIYIDENGNLKEEVVTFWTAIERKKQGLDVYKLPDPKKGEANPKEIVTTLQINDMFLLGLTDDQIDWNKVNYSFVKNKLYRVQKLSSKFYEFRLNSESQLNKNFSPYYIRIQGFGEGKTGWKSFNPIKVHITASGRIAKVI

SEQ ID NO: 8526 - protein, 990 aa, unidentified
  REGION 1..990: note = Description of Unknown: Cas Enzyme sequence
MSRNVLGLDIGPNSIGWALIDEEARTIIDLGVRIFPEGVDNFDSAKEKSRNEDRRIARGMRRQIARRSRRKRSLRKALIATGLFPADSAEQNTLYERNPYELRAKALDEQLTPHELGRVFLHLNQRRGFLSNRKKDRGDSEIKGMLAEISDLEQTIRDSGAMTLGQYLFAKCDSFDHANRVENDHVRNRHTRRDMLDEEFQRVWDAQAKHHPHLLTEKLRYGIVGKIDYPRKPKRKPAGMSELEAFGIHGMIFFQRKMYWPKSVVGLCELEPKEKRCPRADRHAQKFRLLQEINNIRYIDPDSNDECCLGEQQRVLLLDYLSTREKATFDQIRKTLGVLESVKFNLERGKRPSLKGMTVDWLMAKAVGKDWHKRPEDEKDAIVRLLLDNEREDDVLTDRLITEFGFEPHQADAALNVDFPAGYVSLSLKAIDNLLPHLERGLVYQSVSDPEQSALHAAGYLRRDELQRRLFDQLPDPTRVSLRDCRIGDIPNPVVKRALVELRKVINSIIREYGKPDEVHVEMARSLRMGPKARKEYNQRNREREADRSRAADEIRGYRQKYPESGVRVNRDSILRLLLWERQQSECVYCQQPISQQQLFGGDVDVDHILPYSRCLDDSQSNKVVAHHRCNQDKGQRTPYEWLADSDPGRYAKVCQHASSLMHKGLMPYGKYRRFLQKELDLDNFIARQLTDTAYISSATAEYLRCLFERDHHVLGLKGQHTAELRRQWGLNNILSDLPDSPAWQGQSLLRPGEKNRADHRHHAIDAIVAALTNRSCLQQLSKSTQEIAWTDSESRETIHWRKYSGNRIESPWEDFRNDVAKAVSRINVSHRPERKVAGALHEETLYGATPELGVFVVRKPLDNLSPNEVPLIRDAGVRRTIEARLAEHGIEIGRGKKVDSKKLKQALCDASNPVLLPPSRKRLKKDPHARGIPIRKVRVLRKEKTIQPIRRGTAEQAYVKPGATHHLCLFEWQDTKGKTKRDAVFVTQL

SEQ ID NO: 8527 - protein, 930 aa, unidentified
  REGION 1..930: note = Description of Unknown: Cas Enzyme sequence
MHRYRLGLDLGTNSLGWCAVALDEAGEPSGVLDAGVRILSPNEEAGRDPQSKESLAADRRDARSARRRRDRFLRRQKRLMELLVEAGLMPAERGARKALEKLDPYWLRAAALDRRLEPSELGRAIFHLNQRRGFKSNRIADTDDTEKSAMKDGMRALEQALEESGARTLGELLAWRHRRDKFGKRLSDGEGYAKPGPVRFRPETKGAKNLYDFYPTRAMIEAELDRIWAAQARHHPALTGDLLAKLKRILIEQRPLKKPIVGRCTLRPEAGEVEQFGLMIDQGERVPKAHPLFQRFRILQDVAHLRVSRPGHPQRDLTLQERDIIVAHLMSKSGSTIAFEKLRKAAKLADDSRFGLELSGRGGLPPDQTAAKLGMKKLFGKQWRSLPRARQIEVVERLLAVQDPAELHAWLVQEFKLDTATAEAVSEARLPQGHGSFGRSVLADLVQVMETRSREDGLDPATGEIYRRPLTYDEAVAELGLHHSDQRPDGTVARLPYYGEALVRHVVSKPDAPEGSQERIGRVPNPTVHIGLNQLRKVVNALIDAYGPPAEISIELARELKLNKKRKDEIQRENRENEKKNQDRRERLAELGCSDTHDARLRLRLFDELPADERVCVFSGTPLNVERLFDGSVEIEHVLPYSKTLDDGFMNKVLSTREANRRKGNRSPAEAWSDAELQTIVERAERLFSKKAWRFQPDAMERFETQGGFQARHLTDTQHMARLARTYLELVSHQVWGPPGRLTAMLRAKWGLNGLLPDHNYANVGQPKNRKDHRHHAIDAFVVACTDRGLLNRMARASGQAEELDLDRVFPRGEFPEPYAGFRDDLAARLETLIVSHKPDHGLPPGAQENVHVTSGQLHDETAYGPADDEIGGKRYNLVARKAIAALNERQIDRVRDPELRARLQQVAQEAMAGGTKLNEALAEFGKREG

SEQ ID NO: 8528 - protein, 943 aa, unidentified
  REGION 1..943: note = Description of Unknown: Cas Enzyme sequence
RCGFKSNRKTDQADGKESGKVHDATRRTLAKLKEEDARTLGELFGRPRLETFQRNQSAAKGNRAAQPKARVRKSGEGAKRQYDYYPTRALILNEFDKIWEVQKKYHPRALSDAAFERLRNTIEWQYPLKSPPVGKCTLIPEEPRAAKALPSSQRARIFQEVNALKVAPSGRAKTGISKQQRDLIAEKLLRPTSKTAKVSFDQIRRLPKLGIHDPFNTESKKRSYLKGDETAAQMMQKERWGPSWFELDLATQDEIVGKLINEEDEDTLVAYLMQKHGLDKERALQVADCPLVSGYGNLSKLALNKILPPLEVGVTVYSDAVEQAGLGSHSQFGTGEIFEEALPYYGRILERSVAFGSGEPKHPEEKRYGKLANPTVHVALNQIRAVINDLLKRFGPPSEIVIELARDLPLSSKGKNDLEKRQKKNQKANEARRQRLAAEFKQRDNYENRMRLRLYEEIEALGKRCVYTGEQISNNILFSDQVEIEHILPFSQTFDDSFSNKVLSLRSANRDKGNKTPYVAFGKSPDGYDWEEISKRAAELPASKRWRFAPDAMERYEQDGGFLARQLTDTQYISRLAKGYLEAIYGGQGYKGAKNNVWVIPGRLTSDLRWQWGLDSVLRGHNEEASEAQKKNRNDHRHHAIDAIVVACTDRGILKKAADQAKQNEDIFSERLLAGIDKPWDSFRTDVETAVRAIIVSHKPDHGIEAAMHNDTAYGIPKGIDGEPNKKGVRTVVTRKPLDSDSFKKSDDLEKIRDEIIRHELKEATYGLSGADFKDALMAAGRAMKPPVYKVRIEEKLNVIPIKDAAGKIYKAYKGDGNYCYDIWLNDKGKWAGEVISTYQAYQLARENKKWWQNLVGSDGQKLLMRLRKNDLLQIDHEAQRRIVRIYKFSTGAILMTDHFEANASARIGKKALPAIQMAPSTLQKVNAKRVTVSPSGVIKIYQ

SEQ ID NO: 8529 - protein, 1082 aa, unidentified
  REGION 1..1082: note = Description of Unknown: Cas Enzyme sequence
MFRFSFDLGTNSIGWAVYDLDEQTGKPIKLTRLGARIFSDGRDPQNKESNAKGRREPRSHRRQHDRRLKRRARLLADLEANGLMPPAGPERDALFLENPYELRARAVREPATLHQLGRAIWHISKHRGFQSNRRADKDADESGKIATGSRALEAMLDDQGHPSYGAFLWSRLENGEGARIRLQGAGAKASYDFYPTRAVLQAEFDKIWRVQEQYHSDLTEGLRQRICDTVFHQRPLKPVVPGRCTFFPDEPRLAKWHPLAQEFLILSELANLRKIDEAGEPVLDLTSRNLIARTLLDGQSITWAGLRKTLNLGGGADFNLEKGGLKRLAHNEVSTRMIGSKKKPGPLADQWHDFDNDKKVAILEQIDQIDDPDELMETLQSNFDFSLETAMVLEKIRLPDGHLRFCKKATRAIVAEMRQDNITYDEAVKRAPDLGGAGLDHSDFRPDVAVDVLPPYNRLDVLQRMIGNGTNNPDDPDERRFGKITNPTVHIALGQFHRVMNLLIHEFGKPAEVVLETARDLRKSTDELKNINSEIKKNEARNNRWRQELEEAGLLLPGQRVGDHFLRMRLWEEMGRTATDRCCPYTGHQISLTQLHSNAVEIDHILPQADTFDNSPANKTVAFREANQRKGNLSPAEAALRYPEFFDQEAMIARTRHLPNNKNWRFRPDAMEKWEAQKSFEDRQLHATGYIAKVARAYAEALFPKRDADGERRNHVWVLTGKMTALLRQRWALNLGDHNRKDRNDHRHHAIDAAVIGVIDRTMIKNLQDLARRHGEEAVIRFLPAPPEPFDGFRDAVHKAIRDVRVSHRAQHGSANPADPSQTSGRLHADSAYGQIRDVPENQADLTIGNVVIRKKVTDLSAKEIGQVRDFKLRTELQICTGPAMDKALSKKEQIKQLANSLAKWSDDTGHRRLRLIKPLALARPVSNKSGKPCKWYAPGENHCVDIVELPDGKWAYHAIDIWQANSGGGQNWRDVFPDAKFVMRLHKNDTIQLFDWDDKENAIIPGSNQIKLVKGIWASPTNRYISLVDINETGKLEDRSKDIDDHFEWDRPVYDKLRLRRARRVRIDELGRVHSIPHGKL

SEQ ID NO: 8530 - protein, 1557 aa, unidentified
  REGION 1..1557: note = Description of Unknown: Cas Enzyme sequence
MKYFKIKNFFKLKFVLPLGKHKKTNTMKKILGLDLGTNSIGWALINHSFEKQKGEILELGSRIIPMGADKLGDFEKGNPISATAERTSFRSTRTLWARDIQRRERLHRVLNIMGFLPQHYAEEIDFEHRLGQFIKDKEPKIAYRKNSDGKFEFIFQESFKKMVDDFRKTQPQLFYIKPNGEETKIPYDWTIYYLRKIALSQKIEKEELAWILLNFNQKRGYYQLRGEDEEIEESKNKSFEILKVAEVVDSGDKIRGTDTILYDVFFENGWKYDRQTTKPEDWIGKTKEFIVTTTTLSSGETKLSFKAVDSEQDWIAIKQKTEQDISNSDKTVGEYIYDTLLQQPNQKIRGKLIRTIERKFYKKELSKILEKQKEFHPELEDRELYNSCLIELYEYNDAHRNSISNRDFTYLFVDDIIFYQRPLKSKKSLISNCSLEFRTFKVDDVERREGIKCIAKSSPIYQEFRLLQWMKNLKIFKIDDKQDIDITDELLPTITDREKLYEWLNDKTEIDQKAFLKYSNFKLDERIKEEIGLEQFRIFKKDKEQGLHTYYRWNYVADKKYPLNETRGEIIKRLTKLGISSDFLNRKNETHLWHILYSVEDKNEIIRALNKFANKHNLPETFVDIFKKYPRIDKEYGAYSEKAIKKLLTLMRFGKWWDFSAIDENTKDRIDKIQTGEYDEKIKNRVREKAINLTENNHFQDLPLWLASYIIYNRHSEASEIKYWRTADDIELLKQHSLRNPIVEQVINETLQTIRDIWNHYGEGKENFFDEIHVELGREMKNPADKRRKITERVTENENTNIRIKAILTELLNEGDNNVRPYSPMQQEILKIYEEGVYHNENRADELNEIDKIRKKSQPSSSDIKRYKLWLEQGYKSPYTGEIIPLSKLFTPAYEIEHIIPQSRFFDDSLSNKVICESEVNSLKDNQLAFEFIKNNKELTIELSHGKFVKLLHPDAYEENVKRYFAKNKPKMRKLLLEDIPDSFIERQMNDTRYISKVVKMLLSNIVREENEEEGTAKNVVVSNGGITNTLKQDWGLNDVWNTLITPRFERLNQMAGYEKYGSWENKEGKQVFQINTIEPELLKLNKKRIDHRHHAMDALVVACSSRNHINYLNNAAAAKNKQSERFDLRAKLRRIENFTDKDGKQRTAAKEFLKPWDTFTQDAKKELNHTVVSFKKNNRVINKTVNYYQKWEKQSDGSMKKVFVKQSKGDSWAIRKPLHKDTVSGLVNIRYKKAVSLSTALDNVENIVNKSLRKKIEQLQKQGLDKKKITKFFKDLNNEWQGESISKIDIYCFTNDNENTRLAASRVKLDDSFNEKRIESITDSGIQKILLAHLENYKGQTDEKGKPIPPEKLAFSPEGIEEMNNNLTQLNGGKAHKPIYKVRTFETFGNKFNVGTEGNKRSKFVEAAKGTNLFFAIYIDDEGIRSYETIPLNIVIERQKQGLPSCPELNEKGHRLLFDLSPNDLVYVPSLEEQDNPNSVDFKNLNEEQVKKIYKLVSSSNTQAFFIQSAVANSIVNKYEFSALNKMERDINEVMIKSVCWKLEVNRLGQIKNVFR

SEQ ID NO: 8531 - protein, 1315 aa, unidentified
  REGION 1..1315: note = Description of Unknown: Cas Enzyme sequence
MTKILGLDLGTNSIGWAVVEKERDHEFQLISKGVRVFQEGVKIEKGQESSKAAERTGFRSARRLKYRRKLRKIETLKVLSEYGYCPRLTKEELDLWRYKRIYPQNISFRNWWLTDEDAEKHPYFYRYLAITQQLDINRETDKHKLGRAFYHMVQRRGFLSNRLDSTPENETGKVKSRIKELQQKKGDRTLGQYFYEDCYLKGEKVRDQYTSREDDYLDEFKRICEFQKIPEEIQNKLHKAIFYQRPLKSQKGLIGKCVFEPTKPRCAVSRPEFEEYRMLCFINNIKIKTPDDEKLRPLNTEERQKIIPQFFRKSKDHFEFEDLAKQLAPKKQYKYYRDNNKNPDDYLLNYSMKTTVSGCPVSARLKDLFGDNFMDIKLPYKREKDGKESVIDIHDVWHVLFSYDSDEKLKEFATKRLLLTEDQVSDFLKIRLKKDYASLSLKAINKILPFLRAGLLYSHAVFLANMEEAIPDVIWKKEENRTIIKEEIEKIIANHQDQKQICEIVNGIIKNSHKDESAWSERASELFKKDLFNKIKVYFGERTYNSFTEEKKNQIETDAFELLKKQMKKKGGRGEFISIQRIEEKVKSFLTDNFEVEGKSLKKIYHPSAIDVYKPPIRKDDGKLFLGSPMVSSIRNPMAMRALHQLRKVVNELIKNDVINSETRIHIEMARGLMNSNERKAYQNWQRDRENQRKAYAQKIKEHFSSDKEPSETDILKYQLWEEQNHKCIYTGREIALNKFLGSNPSFDIEHTIPRSISLDNSQENKTLCENEFNRKIKRNQIPYELANHSEILARIEHWKEKYKELDKQIGIQVRRAKNAADKTQKDSAIQARHKLNFERDYWLNKHRRFTMKDVPEGFKNSQLVDTGIITKYSRLYLNTLFDKVYTVKGSTVADFRKMWGLQDEYKKKARVNHIHHCIDAITIACITKEAYENLAKAYHKWEEVDRMKMSDMPKVNPPWSSFVPDLKEIEKEVLISHSTPDVLPKQTKKKLREKGRIVKNKKGNTIYQQGDTVRGSLHQQTFYGAIEKTELKKNGESEKVIKYVVRKPLDSLDDSSIKNIVDERIREIVSNAKKQEKEIQKQIENLLKQRRNAEENEKAEIDANVAELIHQIAELYCLPNKNGDSVLIKKVRIYQSFVKNPLHIKQQRDKSKKLPKPHKEHFHVVNDSNYAMAIYEGKDAKKKIKRDFQLLNNLEASEFFKYSVQKDLKEQGLNHSHNLVPDKKVVGKMELPFKAVLKIGTMVILWENSPEEVWDLTNTEINKRIYKVVGLSNQRIKRPSGKIDEYATIVMRHHAEAKPSTELKVMDGVFKVDE

SEQ ID NO: 8532 - protein, 967 aa, unidentified
  REGION 1..967: note = Description of Unknown: Cas Enzyme sequence
MNILSIDCGGMATGYFGRDTKTNKIFGEVIKNRNQFIKDKTVTEIRRQARSQRRSCSRKKDRNLKLLKLFMLLGWIDNFNVLEKWKERNPLHLRLKGLNEFLTIDELSQVIYNLAQRRGYYGDINELETERVLLTQEEQKNYIIDHISEIEKNKSTPIEYLNSLFKNRQRCKGRVFLHIQYEREFDKLWKKQKQFHKDLQYIDSVLWSNIIKNICHKNNSLKTKKLGLKFLIWDYIISYRKSSKSYRHLIKDCSIFPNKKTTLKCFEEFQEYRILDKIKNIKKIENDEKIALTTQEITLLYQLFNNNSVITITDVKKMLGCKQISEKGKMFGNVTRINMLSLFKDWDSFKQQKKDFIINLIYNEKGDKKCLKILELSLELEQTLKKVYLNLDKGSCNFSKKALSTIINPSLKEGKMLYDILLEFNANKNLKINSLPPSIKNKLSILDHVVKRHFINFNKNPDIVYLEVPKESNDPFVKNKIEIENKKREKINSNIKNILIDSNIEPISSNVMKYKLWEECNRICPYTGKSISFQELFVYKQFEVEHILTNFSNSFDNLTICDRDFNILKGNRTPYEMYKEGLIDKNQYDLILKRVLLFTSINGSKTNQKYKNFIDNITVSELRNNFDLFYNRFMADTSYTAKIYKQYLQQKYNFNVKTVKPAVTLQLRNKLNLNLLMNDGFNNTIKPYIDRNQVLFEHFNKINPKQKNRYDNRHHLADAISISFISDFNALVKENEKEDIKEILWKSWRLDLKDLLNHCIVYNKIKHRDIEKKKNNNYAIRGELHASILRSPKNYNLNGELNLDKILKIKQDIYNRPVLAQNSENIFCVVYEDGDKKMINLQNVLHSKLKKDKIIVETDDKKVREVFKKNNYYLLDSEEFRFSEMSLDEVNNLPDFIKFENLYRLFKITNGTGSFVHHTMSITDFKYKENDKNKTAILHKSNRNLSNIFGVKISLKFGFSAFKIIKS

SEQ ID NO: 8533 - protein, 1082 aa, unidentified
  REGION 1..1082: note = Description of Unknown: Cas Enzyme sequence
MSPALEAPLKYVLGLDLGSASLGWAMIALNPADEPTSLIRAGVRIFEPGVDGTALDIEQGKDQSKAVERRTARLHRRQLRRRAARQRELFQELQKAGLLPTNAAGTGASSEQRHELLNDLDRALTRKFFKPDDDSFAQKPLYFLRKLALDQPLEPFELGRVLFHLSQRRGFKSNRKETKKSAKENEDLGQVKADIHALELAIQEAGARTIGEYFAGLDPHTEKVRRRWTARKMFEQEFALIWAAQSIHHGSFLTRELHDRVHELLFFQRPISAQKHLVGTCELERGDDKHPAKRRAPWATMAAQRFRMLQKINDLVVIDAKNQTSRKLTEDERLRLYQLLDREGTQSFTAVRKFLDLKGTTFNLEAGGDKDLPGNRTQKSMRKVFGIFWDEFTEGKQNQIIENWRNSESDESLMREAIDHLGLDADAAAVLVKESPQTDYCSLSLAAITKLMPLMMSGRAFKDAETEIYGSRFSGLAVHDTLPPVRDALPTLRNPAVERAMTELRKVVNAIVREYGKPYEIRIELARELKKPRQERIKATTANRKREADNKGIAAKILSECGMANPSRADLEKAKLFVECGGICPYTGRSIPFSQLFQNSEFDVEHIIPRSRFPDDSFQNKTLCYLPENREHKRNQTPFEAYNNNPEVWAQILLRVAKWSNPGKLSRFKIQSESELAEFSARQMNDTRYTSVLAGRLLAMLYGGRDVETDSGNRQVIFASSGAVTATLRRSWGFERILQSIVSPEPGETRGKPRTDHRHHAVDAITIALTRQSVIQAMANASAFEPWQAGTRSWRRVPEPWTAPDFIGNLTELVARMVVSHRPEHKISGELHKGSNFSRPYLYKGKSTVHTRCALGELKPADISADDVIVDKVILALIRAKLNEVGGNPKAFEDPNNLPFFTTANGRKIPIRKVRIRQVKEPKVAAKGDRERFVDSGGIHHVALFVTRNETRQEQWLSEVAQVTDVYQRCPRRDKRSGRPRAIANEPAVSRKLKDNPEAEFLFSLMKDDTVELDYNGARELFRVKKFYAAGPIWFTGVNNAQMDADQKKNKTTWSKNPNGLKTLNPRKVVVDLLGRVHTAND

SEQ ID NO: 8534 - protein, 931 aa, unidentified
  REGION 1..931: note = Description of Unknown: Cas Enzyme sequence
ERRQKDSEDGKIASGAKALDQAMAEAGCDTLGQFLAGRPQKRVRLNSENQAYDFYPQRRHIEYEFTRIWEAQKAHHSGVLTDVARAALHRILFFQRPLKEQKVGLCLFAGRYGVPQDEPRLPKAHPLFQERRLYEEVNHLQITEPGEPAKPLTLDQRDHLVRLLRDKKEQSFAQLAKALKLQPGQSFNKASEARDKLVGDEVRAVMKDKKRFGDDWLHLSANRQWEIVQRLQDEEDPEALHLFLTQDCGLDEEHAQAVAKAPLPEGYGRLGETATRRVLEALKRDVVRYDKALESFGWDHSDDRTGEVPEHLPYYGELLSREIPPGTFDPADQGDPERYWGKITNPTVHIGLRQLEKLINAIIDVHGRPDQIVVELARELNLSEDDKKKHQARIRRDTDAAIARGKKLEQEGIPSNGANRAKLKLWEELADKVQDRFCPYCGEGGPIGIRMLFSGEGGIDIDHIIPYSRSLDDSGANKVVVHRSCNRDKGNKTPYERWGHDEERWDRIAAQVAKLPRSKQWRFGPEAMERFKDGGFLDRQLTDTQYLSRMAGKYLRSLYPEKGEGSGRVYVATGRMTSMLRRLWGLNNLLPGHNYVENKHSSAPKNRLDHRHHIIDAAVMAVTTRSLLKRIADAAGRAEAQDLDRLFADLPQPWEGFREELGARLATVTVSHKPDHGRSKAPSPGKDVTAGRLHNDTAYGFTGMMAPDGKTPIVVHRVPLMSLKPADMIGSDRMPDEALRNALYKATRDLTGKSFEAALKRFSETHPVFRGIRRVRLREPLNVIPIYDAKGRPYKGYKGDANARWEMWRLPDGTLKTEVITMFRAHQAGQGDQRPHPAAKRLFQLRQNDLVAVELNGEARRIVRVVAFNVAGRLMLADAHEAGKLKERDGLSNDIDPFKYIYLQGKSIIKARLRQVRVDSLGRVLDPGARE

SEQ ID NO: 8535 - protein, 1046 aa, unidentified
  REGION 1..1046: note = Description of Unknown: Cas Enzyme sequence
MRYRLGLDLGANSLGWCIVELDENNAPIRLIRLGVRLFRDGRNPKDKQSLAVARRLARGMRRRRDRWLKRQHRFMQALIKHGLMPADETARKALAALDPYSLRREALDKALTPHHIGRALFHLNQRRGFKSNRKVDKADDKDSGKIKSALKQVRETVAGQNARTVGEWLAGRHDKREAVRARLQGQGAKASYNLYLGRQMIADEFDAIWSAQAAFDPSLFTAEAGAELREILLHQRPLRPVKPGRCTLEPDDERAPLALPSSQRFRILQELNNLRIERGLGEGESLTLAQRDQIAATLERSSKVSFDRIRRTLKLGSEPRFNLESEKRTELKGNASSLAMSKDERFGDAWYELSLTQQDAIIERLLADENESSVVEWLRTEYVLEESAALKIANAGLADGHINLGRRALARVLPELQRAVITYDKAVVAAGYPSHSFLHTGEIFTELPYYGIPLERHVGFGSGDPKDSEEKRYGRIANPTVHIGLNQLRRIVNKVIERYGPPTQIALEVTRELKQSKDQKDRIQSDQAKRQAQNEEDNAELRQLGLREFGENLLKMKLWRELNINNPLDRRCPYTGRQISRSQLFSEEVEIEHILPFSKTLDDSIPNKTVAFRDANRYKGNRSPGEAFANSPDGYDWEAIQQRAKNMPKNKAWRFAENAMQEFEAEHKDFLARHLNDTAYLSRIAKAYLSYVCFPQDVWVTPGRLTAMLRGKWGLNPKGEKDRSDHRHHAIDAAVIAVTDRSLLQRIATASANERAYRDRDRIIADEPWDGFRDAVKNAVQKIVVSYRPDHGYEAGLHNDTAYGFVETYIPGKISTVVHRVPILTFGKQNIADLKPGLLDGISDDNLKQRLKVAIGTKTGKDMAVLLAEFALNTRMRHVRVNESITVIPIGRNHDQNTRTNEISNSPYKAYKGDRNYCFEIYRDDKERWRDHIVTRFEAHRIASADKKLPTDQQRLRHRMLSNYENRPLVMRLCQDDVIAIGEGDGRQLLRVVKFTKGKLTVATHFEGGDLKKRNEDKDDLFEYVTKAASWFQEMKARRVFVTELG

SEQ ID NO: 8536 - protein, 996 aa, unidentified
  REGION 1..996: note = Description of Unknown: Cas Enzyme sequence
HRYQEEFDAIWEMQSKTYPFLKECPTEILEQIANYLFPGASETQIKLREASISGGLKYIVKDQVIYYQRPLKPQQELISKCQFEKNQQVLASTHPYFQEFRCWDQINKMFITSKKEVFDERKKKIILKYTNRFLTVNEKQKIYDRLQIQKELGFNEIAKIVNLKSDNTEYLNGLNVKAKLKGCDTQIAIRKILGTHFEILKQNVYELVEKIWTAIFENANNGSEYDPNSLKVMSIRDILKPLNNETLVMELALKFAQSVKFPRKYASLSAKAINSILPLMQINPTNLSEEIKIKFENIKHLISTGEAVDNVDLNLEDYVINFVQSSPEAIKTGGLMYAFASSLVYGKHTAAKVSAQIENYHDIKYENRNLRNPIVEQISNETMQVVKAIWKEYKFNPNDLEIRVELARDLKNSAAERDKIWKAQRKNEEDNKKIKERLQKEGIATTDKNILKYKLYVQQKFVSPYTQNKIIPFSALFDERLYDIDHIIPKSRYFDDSISNKVICETHINEEKSNRTAWEYVTQQNSRYKIHSIGAYVKHINDNFFGKKKKNLLLEKIPINPVERQLKNTQYITVALKNELAKIVGSDNVKTSSGEVTDFLRSRWGLKKLFMELTEARFKQMELWDWDKENNQSNSQWVTKYFDKEKQKHIYEIKNWTKRYDHRHHAIDALVVALTEQWHIQRLNNLNKYLQDELTNRKDEFKLEVKEDETILEAFFNLEVKRREGIQKQIESSRYFEEPFEGLVKQAKMLLETMVVSIKAKDKLGKSLDKFDPNTPEKELKPQVKIRGALHQETYYGKLNGRDTRRVELSTLSITKNKTSKKDEIVEVIDKVLEAEIISHRNLLGDNRKELFQSVKEAFTGEGLRIFNDKRIADGKQPVYKVKIWYNKEEKKESSLQILYDRNEKQSVITGDNYLFIVMEKDGRRIFDIAPLYDSAILAKDALKNNENLKQRICEDFRLKHKETPEKVLFTLQQNDLIYLPEDKDDPVINLNNHEF

SEQ ID NO: 8537 - protein, 1445 aa, unidentified
  REGION 1..1445: note = Description of Unknown: Cas Enzyme sequence
MAKILGLDLGTNSIGWAIRETDIFEREHYYELFQSDKYERFKENPDFKKSNLDNEIVDFGVCHFEKGVGDGKSGEFSLAAERRKNRSKRRLYNAKRYRKWELLKCLIDHDMCPLTSDELKLWSVGNWVEIDGKWKNKGRIYPINNGEFQRWLAFDPAIFGDKGKSDKGNPIRKNPYDLRCELINRKEENEYLRKLKTGRALYHLAQRRGFKSSRKSGQSTYAKNEDIEKLKLENPDFQIALLAKEKLNEGKRFRASGVIQRKYFEDEFYAICEKQEIDQDLVEILHKAIYFVRPLRSQKGLVGNCTLEKGKPRIPISHPKFEEFRALQFINNIKWREKGSKEFVEIPISLKKKILEELFFRKLSSGKNKGKISEDNYFKFEEIIKKYSENGTYEFNYKNLPNVSTCPTIASIMNVFQDEWSDCFIQDENRYGINWDGLSIKYKTQDYKNLGRRLKRKIVKGKIKYIEAELKEEKTLGIDEIWHLLFDYIQTKDNPDALEIFCKEVLGFDENKAKSFAAIDIPQGYGSLSYKAISKILPFLQEGYIYSEAVLFANLKSVLGDKFEDNKEDAKRIIAETIKEVSQKKEILNIVNGLIQNYFSKAEISHAKGVDKCIKDLAWQETNNRLKQYFGVADWNKKSETEKEKLEQKVFELYLRFLNGEQKDDEKASAKGIKVPEIDYYKLPRLDIAIKEKLKAKFNVSDNALKLLYHPSDIEMYPVSKTEIKGTDIKLLESPQPPSKGWKNPMAMRTLHELRHLVNYLLKIGKIDKDTKVVVEMARELNDANKRWAIETYQRYREEENKEFAKAIVGVVKQKYPNINENDIENINRIRLWWEQIDNNEETYRQIKSLKEDVEKYRLWKEQNCVCMYTGKLINITNLFDGTQTQLMHTFPISISFDSSLANLTVGDAFYNNEIQGNKIPTQLPNYKNDITINGRTYTAIEPRLKKWQDKIQHLRDLIEENKRRTKKTQDVETKNDLIRKRHLLQFDYEYWQKKVDTFTLEEVPLKWKNSQLVDTQIISKYARAYLKTVFEKVDVQKGTITDSFKKIYQIKGEEQKDRSKHSHHAQDAAVLTLIPVSAKRDAILEEYYKSLEKNEKYHIKPYESYVSAHIIEIENNVIINHIPHDKTLTPTIKHIRKRGKKTGKIAQGDSIRGQLHKETFLGAIKVLERNSQGFPVKENGEYKVLKDKTGKDEIWIVSRKSIKDINIDKDIIVDELLKQHIHKQLNNGVELSNVVDFNNKPIRHIRVRYKAGKGFLSKDKTLPLKSHTYNSKRNHKINYLVQNEENYLFLFYEGINEKNQIIRHYRILNLFDIAQLKIRSIHDIRKEPKFKTILKGKISLNLKNILKVGDRVILFKESKDEITEENLKSRLYTIFKFNEPAKNTAYIYLQHQNEARPDNELDNGEKVFNPFKYQPRLELTPDKMNCLFEGIDFEITPDGTIIFK

SEQ ID NO: 8538 - protein, 1533 aa, unidentified
  REGION 1..1533: note = Description of Unknown: Cas Enzyme sequence
MKKILGLDLGTNSIGWALVNHNFENKQGEILGMGSRIIPMSANILGDFEKGNPVSATADRTHFRGVRRLIERDLLRRERLHRVLNIIGFLPQHYANDIDFEHRLGQFKKDKEPKIAYKKNSEGKHEFIFQESFKKMVDDFRKTQPQLFYTKPNGEESKIPYDWTIYYLRKKALSKKIEKEELAWILLNFNQKRGYYQLRGEDEEIEDNKNKSFEILKVAKVVDSGDKIRGTDTILYDVFFENGWKYDRQTTKPEDWIGKTKEFIVTTTTLSTGETKLSFKAVDSEQDWIAIKQKTEQDISNSDKTVGKYIYDTLLQQPNQKIRGKLIRTIERKFYKDELRQILKEQKEHHSELQDEKLYNVCINELYEYNEAHKNNIAKKDFTYLFIDDIIFYQRPLKSKKSLISNCSLEFRTFKVDEVERHEGIKCISKSNPIYQEFRLLQWMKNLKIFKKDDRQDIDITDELLPNIAEREKLFEWLNDRSEIEQTDLLKYPPFKLEEKIKEQLGLEQFRIFKKDKQQGLQTYYRWNYVEDKKYPLNETRGEILKRLKKLGIANDFLTKEVEKHLWHILYSVEDSNEVHSALNKFANKYNLPESFVETFKKYPRIKKEYGAYSEKAIKKLLTLMRFGKWWDFSAIDETTKDRIGKIQTGEYDEKIKNRVREKAINLTGNNHFQDLPLWLASYIIYNRHSEASEIKYWRTANDIELLKQHSLRNPIVEQVINETLQTIRDIWNHYGEGKENFFDEIHVELGREMKNPADKRRKITERVMENENTNIRIKAILTELLNEGDNNVRPYSPMQQEILKIYEEGVYHNENRADELNEIDKIRKKSQPSSSDIKRYKLWLEQGYKSPYTGEIIPLSKLFTPAYEIEHIIPQSRFFDDSLSNKVICESEVNSLKDNQLAFEFIKNNKELTIELSHGKFVKLLHPDAYEENVKRYFAKNKPKMRKLLLEDIPDSFIERQMNDTRYISKVVKMLLSNIVREENEEEGTAKNVVVSNGGITNTLKQDWGLNDVWNTLITPRFERLNQMAGYEKYGSWENKEGKQVFQINTIEPELLKLNKKRIDHRHHAMDALIVACSSRNHINYLNNAAAAKNKQSERFDLRAKLRRIENFTDKDGKQRTAAKEFLKPWDTFTQDAKKELNHTVVSFKKNNRVINKTVNYYQKWVKQPGGSMKKMLVKQEKGDSWAIRKPLHVPMPYGLKEYSFDNLKIAENVGKKDFIIDDYIRNEVEKHFDLNNRKITDTQKFLKKNPIKDKDGNIILTTDFNIRSKKFRKRMPILKLADRSSGRGITSLDSMIKFLNKISDKTLKNDLFSHLKDNDNDINVAFSIEGIERFNSKRKTPVYKLPITESGEKRFVLGNSIGSKHKWVEAEAGTNLFFAIYIDNEGNRSYETIPLNVVIERQKQGLPSCPELNEKGHRLLFDLSPNDLVYVPSLEEQENPNSVDFNNLSEEQVKRIYKFVSCTGIVGYFVPNTNASEIIKNENGTNSKSERVQDFYDNKTILDNSGKPIQIKSVCWKLETNRLGQIKKVLR

SEQ ID NO: 8539 - protein, 1062 aa, unidentified
  REGION 1..1062: note = Description of Unknown: Cas Enzyme sequence
MNEKNVEKILGLDLGANSVGWALIEYVGGTPQRIVGMGSRIFDAAVEGDLEKGQEESRAVERRMARQLRRQHKRRVMRMIRVGELLQQAGWLPAGNLRDSVERDRLFKELDKVLREQYATRGFNPSGTDAIRGIAYFLRARALDEPLQPYALGRALYHLAARRGFLSNRKAAAKKDEELGKVKEGITELKQQIEETGARTLGEYFYHVDPVEEKRIRQRWTAREMYQDEFDQILARQVELGAIQDNPKFFRKLRKAVFRQRPLKSQRGLIGPCQFEEKEKRAPWHCLLAQEFRLLQKINDLRLISPTYEERPLSDEERLKLYHHLMENATGSFTELRKLLGLRAKDGWRFNLEAGEETKLKGNEVAARLIGVFGEDRWRAMSDQEKNQLISELNSDITDKTLERRAREVWGLEDHEKLEQLKSISLPTGYCALSRKALKKLVPLMRAGMPYETAVRETYGDLRFKKQTFDRLPPFLKIDRTLRSPVVIRTLSETRKVVNEIIRVFGRPERIHLELAREMKQSRERRKKRASEMRDREKQREMAIDKIQKNTGIDRHRISRRDVDKWLLAEECGWVCPYSGRSINYHNLFGRTPEFDIEHIIPYSKSLDDSFANKTLCHREWNLRKGNRTPAQAFKDTPEWEAMLQRVRSFKPLHAVNRSDISRGGQNRVDPYVQSKLHRFQMEEIPRDFVDQKLNDTRHAAKVARAYLELLYPPEERLKRVKAFSGAVTAELRKCWKLNSILGDPESPDPIKNRADHRHHAIDALVLALATQGMVQYLSNAVEQQLQCQRSIRGYQKWVDEPWLDFLNDVRNAVAAIVVSHRVDHRIQGRLHNETFYSPPRQDENGKTYHLVRKPLDGSFDAGKVERIEDRAVREIVRKHLEDHGNDPKKAFNEPANHPRINNIPIHSVRIRDYVSPIPVGKEFCPRYVLTDSNHHMEIIEEQDRKGNPVWKAVVVSRYEAMRRKACGQPVVQRDHGEGKRFVCSIASGDTFSFQENGGTVLAIARSISDQNIEFVTINDARLKADIKKAGDWKKRSVNAFRTMCFQKVMISPVGEVYPAHD

SEQ ID NO: 8540 - protein, 1505 aa, unidentified
  REGION 1..1505: note = Description of Unknown: Cas Enzyme sequence
MAHILGLDLGTNSIGWALIDKVINRFVASGSRIIPMDAAMLGDYEKGNLQTQMAQRRFFRGTRRLYERSKLRRERLLRVLNILGFLPIQFREQIDFGAHPGQFIDDGQPLIAYRKDAYGKREFSFMSSFDEMLKDFSNRQPELVSDGRKVPYDWTIYYLRKKALAEKISKEELAWIILNFNAKRGYYQRGDDEGEDDDSKLVEYKKLKVTDVINEGEDKKKHGNHWYTVVFEGGVELKRTSPFKPFEIGDEREMLVTTTLDRDGNIKKDKNGEIIKPKPKIFNSEEDWAFLKKKTEYDIEQSHKTVGTYIYENLLSMPGQKIRGRLVRVIERKFYKDELIAILKKQSEYHPELRDRQLYEKCVRELYHHNEAHVESISDKDFTSLFVEDIIFYHRPLKSCKHLIDNCPLESYNYVDKETGEIVTVPIKCIPKSNPLYQEFRLWQFISNLRIYQKERMVDGKLKMDFDCTQELLNDAEDYVALFDWLNDKETIEQKDFLKYKGFGIKKQDIDNYRWNYVEDKKYPCNKTRFLINSRLKKGGIDVVLTNEQLSHLWHILYSVNDVVELGKALRGFAKTNNIEEEQFYAAFKTAPQFDREYGAYSEKAIKKLLALMRRGKYWCADAIDDKTKERINKIINGIEDESISERVRSNAIKLAGLESFSGLPEWLASYVIYGRHSEAKETKKFKTPDDIDYFLKHTFTQGNLRNPIVEQIISETLRVTRDIWRTYGKIDEIHIELGRDMKQTNEQRAKASQAINENENANLRVRALLQEFTNPEYKIDNVRPYSPVQQDKFRIYEDGVLTDADIPDDINEILKGFRETDASKRPSQNQVKRYILWLEQNYCSPYTGQPIPLSRLFSSDYEIEHVIPQSRYFDDSMSNKVICESEVNKAKDRMLGYEFIQDKGGSIIKGNFGKDIRILTVSEYEQFVNDHYSKNRKKMGKLLMGDIPDSFIERQMNDSRYIAKEIMSILSNVVRDDDELEGTSKHIVPLNGTITTRLKKEWGINDVWNDIVYPRFERLNRITGTHEYGEWRNVGGKNVFQTSVPLSISKGFQKKRIDHRHHAMDAMVIAATTKDHVNYLNNLSALSGNEKMRYDLQHKLCTKSHPDEQGNYVWQFNKPWENFTQDVRAQLEGIIISFKQNLRVINKMTNHYQHYVDGEKVIEKQTKGEGWAVRKSLHKAHVYAAVNIKKVRTMKLSEALKDWKMIKDSDVKQAIRELIKAYHGYDEKTINKYFKDREYKLNGKDISKVDVYYFSDDREPLSAIRVPLDKSFDEKEIMTVTDSGIQKILLNHLHRYKDEKGKDQPDYAFSPEGIERMNKDIIELNGGKQHKPISKVRVTESFGSKFAIGDKANNKNKYVEADKGTILYYAIYVDADGNRSFESIPFVDVVERQKNGLSPAEEVKADGRKLLFTLSPNDLVYVPETSDVHVEPSDINDHSLIYKMVSSNGPQCFFVPHSIATPIIQTIEMGANNKAEKAWNGVMIKNVCYKLVVDRLGHITKVIQ

SEQ ID NO: 8541 - protein, 1357 aa, unidentified
  REGION 1..1357: note = Description of Unknown: Cas Enzyme sequence
MEKTIALDLGTNSIGWAIREGWRETNQITKWGVLTFEKGVATVKGNEKPKVSDRTERRGKRRNYQARKYRKQYLLQLLIENGMCPLSIEDLNSWRKYSKGRSYPKCDEFKKWLQLDFDGDGKADYINPYILRSEIVNGNVTSAFVIGRALYHLTQRRGYKASNLEDPKEAQSIHKGSDEKGTKGHDEIKHLLDNNSTIGSVYATFDRYRDRIRNRYNLRTDIDFELRAICGIADIKLESELFLKLQKAIVWQRPLRTQKGNVGPCTLEKGKVRCQVSHPLFELYRAFGVINNIKIKPKGSSSKDYKFLTSEQRTKVFDEVFMRKEPDFDFIDISKKLDKKGEFDFNYRNNQNVSGCPVSSYLRSIFGVNWRNIKVDKAPSLKSKKDFYDLEDIWHVLNTFTSKEKIEDFARNKLFLNEDQLKLFVTLFSKMPNGYSSLSLNAIKKILPHLETGSIYSEAVLSANLNAVFGRSLSIEELGLIQRDINKATDDFEYEKEINNIANILIAEHLGLPHYEKFYADETYSLDDADKTEIEQKLISNFGEQTWDALSIKVREDIRSNVSRLYLTYLQNSSVNSKDKFVKTQRKDDRVKDILRVKYGATDDGLKLLYHHSSMEIYPVSKEDSEGRIYLQSPIPPSKGFKNPMAMKTLYKLKYLINYLIKIGQIDDETKVIVEVPRELTSANKRSAYEKWQRDRQAENREFARAIIEIANEKHMQLNPENPENIDKFRLWYDQLSNRDEVYKKVTVLKNDIDKYRLWKEQECRCMYTGKVISLSELFIANKFDFEHTIPASISFDDSLANLTVCDSVFNQKIKGKQIPSKLANYHADAGGFTAIEPRLVKWQEKVEELKDSIKEYTRKAKYASTKEIKDACIQKRHYYEFELEYWGRKLWTFTTNEFKVGWRNSQLVDTGIVSKYAFHYLKTAFNKVYVQKGDVTAIFRKVYQIQGQWQKKSRDKHSHHAMDAAILTLIPTGFKREKILEQYFQANEEQNKNFHSKPYPGFDQSEIKKIEDNTLINFLTEDRALLAAKKYVRERGKRYFERDKNGNKQFFIATGDTVRGQLHKETFFGAIKEPLRDENNKMLRNEDMEILQKNEVKYVVRKLLRADELGFSAKDQLKKIVDPIVREKVLAHVGDRSLKEAFSETIWMNKEKGIKIRHVRVFKDDVSEPLEIKKHRDLNPQKDYKHFFYAENATNYIYAFYEGAVKGVIKRGYELVNLFDASKNRNIEMVPLELAIDKKKEVMVPLRAKLRVGQRVLFYKDHPEELSGLDSVLSRLYRIYKFEKDGRINFQFHLEARSDSELRELTKEFGASYANGFTSIDFEKSMPRLRLSVGNLQMLIEDVDFMIQPNGQVEFK

SEQ ID NO: 8542 - protein, 1100 aa, unidentified
  REGION 1..1100: note = Description of Unknown: Cas Enzyme sequence
MENEKIFSFDIGTGSLGTCIRKGNEIELLDVETLPSDFATVKEARERRRQIRTRIAHKKREEWWKEHAQKAGIKVLETGHLNEKGEYIKPDPRLTREFQKKGDPTIYNSLLLRIALLHGEKLEGWQIYKAIWSAIQRRGYDINLPWKSKIKEAKEEDNEEQQSDKKRKKREKKANDKKNDEKEIEEAVQKYKEEMKKCFGEKQEFYYPSFFDAFRLGIWDPDDPENYSKTIDENAKPIRNKYGEISTIAPAEMVDKELKQLLVQAGKQYPYIEKNLNYILYGPTGCKYGAYLLKDYRKYMGRDIEWQGLLSQKTPRFDNRIVYKCRLIPRLNVCKRKDPLCKEITFLMKLKNFRYVEAETGVEKSLTPKEISELFEEHKNNFKITESKLKKYLQKKLNGIVHPSFKTIEAPKEKGRASFCRPAMKIIKDIILSGKSPHELYQEYISNNQNTDPKKGLINEDYKFLLAMPDSWDKFHIPDTREEEAQLNEEERIKKIHEIFSKISNPVVRHRLLLFYQKLQKIKEKFDEPDKIVLEFARVPENTIAGKKKKEQIMKQQKENEKINKQVRDKLNDLKEQGVQIEGKKAFLKLKLWMDQGGKDIYQHARDPYSETNIPATEINNCEIDHIVPREKGGPDAYYNLVLTSRANNQAKGKQTPYEWLGKDITQWNKFIDYISSFNKSEKNKGDKKTDKFGLPKKKIRLLISDNPEELLEKYTHLAETAYISRLAQKICHLFFGWEQLTKGSERKVFVVTGNFTSRIRNIFELNQILEGEETNEEDSNSETNDQDESTDSKQNKKKKNRDNPRHHALDSLIISITPEIKFNPEKGKDEYPTWFNKDFCIEKLEKCLPLKIRFVKPKLAETIYGLRKYIDDNGKITNDYVFVTRFGTGTNFDDYKKIDIARKHVKDIYSYNIRKDLEEELAKNPTKEEWEIFLHNYRAGGKPKKLLLIEGKKIKSEDVEKFLKGEINNLGEFIKGKMPGQYLKQKKESHGYFVVKNNKGKWERIPIYVFESPYKKKKEIISKFGNSNIIFLKTGILVKLNENIYVKEKERLKKGYYYINTIRDDNFCQLTSIDGKTSDVISINILLEQGKLEIIQQLL

SEQ ID NO: 8543 - protein, 1012 aa, unidentified
  REGION 1..1012: note = Description of Unknown: Cas Enzyme sequence
MSEPTLGLDVGANSIGWFLIDPDPQQIIASGVRVFPEGVDNFDTKKEKPKMEARRIARGMRRQIARRRARKRQLRILLAASGLLPTETDAQRALNLTDPYLLRRRALSEPLTPHAFGRMLVHLNQRRGFKSNRKSDRGRKADDKGLLGEINELAARLKEDNCQTLGQYLAKLHDDPHARVRNRHTRRDMFEDEFETCWEKQRAFHPAILTGELRTRIRKLIFFQRDMYWPASVVGRCELEPRQRRCSRADRLAQRFRLLQEVNNLRYFDPDAREERPLSPEQRALLLEKLSKVAKMDFDQIRKALGFIESIAFNLERGNRKSIKGMPTDYALANKELFGKKWHDLPESRKNEIVGKLIDADDDKLPELAREWGLPPESVEKLSAVDLPDGHAALSRLALEKLLPHMERGLLYMTDDDTPCALTEAGYLRPDQVPHRVLPALPEPPDIANPVVRQAMFELRKLVNSIIREYGKPARIHIELARNATMSSEDRQKASKRRQENEDLRDDAAELIRANQFKVSRDGIDRVLLWKEQHGNCVYSGRPISLAQLLQGEADVDHILPYSRCLDDSMQNKVVAFRSLNHEKGNHTPREWLEADPDRYNQVLQRASSLPYPKRKRFAQKELDLDKFVQRQLNDTRYITREAARYLRCIVEQPHFVLCPKGSHTAELRRHWGLNTVLRELPDSPAWTGDNDLRDGEKDRSDHRHHAIDALVVSLTDQSRLQQLARIRREGGTKGTGEILPDPWPDFRRSVIDAVSKIKVSHRVQRRVSGALHKDTIYGLVREKNIRGDLIQRPGEFVVRKPLESLTLAMIEDIRDPTIRDLVVGRLKERNLAFGRGVKGAIGKEVWNPPLTMPSGVPVRKVRIIKRDATIQPIRGGTAHVKPGSMHHLCIFEWTEKGKKKREAIFVTMLEAINRIKRKEPIIQKAHPMRPDASFVMSLSRGEMIAGLKGDPNKLFVFGTAASTSGQMWFARHTEARKSSEVETISVKASTMSPGAKKVTVDPLGRIRWAND

SEQ ID NO: 8544 - protein, 1096 aa, unidentified
  REGION 1..1096: note = Description of Unknown: Cas Enzyme sequence
MAYSIGLDCGISSVGYAVLELDSKEEPKRIIRLGSRIFDKAENPKDGSSLAKPRREARSARRRLRRHRFRLERVKSLIVEAGVLTKQELETLFEGRLPDIYALRVEALDRALLPAEFARVLIHLAQRRGFKSNRKTDASAKEEGELLGAVSKNEALMREKGYRTAGEMFARDALFSVCKRNKGENYLNTVSRSMVEDEIKLIFDAQRRAGNPHASQAMQARYLDIVLSQRSFEDGPGGNSPYGGNQIEKMLGACTFFPDEKRAVKASYSFQYFTLLQNINNLRIVCAGETRTLTSDEREAVKAAAFASAELTYDKLRKALGLADDEYFVALRYGKGDIAETEKAAKFNYLKAYHEIRKALKREKLDIGLLTKEQLNAVGYAFTVYKNDEKIGEALKQAGIGGRVLEALMKLPSFAKAGHISVKACEAIIPWLEQGLKYDQACEAAGFDFKAHIAGKKRFLPADEKEAPELGAITNPVVRRAVSQTVKVVNAILREMGGPPVYINIELSREMSKTFDERRQDESRMKENMAFNERIKQEIKDHFGKTNPTGMDIVKLKLWKEQDGRCPYSLESIDYARLFEDGYVDIDHIIPYSVSFDDSYKNKVLVMSAENRQKGNRLPLQYLQGKRRDDFVVWVGAHIRDARKRQMLLKEKLTEEDEAGFKQRNLQDTQYLSRFLLNFIWDHLDFAVSVTGKKKRVTAVNGAVTGYMRKRWGIQKIRENGDLHHAVDAVVVGCVTDGVIRKVSEYAKRREQYADAGGRIVDRRTGEVKDVFPPPWPDFRTEVEIRLMKDPARMLKEKPLANYAFVNPDGISPCFVSRMPQRKATGAAHKDTVRSPKALGEGLIVSKKPLTDLRLDAAGEIAGYYMPGSDPLLYGALQARLKEYGLYAGSGSAKDLEKRAAAAFAGPFFKPKADGSPGPVVKKVKIAEKASLTVGVHGGRGAAVNDSMVRIDIFYVAGEGYYYVPVYVADTVKPVLPNKACVQAKPYEQWKVMREEDFLFSLYPNDLVRVTAKKPLKMGLVHPASTIPKEMAVNGALLYYTGAGISAASITVINDDHTYVIHSLGVKTLVKLEKYQVDVLGNVSKVGREKRLGFAG

SEQ ID NO: 8545 - protein, 1377 aa, unidentified
  REGION 1..1377: note = Description of Unknown: Cas Enzyme sequence
MEKILGVDLGTNSIGLTIREDNEFIWYGVYTFKKGVGEGKSGEFSYAGERTKHRSSRRLYNARRYRKWETLKVLIESDFCPLSEDNLSRWKHYEKGIGRIFPIKDVAFEQWIKLDFDNDGVPDFSSPYQLRRLLISEKLDLSVSENRYKVGRALYHIAQRRGFKSSRKSGANEKTAVYKGSNETKTIGRNEYESLIAENGSLGAAFAYLEDNSLRVRNRYTLRSDYQQEVVKIIEIQQIDNELFKDSVQKAIFFQRPLRSQKGLIGKCTLEIQKSRCPISHPKFEEYRAWSLINNIKYRDNENSDFKPIPLELKEKIYHEKFFFKSKREFKFSEIRKFIQENGNKNWELNYSKRMDDTSVQSCYVSARLKSVFGKDWQNFEKTVERINKKNAKEKVTYSIHDIWHILFSFEDEEYFTEFLLKTLELNENQFKELSTLFNAFPVGYANLSLKAISNILPFLREGLIYTEAVILAKIPEIIGKQLFSENKEIILSAIKSEIENNRYEKTIISIVNNLVFKYYALSYNERFAWKDFSYKLNNSDYENIEKTVIEYFGEKTWSDGMAETEHVTILADVANKYQSFFADEKREHIKPPHLVNQIKEFLLTNFEIDDKKIDKIYHPSQIDIYSRTEEQQFLKSPKTAAFKNPMAYKSLYKLRDIINYLIENKKIDKETRIVVEIARDLNDSNKRWAIETYQRRREAENIEFKTAISELIRDNNFKGNANPESSEDIDKLRLWAEQIENYEEVSKVITEIEKDKSVSEKDVQKYRLWKEQECKCLYTGKVINLTDLFDQNKIDFEHTIPRSKSFDNSLANLTVCYADYNRNVKQNRLPVELPNYDSEAQGYPAIKQRLETWEKKVTDLEKQIDFWKTKSKHAQEKGDKDNAIRQRLLRQMEYNYWKNKLDRFTRTEVSQGFINSQLTDTQIITKYAFHYLKTVFANVDVIKGANTAQFRRIYCIQSKFEKKDRTKHFHHAVDAAVLTLIPSAKKREDILKKAYEFEEKPENKNKQYHEKPFSSFNHTMIEAIQNNILINNIADKDQTLAPSRRIVRKRGKIVWIDKEKRIPKIAQGDSIRGELHLQTYYGKIKIAAKTENGCLLRDENGNIVYNKVDGKDEVWMVIRKKIEDIKFNSDVIIDVHLADFLKNQLEKGVKQIALIDFQGNRLRHLRCRVKAARGFMNPDNVTIVKEQIYKSSKDYKNYIYADSGENYLFGLYRNNKGRQIVAINKFEASQQIIDNQIPTKAELFKFKEPILIKGEEAVLIHVFKVGQKVIFYENSIDELRDLDKTELSKRLYYIKTLADAKQGLIKFQHHLEAREDNQLTEDFPENIFGKKGKNGFSKFTNSFIAPRLLLSPGNFNFIVEGKDFKMNIDGTIEFND

SEQ ID NO: 8546 - protein, 1147 aa, unidentified
  REGION 1..1147: note = Description of Unknown: Cas Enzyme sequence
MPEVLGTGVVIFGADDCLAIKRRQARQARRHARATRQRIARMEQILAHLGVMTARELKDRHEQAGGDSFAWQRAAEILSAARGGKPLPQINWLELWDMLRWYAHNRGYFAPPWANRGEEEVLDDDEVPDSEKVEIGRARMRELGTTTMAETTAAYTAWYEREVARWQQKQRPDKPAHFKGLKAAFQRESVVWPEVAALLHALQGRLAKLDDDLIRTLLANDVDPLKDPDAWRTIACPAIKLPKRYHGGLLFGQSIPRFDNRIIGVCPIRFARLTSKYLGEGLESGEAKRCAEKESKLPSKASPEFLRFRWAMQLANIFGAAPGERDTRPLTAPERKLLTEQAGRQGAFTKGEFKKVVRAIAGWAEKGGRDNLDNLLLHPDAEKALELDPAQAAIAGSQLAASLGALPERYRKRLHGKLERGQSVRLADVRAWLEKADGPRVQPTASAPSVPDDLVAFDAGVQRVLDTAATRRSKKQSPLTREALLDEKLTAKYPKGRAPYSRPILREAFDEVMKGWDPRAEKNDHQPRGCLCQTNELKEAQLQRRLEEQTNNHLIRHRLLILERLQRDLIAAPEFANGDRARIAGITIEVNRDLRDLSSKTREEQKLDLGLRLSDFKRVAAKVEEACRRRNIPVTAGLIRKARVAEDLGWHCPYTGRQFNMDTLLDGVMDKDHIIPHADRQSDSLDSLVITWAEINKWKGKRTAMEFIRDEGGKPVPGLRGVEVMSLAEFQKHVAGLDIRKGHDDDRARKKRRIRRLLTEHYEEKEFTPRDLTVTSQLVRLGAQVLQRAFPPEQRAPVVSLPGSLTGEVRKAWKLLGCLGAANPAIFEADGKTPKRKDDIRGITHLHHALDACVLGLAALFFPRHGTVWSAMVKAGGDREADEDRRLWLAMTKRRPTAAEAALLKATGLYRQDSEGRLHLSDLPDALKQQIRSRLAEKRVVQHIPADMSGVKIEENTRGVVGEKDGRVLLRQRSARDAKTGLQTVKRTGEAPGKLLGLNPTGSDGKLKRQKGARVITDNFGVAILDHALGGEEFAVIPWHRVWHRLQALKAMNGGEPPRILRNGMLIKVAAGTYQGLWRVISAKDTQAYGKVVDLALPDGQALERGNAPLRKLLVDGLEILAQKSFVGHSTAGVAYAAKRTRKTKSP

SEQ ID NO: 8547 - protein, 1617 aa, unidentified
  REGION 1..1617: note = Description of Unknown: Cas Enzyme sequence
VKTYISPIAIDLGAKHTGVYRAFYQAGCKPNEIDRSGVVYNLERDKYTILMKDRTQKRHQRRGFDRRQMAKRLFRLIWEKELKLEWNDNVSKVIGFLFNRRGFSYLTEEYDSELLSQFPTELFEILPVKLQQMGGNVDVKKNSEYVDIAHALKIFTENDIISEALQIINNETDFVNKELVYYNTLRKLEECCKNSNFGKDFTKDKSLLSVSKWIIERLHEDGMTCIKIDKNIRGNIDIIAIIKEKPDIANSILKNIPEYKDKLDKLKQSEWNFKSSNPAFKNNDETPGTQVNFDSDIDFKKQLNNLGYALYVIHQELISGGRYRIKYFEEVREVLAERNHNSKYLSEFCTKLQSGKFTPLNVDSLVKLIGHISNFELKPLRKYFNDKKHYGHDYWDKERLDKFFRNWILNEWRVVPEKNPRKINGGDQDYGVLCKDLIKWKNGIVKFLMEYDPIKTIPPYQNNNNRRPPRCQSLVLNAKFLNTNYPDWKKWFNLLKEQLFIKDYLGDIEKAYMALKTSKDNPYYFDKLTGDFQKDSQKLTLDDRDARVFHLILDRVKNEDPLLLNEIYSCVKKIRQLKRLSEKTGVWEEKLKEVLNKSILPDQLKTKPELNNDDIYKPMTFLHLVCKYYKERQRARDGRLFIHPEYKKHKKRGFEKTNRFESENNILTYCNLKPRQKKYQSIIDVANIFQINHDKLKEIIGSDDDERVRVWLKQFKAGRKGLEGLSRDCAAAQKEYRGNLKNIIQLGKEKKLMNLVEEARQISLQIAKVLFTENSEKLSQKFESVFSFAQLYNIMFTDRNGNSKTCPLCSFDNSRRMEIYSDNKVKAQRLPAISTRLIDGAVMRMIRIITKSIANDSWSAIETQLESGSAVRVPIITESNRFEFEPSVKYLKGQSFKLDGSEQIFNKKEQRIKNEGNSICPYTGAAIGESGELDHIVPRVSEWGTLNDEANFIYASKKGNNDKGRSEYGLKNINDKYKKSVFGTTDDTKIEEWIINTIWNSERESFSFGNYRSFINLDLDQRKAFRHSLFLLGKPIRQKVLDAINNKTRTLVNGTQRYFAEMLANELHKKSLKIDKSKNLSFDFFQVEAFGDSHGDGIKEWRKLYQDASGINIESYEKKAGKKQKPYSHLMDAQIAFLIAADKHRNEGSFLLNIPDNISPIPVNKETGEIIEKTLLTDIWVAPDKMKEPVQLERRKPIEGFVKHRSFTRDSFYADRYLPILMKKNKGKIEMRAGFDWKNSGEWSIGKTTLPILKQLLPLINQRRYFDIQDFDALTEIEEVFEIFEKVDYFQKQIKQKKYIYITIDRQALHEYWCEYNNTSSGNTFDKDDKLFDFLYSKIGYRTEKKKIESESDLEDVIKNQSKYFEKKFGKAIILPYLNNWQDCQNAWKNRKKDGISFEDFIHDYFSTLHKHGHQKVRKVFSLPVKTGEGRFLLKRRGWDNTHVFQIINDSDSRSMENKAVTTVVTESGELGEKLNSWTKSKNFVKLSKNVFSDGEEISSTEWFKIDEKEYSLPEECMALWYKVDNTTRPMIKFCLNVDAKKIKETQIKNIFLKNPFCRGRFDPDKKKGLSSEDVLIKFWVDNVKELKRSESFEYKGASFTNDQKRAIMDSLNNGNA

SEQ ID NO: 8548 - protein, 1139 aa, unidentified
  REGION 1..1139: note = Description of Unknown: Cas Enzyme sequence
MKKVLGLDLGISSIGWGMIAIDKDKKTGKILDAGVHIVPIDTRDADEFSKGNSVSASAERTAKRSLRRNNQRFKLRRQQLLAIMEDIGWIQSGFEWQSDDPLYIYGLRAKAATSIIGREELARVFLALNGKRGYQSNRKAVNDDEEGTEYLERIRERDRELITRDMTIGQKHLELLLVNRWSTLKNRTYSRSSYRAEFDRIWHTQKKAYAEMDDRLYHQIANRTIFYQRPLKSQKGLISKCTLEPSKRVAPKSSPVFQVFKIWQQLHNIRIKDDSGQEQFLDMKTKNRLFEILNSKGKMTTAALKKELKIGRLDPVQFNFEVLEGNYTRSGLDAALEGCGFDTYDLITVDWTLEGNDFDKQPAMMMWHLIYSATDQDSLIKNLQEQYKLPDLVARKVANVRLVNDYGSLSVKAMRRIIPYMMQGHEYDKAAELAGYRHSLHETRDERDSRELQDHIEVLKKNSLRNPTVEKILNQLIHLLNAIIQDPALGRPDEIRIELARELKMNAKKRKDVSKRIAENTRRNEDAAKKLRDEFGLTQISRKDIDKYKLWKEAGMKSLYSGQPISPARLFTTDEYDVDHIIPQSRLFDDSFTNKILCESALNREKGNMTAWEYMASKGEAELRRFQQDIEACKDMPFVKKSKLRMQAADIPDDFINRQLNESQYIVKAALQIARKISTMVTSTTGSVTSTLRNEWGLAHMMQELNHKKYEELDMVTWKETKGGKRIMKIEDWSKRDDHRHHAIDALVVAATSQSIIQRLNTLNARADDPQQKRIREKAFEEPWPAFRSDVKSAVSRILISFKGKNKVTTWNTNRYKKKGKGHYGTQRTQTPRGQLHLETVYGQMKWYDPNLTPLDKRFTNAHLIVDPDVRRFVLAHLQSHEMDSARAFGNLKKNPLIYNGKPLTEVRCWKEQFTIRKAIGPDLKLEKVVDPKIHNILQERLYDFGGDKKKAFSDLENNPIWLNQAKGIEIKSVKVIDNGDLIPLHHNGRKPIDYVYTRNNHHAAVFKGPDGERKLEMVSFMEAVERRRQGFPVYASQNDLGWPLEYALHINDYFIFDLDPNEVNIFDPSNRELISDHLFRVQKLTTTASGGPDFVFRHHLETTLKRETEFAFKRITSFKNLTGFKVKINRLGHIAQIG

SEQ ID NO: 8549 - protein, 1271 aa, unidentified
  REGION 1..1271: note = Description of Unknown: Cas Enzyme sequence
MFSQRNNPYCELLSNCRTNVIKNDKNKNIMKKILGLDLGSASIGWALIAENDFEGNVKREILGLGSRIIPYEGTEGKDFEKGTGESRNSIRTKARTTRKGYDRYQLRRELLVEELVKSNMMPDEILKKLSKKQLWELRSKAVSSRVSLQELGRILLWLNQKRGYKSSRKDANLDKKDTEYVANVKSRHEKIKELKLTIGQYFCQEIQKDDFYRVKENIFPRDAYLEEFDAICKQQQLYYPDVLSEKFIEKIRNEIIYYQRPLKSQKGLVSICEFEGKWIKGKDGKEYFVGPRVVPKSSPLFQLCKIWENVNNIKIGNKTGGNIEISMEDKVALFEHLDNNEKLTQTDVVRILNLKKNECFFNKQIANGIKGNITKHAILSCFNNPSQYRHLLEMRLKIVETNKECYLYDKKTGEVLSSKLSKYVDSSVEQEPLYQLWHTIYSISDQEECSKVLQSNFKIEKEAADKLAAIDFSKHGFGDKSAKVIRKILPYLMDGDVYSQAMCYAGFDHSNSLTKDQNLQRKLYDNLKPITKNSLRQPIVEKILNQMVNVVNALINKYGKPDEIRVELARELKQSKEERNDIDKKMRKRQRENEQIAKKLEEMGLRATRNNIIKWRLYEEMDNEDKKLNAICIYCGQPISLTEAIKGSDVDIEHIIPKSKLFDDSQSNKTLAHRHCNANKNDQTAFDFMKGKSEQVFNAYIERVNMLYANKVISRTKRNKLLMSENEIPDDFIDRQLRESQYIAKKAREILQIICYNVWSTSGSVTAELRHLWGWDDITMNLQFDKYKELGLTQTVEWDSDHGKNSHKKEVIVDWTKRDDHRHHAVDALVIACTKQGYIQRFNTLNSGKTKEDLKADIEERSIEFKEKHSLLEKYIISEQPFPVKEVEEKVANILISFKAGKRVAVLGKRKVGKRGNKKVVQTGIIVPRGALSEESVYGKIKTPERKPIKYAFENLHLIVLSKIKRLVEERIVENEDDIKKAIVSLKKKPLYIDGEKQIPLEYASCFDSNYVIKYKVDVNFNKVDKVVDKGIKNILQTRLDKFGGSFKEAFKDVQHGDKFLKWYEDEGLERAINSVRCFTGLSAVVPVKKDGQGRNIGFVKPGNNQHVAIYIDAEGNSHEHVCTFWHAVERKKYGIPVVIQNTNEVWDKIQEKPEGYYPESFLEKLPEANWKMQLSMQQNEMLVLGMNNEEFTDAVNSDNKSLLSKYLYVVWSVSESDYWFRHHLETKNAEIKNIVGARESKRYYRIKSIKAFYLLNPHKVKIDCIGNISL

SEQ ID NO: 8550 - protein, 1362 aa, unidentified
  REGION 1..1362: note = Description of Unknown: Cas Enzyme sequence
MAKILGLDLGTNSIGWAVVEKERDSEFQLLEKGVRIFQEGVKIEKGQESSKASERTNFRSVRRLKYRRKLRKIEVLKILSTDGFCPGLTNKELSDWRYKKIYPQNAVFFSWQVTDDVTPKNPYHYRALAVEQKFDLNKEEDRFILGRAFYHIAQRRGFLSNRLEGTKESDGAVKKSISEINKLKGDKTLGQYFSEKYKKGEKIRDVYTHREEHYLDEFNRICEFQDLNSEFVAKLKKAIFYQRPLKSQKGLVGKCVFEPNKPRCSVSRPEFEEYRMLCFVNNIKIKTPGDDHLRFLTEDEKKKIIPPFYRKSKDYFDFEDLAKQLAPKQQYKYYKSRDIYPEDWLFNYSMKTTVSGCPVSARFRDLFGDNFMDLKLPYKREKDRKESVIDIHDVWHVLFSFDSEEKLKEFAQKRLLLPEEQIKDFLKISLKKEYASLSLKAINKILPFLRAGLLYSHAVFLANMEVAIPGDIWEKEENRTIIKEEIESIIANHKDEKQISEIVNGIIKNSRVDESVWSDEASELFKKDLFKKIKAYFGERTYNSFTEEKKNQIETDAFELLKKQMKKNAGKGEFISIQRIDEKVKAFIEDNFEVEGKSLDKIYHPSAIDVYKPPVRKNDGKLYLGSPMVSSIRNPMAMRALHQLRKVVNELIKSDVIDSETRIHIEMARGLMNANERKAYQNWQRDRENQRKEYAQKIKEHLSSDVEPSETDILKYQLWEEQNHKCIYTGREIALNEFLGSNPSFDIEHTIPRSVSLDNSQENKTLCENEFNRKTKKNQIPHELANHLEILARIEHWKEKCEELDKQIDKTDFLVKRNSDNKDLKDNFIRKRHELRYQRDYWRNKYSRFTMKDVPEGFKNSQLVDTGIITKYSRLYLNTLFDKVYTVKGSTVADFRRLWGLQDEYEKKARGNHIHHCIDAITIACITKENYEKLAQFYHEFEDMKIEGITQLPRVDQPWKTFVVDVKAIENEILISHYTPDILPKQTKKKLRSRGIIKYSFKKYLPKEYKEKQEGKDYFKIVENGTEMFKIPVYQKGDTTRGSLHQQTFYGAVEKTELNKKGEPEKVIKYVVRKPLYLLDENSIKNIVDDRVREIVSNAKIQEKNLQKQIENLLKQRRNAEENEEAEIDNEIAGLKQQIAELYCLPNKNGTPVPIKKVRVYQPMVTNPLSGFKKHRDLSSKEYKQQYNVANDGNYAMAVYEGIDRNEKLKRSIIMVNNFDAGKFFNGKLEESPFPDKHPKTGLYLKYLLKTGTLVMFWEKSSEELRSKKVDKVKRLYKITKMSKNGQVTFKYHQEARNDENLRLDYEKEFGVKAPKSLTNGESFIDFVNPFPKLLLSPPNFNFIVENYDFKISSTGDIIWLS

SEQ ID NO: 8551 - protein, 1128 aa, unidentified
  REGION 1..1128: note = Description of Unknown: Cas Enzyme sequence
MSKILGLDLGTNSIGWALIDDTKKVILGMGSRIFPMGVENLGDGEGELSKNASRTGARGVRRQFFRRRLRKKVLLKALSEHKMCPLTASDFEKWKKTKQFPIEKLASWFAMNPYELRYKALNEELSLEEIGRILYHFIQRRGFLSNSRKGGSEDGAIFKGNPKEGKIGITETQESIQDKTLGAYLYNIYPKENEPFQDGSERIRNRYTTRKMYVDEFELVWDKQAQYHSELTDSLKTLFGGRKLDGYKEDGILFHQRPLRSQKHLVGNCSFEPSKTKCPISAIPFEQFRVWQWVNTVEYNGKKLSQEEKGKIVEFMYTNEKSDFKKMRKVIGKESAEYKFNYKDDDKIVGAHTISNLSHKKFFGKKWFEFSKKKQEDIWHVLYFFDSKSNLKEYAIKNWGFVEEQAENISKFNLKDGYASLSRKAIHNILPFLKLGFTYDVAVVLGGIKNVFGVEWEKLSDEKRNYLLDNVEDIVRSKMKGGFIDTIKDILRNDYGVSDYELRKLYHHSASIDVTKLLDKLPVGNEADKEIQSIRNPIVITALFELRKLVNELIEEYGQMDEIIVEMARDLKVSKSQRNKIRREQKRLERENDRVKDRLNEEGVRITHDNLLLYKLWEECKKTCPYTGKSISLSQLFSGEVQIEHIHPWSRSLNDSFMNKTLCFADENRKKGDRTPFEFYGSDEGNWSAIKERALKLFSDTKEYPSAYQKFKRFVQQKFDEDFSSRQLNDTRYISKEAKNYLSKICKKVSVSPGQATSNLRQKWGLNHVLNDENTKSREDHRHHAVDALVMACTKQSYVQELSKWNRYNRTAELKDFPMPWKSFRYDAEQAVGKILVSHKRVSNSITVRSHTTEKNNKKYKNVGVAARGQLHKETVFGKRNFMGEEAFHVRKPIDSLTTEKQLGKVVDESIKGLIRKRVQTLGGFDKGKIPINTFFTVDENGIKEPQIFLPNKNGEPVPVLKVRMKENIGGAEPLKGNVNQWVNPRNNHHVLIYKDENENLKEEVVTFWTVVERKRTGQSVYQLPSHGKEIVTTLHINDMFLLGLHEDEIYWENPDYGLLEEHLYRVQKLTSGDYFFRRHTSSTVTSDDYYQIRGFGEGKTGWNTFNPIKVNVSASGKIEKSSLTKTA

SEQ ID NO: 8552 - protein, 1528 aa, unidentified
  REGION 1..1528: note = Description of Unknown: Cas Enzyme sequence
MRILGLDLGTNSIGWAVVDNSQNQILDAGVRIFPSGIEPDTIGQGDGEKSRNATRREKRQIRRQYFRKRLRKIKLLELLIEQGMCPLTLEELKKWKNWDKNKKNEGRLFPDSIEFSNWICLNPYNLRERALHEQISLIELGRIFYHFIHRRGFLSSRKSKEDSTIFTKGKPDENILSINETKEKIGGTTLGAYLHSISFKEKEPYKITTDDFGKEIKVRGRYTLREMYIEEFERIWKKQAEYYKLDDCLINSRKSRVLYGSLTNSRNQQKLKNLQQRYGVENIKIVDGDKDTQKKVITFSKIKLKEKLGGYIVSTADENGELVVEHKSKESILFWQRPLRLQKHLIANCRFENELPVITGKGDYLVDSKGEIVRRSKSPCPLSHPDFERFRAYQFINNIKYGKNVKLTEIQRQQILDLINSQDGGFEFKKISQELNLTYEKFNYEDEFKVVGNYTTKKLKGLFPDEVWNSKYDEIWHCFYFFEDSDKLFLKLKQDFGYSGDQEKIAKIKLKEGYSNVSLKAIRNILPFLNKGYQYDRAVILGGVRNAFGKRWDYFKEDHYQIERKIVDILNEDNKEGEAIEKIKDMLSAPIIGFGFAKEDLRFTQLYHHSQEIEKSDDLISELPKIENLRNPIVQQALNETRRLVNLLMERYKEKYGSDFHFDRINVEMGRELRNSKTERQEMSIKIRENESKNDEARHRLAEFGLKPYRDNVQKYLLFKEIESRASGPVICPYTGMIVSIKNLLGSENSMQIEHIIPYSISLDDSFGNKTICESKFNGLKGEKTPYQFYCENPDPELWGIAKFSNPDDGWDAITERAFRILPYLKAKRFTSKKPFERMDFIERQLNDTRYIAKKAKDILSSVSKDVRVMPGQLTAELRHLWGLNNVLQPAKTIKIEEIEISENESLPVYLTVDEFGNTVSVKRKQNARPGTSNDEILLSGEVKGQKFEIKKFNLNFDAADIKDGWYWAKIKVKESLRIRPIYTDKPLTDEDHVVFKGYVSKGLFNNDSLGKRKVQLDDGRYWARVAITNTKFEEPVKGKEPAPNRNQILLYGNVENGIFSSYIYKCEANLPDGKYWLILSYNAEDIEFTKAEFPKPDTQQNEFVITATIDQMSCLVADVDPVYQKPTNINPGRYYAILTIDSVPFEYYPVENKPDPVEKGQELVEGNIWVDSLTGEIKFDPKKNREDHRHHAVDAITIALTEQGFLQRLSSENANRKNKLRNHPFSTEKFPEPWTGFDKDVRKAVESILVSHKKSNKVLTKNKKGFSVRGQLHKENVFGKRQAPMQNTGFHRRTKVTELKDYKDIAKVVDVTIQKIIKDHLEEKCNVNVNHPKGFEIPKDAFYKDGKWRLFLPNKKGDPVPIKKIRIKENLGKAVQLKSNINQWVNPRNNHHVLIYKDYDGNLKEDVVQFWTVAERILQGIDIYQLPEDGKEIIATLEINDLFVIGLTNEEYELNKNNNDYLSKRLYKVEAVSSKYYEFRHHLQSSQKNSIEPYYFIISSLGTGKKGWQTYNPIKTKLDLLGKIIVK

SEQ ID NO: 8553 - protein, 1425 aa, unidentified
  REGION 1..1425: note = Description of Unknown: Cas Enzyme sequence
MKLITGLDIGTNSIGWAVIKYDFENKKGNILGMGSRILPITADILSDFNKGLTVSSTANRTNYRGVRRLRERELIRKQRLERVLKEIGWLNESFKVNDKVSYAYFLDGEGKHQFQFMDAYNLMKAEINHLNPSVKAIPYDWTLYYLRIKALKEQLTTDELVWVLMSFNQKRGYFQLRGDELYEEKGTDKYFVSDTVIDIVETGDVTRGQKQLEIHLNDGLVGIYSSAYIPDWNGKNIDFLVTEKVLKDGSKTVSFTTPKEEDWTFRKKRIESELENSHQTVAQRIYQALTREPHVKIRGKEVHTIDRKFYKNEMLSILQKQSEFYKELLDLEVSKKVACLLYKNNIAQQKHVSQMSLIDILVNDIVYFQRPLKSKKSLIEKCKYEKRAFLKDGELVEISLPGAPKSHPIFQQYRIWSLIHNIAIMERKHQLPNGSVELDKDVTNIYIKSHEDRAKLFELFDSNAEVSENQILKLFGLKIDRFKFNYEEGKKLKGNETKSAVSKALVNASIDSNRISELLNDSNKLEKLWHMIYSIAEQKNLEKALNLPWLGLTETEQIALLNCKPFKKEYGSLSVKAMNKLLPVMRSGKYWEAEKVEKFIQSKNIDNIDSSKISAKVSFQLEQLVDITDYQGKSEYLASYIVYGRHSEASEILMYNSPEDIKLLKQHSLRNPIVEQVLNETLLVVRDIWKKYGRPDEIHVESARELKLNNDQRGKATNTRNQNEATNKRARLMLQELMKDNGDINPYSIGHLEQIKLYEEASVKSLGKDDGELFGISKKAEPSASELKRYLLWMEQKYKSPYTGQIIPLSKLFTPAYEVEHVIPRSLFYDDSMNNKIICEAEVNKNKDKELGYNYIANSKGKQIQLSNGRVVNLLDEENYVQLVDELYGGNFAKKKCLMAKEVPDTFIQRQLNDTRYITKKIQDLLDPIVREEGEIAARSKHLVSMVGRVTSDLRDQWGLKSIWKELMTPRFIRMNNIDPSGNWYNKTPDGRVDLNLADVDIKRIDHRHHALDALVAACTTRNHINYLSALNNDNIRYELEPKLIKQSRSRNQEFLLPWEGFPLEAKNLLEKTLASFKYNNRVISKTKNKYTKYINDNGTLVKKDVSQASHPDHWAIRRSIHKETVAGRVTLREYKSVKLISLLETPKLIADKKIKKEIYKRLHIFKNDINKVKNDLKVNPILLEDKPITNTEMIVNNSDFSATRKVLTTGFTLKNIESITDSGLKKVIKTHFENFDNNSEVAFGPEGLEVLNNGREIPIYKVRVAESMGKKFPVGQDGNKSQKFVETDKGTNLFFAIYRNFETGEHFINESSSLEFSEVMYRMKNNYPLAEEKEEHQLIFLSPGDIVYEGDFDENALDLNKVYRVTNFAKHQCFFKPSNSSTPIKDKVEYTNQNKFERSDNGNMIKAVCRKLKMNRLGEITGII

SEQ ID NO: 8554 - protein, 1214 aa, unidentified
  REGION 1..1214: note = Description of Unknown: Cas Enzyme sequence
MKTLGIDLGTNSLGWAILDDTKPGESQITDSGVVVFEEGIKREKGRDSLETPAAERRKHRMARRLKFRRRLRKFKILEILIDEGMCPLTHDELEAWKQKDQFPLQNKAFLKWLKSDRADNPYADRAAAASGKVAPDVLGRALYHLAQRRGFKSSRKDARNEKEEEKQKQQDERQVVKSSIAAISAILKEKNCTLGQHFHDLYQKGEKVRGCYTGRKEHYEKEFDAIAAAQGLDEKLAARIRGVLFFQRPLRPQTHLIGKCPLEPSLSRCQISHPDFEAYRMWSFINNIRIITDDGGRIPLTPEQRETVARAFFKTARNIPFSDIVKKIKLPKGDRFNYKPKQSVATCSVTHRLNEILGTDSATWTRRHTRPDGKTVTYDRHTIFDALIFFDDDEKLAAFAKTKLGFSDDQAAALCKIPCPDGYAQYSLGAIRRINVFLEKGVELSQAVFLAKLPDIMGAEIFATNEPEILSGIQDCIETYRQSLRDRDTSSKKSVIPLKDLLHGYLKSRWNLTDDQLARLYYRDSLADTAYAGIPQSDTIPPVNLGMLRNPLVQRTLTILRKQVNFLRKSGRIDADTRIHIELARSVNNRNTRMAFAEWQKSREEQRANARKRLVELGLTQNPTDTDILRYILWEEQGQRCLYTGDTISATSLLSDAWQIEHTIPRSRSGDNSQVNLTLCSRDYNCNRKKGRLPVECDNYDEIAVCIRPWQETVEQLENTYHNQQKTARNTPQDNPEMRAKNRQKALATRMELDYWRDKVRTFTLPAEKLTDSFLNRQLVDTGIITRHAVALLRSTYPKTYPVNGTAVAWARHGWGIQDIREKKARDTHLHHAVDAMVIAGLNRDRFNQICAFCKDDGDKDYDALFPEHLHPFPGFAQAVFNASESILVRHLARQTAMKQTRRKAVRLAKARRLDNGTVLRKVPARGDTVRGQLHKETFYGCIHNPNQGGSKTFVSRKPLNSSAFESQANLQNIVDPAIRDIVTSEIQRRMDAGTPFKKAIDDGNFQMPSGVPIKKVRVIEKTVKTPLQIRQQLFTSKHDYKNPVYATSGEGSNIRLALFKKEVKGKIRYAYLGDSLMEWARRSPGESEPHGRTDMGEFIGYVYPGQMALTYQGEPVELMDLRPSQHKNRLYKVVKFNAQDGRITFIHHAIAHAMTDLGTRLKAKGKNAAGESKIDTNSPHELLLVSPSTYLSQVLFEGIHFKMDLAGKINFLL

SEQ ID NO: 8555 - protein, 1099 aa, unidentified
  REGION 1..1099: note = Description of Unknown: Cas Enzyme sequence
MRYRVGLDVGTASLGVAAFSLDENNNPLELVWKHVRIFDEPLEKSQAGLKSKKAGRRAARMQRRQIDRRLGRTKAIAALAPLLGIQIEPSVDSGRTLLEIRAKAAREQIDLSDLIRVFIRLGKRRGYGGEFRPKKEGAKLGEVEGGNHDLKAEMQALAQIKGCDAVTLGEFLYQRWLDGKPTKLKIKEPEDKTTEGKNLYALRGQLVAEFEQIWQTQARFYPTLNSQHEGRSLKDKFYQTIFYQRPLKAVSGMVGQCSLEPTLARAPRAQLAFQHFRIEKTLADLRWGAGKRAEKLSVAQKAVIRQLCDEKDVVKFEAIYKALEAADCPKPETKGLNLERLSRDEIPGNKTNQVFRNLDLGEAWLALDERTQIQVINFLSDLGSPEQLDDPLWHTCFAKADGTIRKLPEAFVAFINLLKSHEKFDRLSKMGFEGGRASYSIKTLNKLTDWLDTPWWPDGWQGEMRPDEDSAVRVCYPESFNQPVTLKDNLDFAPSTGNAVVDGSLRQMRYVLNRMLADLGSQPEQMVIEMAREMSVGISKRNERESENNKNRNARLDAESEIRNHGVTVTPSRVRRYLLWVEQGKGHCPYCTKPIKLGDALNGAETEYEHILPKSLTQVGLKRSEIVLAHRNCNQEKGNRTPHQAWGNDAERWQVIQARAKYFVDNKRYRKAKLLLLEDFEAEVLNDDSIAGFVDRQFHQTSWIAKEAAQWLQGICKTPVSVSRGELTAMLRRKWKLETVIPQARIEEGLPILDEEMQVVSVEDFEKYRDVWEGHRVLDGHGNLDKSRHTDRKLNKRIDHRHHLIDAMTIGLTSRSLFQNMARQYKFDSEREMRGQKPRLEVAEPPIKNVREIALEAIRECPLSIKPDRYPDGAIFQETAYGIAVKVGEDKARLALRVKVADLIDRKKGTVEQARKAIQSIVSEAIREIIAKDFESRIVAGETATEALALPIYQTMYGQRVEIKKVKCFTSNYADDVAIISHTSKDGREHLKRLPNAGYAYLETEIFDGRIGKQELVNTHQAMKRKRKPQFENMVRLHKGDTVLDSKDGKQYRIGYFKAEGVIAVIPIVDPRAFDAIKEPESGKKKVSFSQILRLKRLD

SEQ ID NO: 8556 - protein, 1025 aa, unidentified
  REGION 1..1025: note = Description of Unknown: Cas Enzyme sequence
MNYRLGIDLGTDSLGWSLLELDSSKEPTNIIDAGVHIFSNGRNEKGESLAVERRIARSMRRRRERFVRRKNKLINYLTKLNLLPSNKAEFKSLENPKGQPHYPYLLRNEAIHRQLKPYELGRVLLHLNQRRGFKSSLKTKDDIKESKEVMKRASVLDDMLKNYDSKTIGELFYKRIKKNEQVLCRDGVEFRTLRSYYENEFDIIVENQKKYFPNINDYNWKEIKEIIYKQRPLKSQIDIIGNCEFIPNNKRSPKASPFFQIFRIWQDINNIRIVNRFKKQTRNLTQDEKQILFDALNNQKTMKKEKIVKLLNLQESDKINLFGTIREELKGNQTRCTMKAKGMFGPLWDSLDMDDQHFVVTKILQEPNDDKLREEIGNFLVNLEEENVQNILSAENEINKDYGSLSVEAIKVILPGLEKGLDYSDACLVAGFHHSKKQDTELLNKLPYYGEILKGSTVKVKQGSEDEIKFGRISNPTVHIALNRLRVVVNSLIKEYGKPSQIVIELTRDLKNSKKKKKDIEKRIRENTILNKEIRKELSETHNLSETISRESFDKLKLYKELKPLNHCCVYCGKNIGESTLFSDAIEIEHILPFSRTLDNSFSNKVLAHRHCNQIKGNQSPYEAFGENQHPDYVYQEILKRVETLPKAKQHRFDSDAMDKYEDKNAGFIERQLTDTAYITKISRDYLTSLVGHKNIWAIPGRLTAMLRHQLGLNSILGEDGKKNRFDHRHHSVDSVAVAITDRSLLQKISQLNAKEANIYKVEIPEPWKDFRHTIQNKINKIIVSHRPDHGKEGRLLEETAYGFVEEKDKYKTWVKRESFINLTDPKIKNIRDKKIRNELSKLIENSSSKPSDVILKEYAQENDIKRIRVLVKDNSIIRVPSEPYKGYASSETAYVDIWSIPSRKEKIWEGIFTNIFEANQNKNKAKPHPAAKLVMRLFKRDCLRLIINGQEKIMRVIQIAPSLKSILLTEHSQGGPVGTRNKDVKDPFYKKLILQTVISGLPKYQATKVHVSPIGKITYVELKK

SEQ ID NO: 8557 - protein, 1221 aa, unidentified
  REGION 1..1221: note = Description of Unknown: Cas Enzyme sequence
MKTSPSPRRYRIGIDVGLNSVGLAAIEIADDDSPISVLNMETIIHDGGVDPTANKTAGTRKAVSGVARRMRRLYRQRRHRLANLDNTIRDLGWPIVDLETMEDPWYPWVARSRLSTQRVDNQEHLHELLSVAIRHMARHRGWRNPYMSVHTLMAATGPSKHFMELVASIAKTLNLDVHDLAERTLAEIVCMVRGMPVRERVKESVNKKTGEIKRMVFVDDPRKLRGPARLGKNDGRSRVGLLTSKVHQSDLIRELRRIFEMQGLSNELLHIIITKVFQAKSPKGSAKERVARDDLDKTQYRAEKASLAFQRYRIVTILCNLRVQEQSGQRALTSHERMACLEFLWNPVDDRGQTMVDVGWADVAQRLGVTRASLKGTAGQTEDGERASARPPVNVTGACVRACGVKDLILEWDSADEAYQEALVEMLGNGSGSGANRDEVSRAEEFIADLPEDQLAKLDAISVPEGRAAYSVKTLRRLTQRMLTTEDDLHAARKAIFDVPDDWKPTPPDMGEPVGNPAVDRVLKIVQRYLLACQREWGVPLSVNVEHTRDGLMSAKQARDVDRENNARYDRNRELEADIAAYLNQNGVSVRSGDDDSFEENPDTPLTGQAIGRRKADIDRMRALSRQEGRCLYCGSVLDFLTMEMDHILPRAGAGATNTQVNLAAVCRPCNHSKGKQPFAVWALSGIRPEVSLEDALDRVDGFRFFGIDGDDRRYQARFKKEVKDRLRRSDCDEAIDNRSMESVGWMANELHHRIEAYFAKENERTDRVTTVAVFRGWITSEARRAAGIEDKIMLIGGKAGKNRLDRRHHAIDAATIAMLRQGAAQSLVTQQKAREDGFGDFDIAQILTERDSMHRAYELTTSDYMLDKDDRPRPAWTLYKGSNPELFNAWQSQMRTMADLVQERLTEDGVPVFEFLRLKVGSSSGHEDTMKSTIRARVGDEMSVAMIDRSATPQQWVALTRNPDFDRVQGLPADPARTVRVGSQWLNANDDLEFFPTGAGCVAVRGGYAELGASFHHARIYRCVKTLSSGKAKPFYAMMRVYTLDLLPFRDKGVDVFSVPLPPQCMSHRTAEPKLRDALADGCAEYVGWIVPGDELLLDMSTQTTGAVGTFLQQFPGTCSWVVQGFFAPGRLHLRPRYLAGEGAVSEAENKKVSETRVVVPPSTEKIVSGQGYLPAVNVLFSECNPRIIRRDILGRVRARSAAHLPASWGVGAVSAESSV

SEQ ID NO: 8558 - protein, 1085 aa, unidentified
  REGION 1..1085: note = Description of Unknown: Cas Enzyme sequence
MEEYRKYVLGLDLGSASLGWALITLDKSDNPTSLVHAGVRIFEPGVDGTAIDIQEGKDQSKAVERRTARLHRRQLRRRAYRQSKLFQLLQQHCLLPRSESQIPLAPSAERDAVLTVLDRRLCQKWQASSVGKAFEELPLYQLRKIALDDKLEPYELGRVLYHFSQRRGFKSNRKEGRKESEKELGAVKASIAELTVKMQEADVRTLGEYFAGLDPWEQRIRGRWTSRKMYEDEFAKIWKKQASYYPGELTENLRREVSYWLFYQRPIAAQSHLIGKCELEGPNHRRAAWATLEAQRFRILQKVNDLKIIFPGNPDAVTLSAEQRRLVYDLLDHEGDQTFANLRKQLKLDKKIQFNLERGDEKRLRGNRTNKTMRSVFGERWNTLSGEEQKQIVEDWRTSESHESLVRRGMEYWGLDEAAAQAWAEAKPEDGHCALSRKAINKLYELMLDGMSFKEAETKVYGDRFSGGVALDKLPSLHVHRNIKGSTKAEKLLADLRLGAVRNPAVERALTELRKVINAAVSEYGKPYEIRVELARELKKPRKERETATKQNRTRQKEREKAKADLLMECGIQNPSRSDIEKVLLFEECGGKCPYTGKSFTLRDLFQNAQFDVEHIVPLSRYPDDSFQNKTLCWHEENRNIKRNKTPFEAYGKDTERWEEMLTRIRAWRPGNPGKLKRFMLRSEDELEEFTARQMNDTRYASVLACRLLESLYGGRDEATATGTRRQVIYASSGAITATLRRAWGLEAILREAAASSNGESKGKPRTDHRHHAIDAIAIALSRPNFIQAMARSASLDPRFELDSRSFRRTPAPWPNFVDTIRPHIEQMIVSHRPEHKMSGALHEETNYGRPYSHDGKTTVNVRKPVTSLSTGDIEKIVDPAVQFAVQQKAAELNGDLTQCETSQNWPVLFASDGRHISIKRVRIRKVMKPTPIASGNRERFVALSNSHHTAIFALMQDEREVEWEGVPVSLYEAMERKRKKLAVIDKKHPDGDQWRFKFSLMGGDTIELHRACHHSDGMCCPDIYRIRTIAGNGQLSMVKITDARLIKDIKGAGEWWSPRADALRKLDCRKVVVDTLGRVHIAND

SEQ ID NO: 8559 - protein, 1476 aa, unidentified
  REGION 1..1476: note = Description of Unknown: Cas Enzyme sequence
MKRIGIDLGSSSLGWVETEDGKIVKKGVVRFETGMSKGQSGGYVSPTRERREARSKRNLIRARKYRKWELLEVLIDGGFVPLTKTELETWSKYKKDGIRKFPENELFLKWLACDFTYIEDGKNYKNPYELRVKALENQLSKHELGRALYHLVQRRGYKDIGETDTETEKQIARRGESGFQKALDENDKIISKALLNEFLNKNKRARNQYPYRDEYRYEFEEICKAQGYDVSKYDDKDGSYNNSFIKKLWKAIIWQRDLRTQKGNIGKCTLEHKKLRCPISHPVFEIFRTWSFINTIKYYDENNEKQFIAPEYRKELFDWFLKKDQNFKFEKIKDFLNKKYGISTKYNYPITKNKKGEEIYDTSVSGMPVCKGLIDVFGEQAREALDIVEFQNTTQKDKCGGFGNAFKVISNYSIFDLWHILFSFDEKTAKDKNFLTEFATEKLNQQKENQIDVNKFVKLKDRFLQGYADLSVNAMCKIIPFLKEGYLYNEAVVIAKMPELLGENWEEYKDKIVNSVKEANNIYEWNKLVVGITNNLIDKWKGTKEDEQIPHKKDTAYILDDYDFRVITEVCKNNIGENLWAKRKDKTEIIEAVKKQYQEFCFDEKRKYRELITLTDIFNEKLKSLNIDIDAKQLYHHSNTENIYLKKCKINKETDKKELPKAKNKNGFDVEILPQVQIDSIKNPMFNKSMSILRRLMNEFIKNGEVDKETEIVIELARELNDNNKRSAIEDYQRDRENNRKKYREFLEEFTKNENLNLNIEESIPTFELWTEQTFEKAVDENGNEIINKNRLEILKEKDAIKRYELWTEQKGLCMYTGKMISLTKLFSKEIEIMHTIPRSILPDNTMANITVGYSRYNRDLQKQRFPKECDNYYKDVDGWGTSIAPRLKNWQELRDDYKNKYKDREKAKGNEDEKTKNKRIKEKHFWKMHYDYWKDKVERFEATEVKDSWARRQLVDTQMVSKYAREFLKTYFMKVSVQKGIVTAVFRKLFGFQEEDEIKSRNQHTHHAIDALVLTLIPTNSSYRERILKEYFKAIENNEKEKIKAIRQNEIPQSFNVQKFITDIENSTLIYNYENDKITKQTSKIVRKRGVKQYLKDKNGKFILDGNKEKILLRAKGDTVRSELYAQTYLGKIRDVERFDDGQPKRENGDWKYKTGKDEFCFVKRENIDKVKASDSLISSIIDPVIRELVRKQKNNSEIKDYQGNIIRHIRIQTKAGREVKERLNYRSEHNYKNKFYAEAGSIPYAILLQQFNKNEIKREMLPIASYEIAKAYKKTGGFDIEKYIQEEKPEFITWNKQLLKVGQKVLVLKEDIDYEKRNNIDFQRNRLYVITQFSEGSIWLQYHLCALSKDEVKNVVSLAKDELLYRYEQKYEIPAVVEDLSILDNRARKEDFENRKYRFDAIDKSFRLKRLSEIIGIAKTKEIKKELDKFKAIPSIIEIEGQTHLLKMSKENWNFLVEDKDFEMNIDGTIKWKE

SEQ ID NO: 8560 - protein, 1110 aa, unidentified
  REGION 1..1110: note = Description of Unknown: Cas Enzyme sequence
MKDPYLPWRARIRAVESFISNDKERKETLSIALRHIARHRGWRNPYSSISSLAEQSEQNKDFYKKLFVKIEEWKADNGLEPGWKVRVDPENSEKLLMPDWGADEIWGSRPTPAELVKDFLEPVPGVRIRANHVFADGSTPDPSVQVGKLHQSDYYYEVSRILQTQQVDDAMAQKILQAVFTAKSPRGAAAALVGYDDLQPTKHRALRAALAYQRYLVISTIKNLRIKEESGNFRGRSLTDEEQHKLYTYLTSEEVAQKGDVSWFDVADQLSIERSQLKGVGGITRDGTPISAKVPPYLTTEYKLFNAPGIRKELRPLAEWLQNADELDKEWLIESLSNAGVPEPKTDAEHAAKNSVDELFEEISALDESALEKLDSLSLASGRAAYSIDTLQRLTKRMLEAPDIDLHEARKLEFGVADDWHPTPKWLGEPTGNPAVDRTIKIVSRWLKAVVKEWGVPVTVNIEHGREGFSSPKVAREQQRDMDKRYQARKEESKKIAEALSADSGENGKGQTKFRNSDIRKWRALQRQNCQCLYCGKQISMITTQMDHIVPREGVGSTNELANLVAVCADCNLSKSNHLFSTWAGPERLAEAKERVDSWMPDGYLSGKRLVQYKRDVKSRLEAKEVDEPLDNRSIESVAWMALEIREQIQGYLFPEGGQEAMKRVNVHRGWITAAARKASGLEKQIHWIGGGERKSRLDRRHHAIDASTIAFLRPGVRTVLVTQDNLKRAQQDLGDANFTRFFGFTSWKDYKGEDSDLFARWKDQQMAELLGLLNEGLDNDQIPVTRPVRLRLGVGRAHEDTVYPLLRKKVGDALSVIAIDKASTPALWMALTSHPDYDKREGLPEDRSRRIRIHDRWLDAQDDIGFLCEKPEELDAIKNAVYTEVRGGFAAIGNAIHHARFYRLPKMNSRGVQTGWLYAYLRVFQQDLLKSRDENLFSVELPPQSSSRRSADAKLRKALDEGTAEYLGWAVAGDEIEIDPTNEYFSPEGSSAINKFMRVYPNTSRFKIVGFPTRDQIRLSPSQMASEGLGKDAKSAVLLESDDWTESDNSNALTIFGDIAGLNGSWHPSVDTLLTTHPQFIRRNTLGQERWYSKSHMPTSWRVSPHPEF

SEQ ID NO: 8561 - protein, 922 aa, unidentified
  REGION 1..922: note = Description of Unknown: Cas Enzyme sequence
VYDMIFSKDNTIVEQLWEVIFDVRNHEGSEYDTTSKRVSSIIDVLEKYTDKGTATELALKLAQSVKFPRKYASLSVKAIQNILPLMLLYPKNVSEQIKIKFENIKHLVETGEIVDNVDYDLEDYVIDCVKSNSNVLERGGLMEYLAISLVYGKHTAETIKAQVKNYHDIKYKQRNLRNPIVEQLVNETMQVVKAIWKQYKINSEDLEIRVELARDLKNSAQERDKIYKGQLKNQRINDSAKKRLQEEGIALTDENILKYRLYEQQKYLSPYSGDTLTVGAFDTYQIDHIIPKQRYYDDSFANKVLVEDILNREKSNRTAWEYITQQNSKYKIRTVDDYVHYVNESFFGKKKKNLLAEKIPSNPVERQLKDTQYISIAVKNELAKIVGSENVKTSTGEVTDFLRSRWGLKKLFMELTESRFKQMEFWDLDENGNPKTEWVERYVDENGKNIYNIRNWSKRYDHRHHAIDALVVALTEQSYIQRLNNLNKYVQDELTERKDEFRIEQKENENILDAFFNLDANRRDKILQTMESSRKFDLPISDLIKQVREHLETMLVSHKPKDKLGVKIDERTNNKQLRIRGALHQETYYGKLNGKDTKTIEISNLKAKDIDKIIDDVLKKEIDIHRKKYDSMKEAFTGEGLKLFNENRFQRKNPTRLKPPVYKVKVWYNTKETTENSLQRLYDNNEKQSVVTGDNYLFLVMGEDTDKGEVRVFDIASLYDSVDIAKDALKDGILDLKKKIAEDYRLSYGERNKVRGKAKAQANPDRVLFTLQQNELVYLPTDPEDSVLRMSNNEFEEWIQNKENKKAFCERIYKVVDFNQGICYFIPQSYAKIISVLKDLSEQQIEELKKQRGDLKLKKYDLNFVEFGTFGSSVKTEVGEKFIKENTKEVPIGKRKTIDLPLIQDTCIKIQIDWLGNIKLVK

SEQ ID NO: 8562 - protein, 974 aa, unidentified
  REGION 1..974: note = Description of Unknown: Cas Enzyme sequence
MRWRLGIDLGTSSLGWCAVELDANGHAIRIIAAGSRIFSDGRDPKSKASLAVDRRAARAMRRLLDRFKQRQAALLKHLTLAGLLPDDEAARKALATLDPYELRDRALREALPLPHIGRALFHLNQRRGFKSNRKTDRGDDDEAGKIQIGVGRLHDAMRDAGAATLGEFLFQRRASAVDQNRIPAVRTRLRPETGADAKGDGYDFYPDRQMIEDEFDAIWQAQAPHHPTVLTDEVRARVHEVIFHQRPLKQPKIGTCTLVPGEERLPKAHPLFQRRRLLEELNALRIVRAGETPQKLTLAQRDALYLKLKDRRSVPFASLRKALKLDPDARFNKESENRSELKGDEVAAELGGKPRFGKGWTHMDPDAQWAIISRLRDEEDDAKLRAWLQEAHGLSPDQAKAVAAARLPDGYGRFGRTATVKLIEALKGAVIVYSEAVAAAGLGHHSDFRSGEAFDLLPYYGVVLERHIMPGTGEPTDSVEARIGRLTNPTVHIGLNQLRRAVNRLIKVYGKPDQIAIELARDLKLDDERKKEINKRNKLNRDAAVRRSKKLIELGQADKGNNRAILKLWEELNPENVLDRRCIYTGRQISARMLFSGEVEVDHILPFSATLDDSNGNKLLCLRDANREKRNRSPFQAFGHGPDWEEIAARAARLPREKSWRFAPDAMTRFDEQGGFLERQLVDTQYLSRLAHEYARSLYPETGEGSSHVWVSPGRLTEMLRRNWGLNTLLPDHNFGGGADQPKNRLDHRHHAIDAAVIAVTDRWMLQRIATESAKRAIGERVTADLPMPWDDFRDDLERIVRSIVVSHRADHGTVAKVKGRDATAGRLHNDTAYGLTNETDERGNPIVVHRVPLTAIKKPADIEKVRDTALKAALVQATTGLEGTAFEAAVLKFPRLGPLPFRGIRRLRIIEPLQVIPIRDGTGHAYKGYKGDSNYRYDVWELPDGKWQAEVVSMFDAHQPDWTSSLRAAHPTA

SEQ ID NO: 8563 - protein, 1455 aa, unidentified
  REGION 1..1455: note = Description of Unknown: Cas Enzyme sequence
MKKILGLDLGTNSIGWALVEQGIETNSGKILGMGSRIIPMGQELSKFEQGQAQTKNANRRIARGTRKLNKRYKQRRNKLIYILQQLDMLPKQIKLSEPFTNPLKLDRISILPIDKKQKQYSALDLLELRVRALSEQIELEELGKILYLFNQLRGYSGGGNEPDKEDNDDENTENEKKRKNESYVVFGKILSLSEPENITLKGKELKKHKVFFETEDGVLEGDSFLDILKVGESLELLVNITVSKKYGETITFKLPNKTNWRKKMENLEKELTELSQKEGREIYLSEYFLSILKDNKWAKIRNNVILRYRYQSEFDAIWKEQSKYYPFLSNCTQEKLSKILNFIFPGTKDSQEKYRQVGLEKGLYHVIKNQIIYYQRELKDQSDLISDCRFEKGEKAVSKSHPIFQEYKVWEQINKLTINTKIEAGTNRKGETKYKYVDKPIPETLKEWIFDELQEKKEMNFSVVLNKLKKEYNLRDGIDFLNGMNPKAKLRGNETKLILKKILGNELWEKLEMIDIARQIELWHILYNAKGNEYDIDSERTSKVLDFLKKYSGEISNIEQTAIQISKTKFSRNYSALSLKAIEKNLPLVRCGKYFDNEFSEILNEKIIYLLNENVSDPFEKAVQEYLENNVDVLLYGGIMNAYATILTYGKHTAKEYAENERIDNYRKITRLKQGELRNPLVEQLINETLMVVKDIWRNEGYGKPDEIRIELARELKNNAERRSKIYKSNSDRRKTNDEVKNLLIELKQEVTLANIEKYKLWSSQENLEEEFVKAYKDPSKSEIEKMRLWRDQGHISPYTGQPIPLSELFNRERYDIDHIIPQSRYFDDSFANKVICEKSVNKEKNNRTAMEYFEVGSSIPSVFSKENFINHVNRYFRDAKRKNLLATKVPEDPVARQMKETQYISVRVKEELNKIVGNENVKTTTGGVTDYLRNQWGLTDKFKQLLKSRYENVQPLLAESEYEKYTTSVEKKRKEYEKLNIPFTDVVLSKENFIQSFNQNFLQKKNNKLVIKGWSKRVDHRHHAIDALIIACTEQVHVNRLNNLNKELQTWLDNHKKEILPNFEGSPAELLEEILNLDEQKQKAVFMQIEKFKSIDMPWTSFPEDAEKAIQEIVVSQKPKDKLLIQYEERKEGGKIVKTDKLQLKIRGQLHEGTLYGKSQGVETYRIPLSKLAVKDFATEKTIDKIANEYLKAIIKQHLKDFDNKKEEAFSVEGILILNKKIAEKERKNEWKRKGKKKKIGEIASHTPITSIKIFYRDPQKIRKKKGQEEIEDALQKLDRDTAFNDNLYVATGGNYLFAVMEKDEKRVFDLISFFDATNLLKDEFNKAKSKREFNKDMVFKNYFEEKNKARLLFTLKQGEPVYMPSNGEDVIVDVDSPLYENFWKDKTERSKNIHYVTKYSGKQIYFIKHNIATPILNKQEFGSQNAYEKVGDLSIKEHCIKLNIDRLGNIKPL

SEQ ID NO: 8564 - protein, 1095 aa, unidentified
  REGION 1..1095: note = Description of Unknown: Cas Enzyme sequence
MRYNIGLDIGISSVGFAVMELDKDDTPIRIAKIGSRIFDAAENPKDGASLALPRREARGMRRRIRRKRYRKERIRKLLVEKEILTQLQLETLYAQSISDIYELRCDALQRCLTQEELARIMLHLAQRRGFSSNRRTDNDDNEAGKMKTEIGKNTALMSEKGYRTVGEMLYNDERYNERKRNKSDYLNVVTRDMVLSEARIIFSTQREFGNAFCIDSIEEQYLEILSSQRAFDEGPGKGHAKSPSPYAGNLIENMVGFCLFESEKRAAKATYSFERFNLLQKINNIRIEDRGYAFPLTNEQRICIISEAHKTAKLDFSKLRKLLNLPESQKFNTVRYSRDSDIHTDEGKVKFNHLPAYHDMRKALERVSKNRITSISTAQRNSIGQIFSMYKGEDKIKFALAEAGIDPLDIDTLVSNLGTFRKFGHLSAKAIDKILPFLEQGLTYDKACAEAGYNFKEHNNTEKGKLISLKHLAEESENTITSPVVRRALSQCAKVINAIIREMGESPVFINIELAREMAKNFQERGKQEKSMLENNARNERIKQRLQSEFGLINPTGQDIVKLKLYEEQSGICPYSITQMDISRLFEYGYAEIDHIVPRSISYNDTHANKILALGHEQQKKGNRLPLEYLTGKNQEDFRVWVNSSHLRGEKKKRLLKEAITEDERKEFKDRALNDTRTMSRFLFNYLSDYLLFAPFLSGRKRHITAVNGSTTYTLRKRWGLVKLREDGDLHHAADAAIIACTTQKMINEISNHYAHNEKRYMDTSKDPRGETAERFPQPYPYFREELMARLAPTKEKLDIAMGQLNPMPYPENELAALKPVFVSRMPSRKAGGAAHKETIKGITDSGEQVKKVPLTALRLDKNNKIAGYQRTAGNGLLYDALKARLIAYDGKGDKAFAEDFYMPNRDEKHKRVVKTVKVLEKSTLNVRLRDPQGRVKASADHDSMVRVDVFHIKNDGYYLVPIYVADTIKPKLPRKAIVANKPYELWKEMSDDDFIFSLYPNDVVFVKQKKHLELKKSRKESSLPATKSYEDIYAYYKGTNIATGAITIINHDNSYTKESLGVKTLLLLEKCQVDVLGNITKVSREQRQDFSKRG

SEQ ID NO: 8565 - protein, 1255 aa, unidentified
  REGION 1..1255: note = Description of Unknown: Cas Enzyme sequence
MKDRKKRYRIGLDIGIASIGWAVLRHDENGEPDRILGRGVRVFEPCQKPKDGGSLAAERRASRGIRRSLRRRKHRLERIKHLIVTYFAISESELQKLFEIPSIKSELLIPKNIYEIRYEALEHKLTKDEFARLLVHLAKKRGFKSNRKNAKAGGDDGKLLEATKSNTVKIQSKNYRTIGEYLYKEYVALGRPTRNKGGDYSLTFLRSQTDEEISIIFDTQRKLGNILASERIEKDYKEILLSQRNFDIGPGGNSIWGWGEGSMIERMTGICTFENIKNRKAKDEPRAPKHSYSFERFMLVQKINSLRLKKADYSERALTEEERQKIIDLAYEKSKVTYTQIRKALELGDYLDNGERPELLFNFCKYFKNTKKSKNKDSALEQENVSEILTEVVATKNDSNFYIDSEKSTFVELKGFHSIKKILFDDFTTTPTLLDDIAYVYTFFKNDEAIERELSNKNIPLNIKQKLLASDLNFSKVGNLSIKALQNILPFLQESDENGNLITYDKATELAGYDFRNLNKDGTRKNRLSFNDINEHINSPVVKRAVSQTFKVVNAIVREYGDPEVIFIELAREMAQNFDERNKDEKRMEENRSKNETIKNKLKNEFGMLDPKGLDILKYTLWTQQQNMCAYSGTMISISDLFNDNATQIDHIIPYSMSYDNSRQNTVLVKTAENQNKRNELAYNYIARKDKEQNANGEILKVYEIWVNTYIWSKNKKQKMLAKKVDEEGFKERNLHDTKHATKLVANFLANNLQFAESEKYKRKVFTINGSVTSYVRKRLHFTNIDKSRDTDNHHAQDAVFIAITSPSMVNRISNFEKSNRLQKRKEIVYNNDSKNWIHTPSDLTAEKPGDLFKFQNDESIEFYDKFPPPYPNFQSEVNMWFDINPNNEEYLQQRHTQFETYSEDEHIPPLFISRMSNKKVTGKAHGDIIRRGIITIDDKGKEQKYTVSKVSLDNLKLKKDKEGNDAIENYYNQSSDTLLYNMLLEKLIEVGGDGKKAFGGKTIRKPRKLANGNIDYDTGPIVKSVKIQKSISKWIELPNRGNAYVKNRIAVANNKDRVRIDVFSLEKEEKVKTKKKVEQLSLELGEVNSNKIGDKTCDKKFYFVPIYVADFKKEKLPNISTNGLVMSEDTGFKFEFSLYAKDLIRLQSKGGFKDETKRVDANGLPIKVDKVLSNDKPIFVYYTGADIDSGRISVSTHNRESKGRASILNLLVFEKWEVDLLGNVRKASYQKRDERTLHKSWLHIRKRNKKPKGD

SEQ ID NO: 8566 - protein, 1437 aa, unidentified
  REGION 1..1437: note = Description of Unknown: Cas Enzyme sequence
LPYTTDGRLGSEMNKIIQQVSKKQKYTISLDIGTGSVGWAVLTEPECISQQSQDKHGEVLALLAKARKKVKIIENGKTLPTKKKRTNLWGVRLFDSAQTAQDRRLKRGSRRRILRRTKRLKYLREIFEQDIKELDPNFFDRLSESFLVNADEKKVYKTEKGKGPLFAGKLGEGESYNCDADFYGKYPTIYHLRQHLMESTHKVDLRLVYLALHHIIKYRGHFVNEKQNIVVEKFDIKDYIKKFVIACVEMREDNVDEYGDTSNPVRVGGFDKSSISDDNFKKANDILTNKKLSKSRKVEQLVDVFGKESKDIFTAIVGNSINLEKIFNNPDYKHGDDENIPKPSDFKYSLEAEKLDDLMSKASIVLSESEFEILQLGKNVYSGIVLSGILSKPTLSASMIEKYDLHKEQLEELKKFMRQNCSKKDYKAVFNDYDPADSKKSGIYALYIHEAKSMSQEDFYKALKKILPSESIPQDILEAMDMENYLPKQRYRVNGEIPFQIHEHELCKIIDNQKEHYPFLGEIHKTSRDKDEYKIQALMKFRIPYYVGPLATPEAISQKHATNAWIERKGEAGDSRITPWNFDEVVDKDASNANFIKRMTSFCTYLPDEKVLPKNSLVYQEFVIYNELMSCGYYTRGEGGKNKKQYFSAELKHQIVEALFKKEKNVTLQRMESFLDKEGHIPNIGKEQFFGVDKAKKGAKYNGSYSTYIDILGALRDDAHSEEQAAKTIETHKSRFEDIIKWATIFEDRDIRRRKIKLANVGEWGHFLTDPQVSRLSKLKYKGWGNLSAKLLTGIKTSEDMTILESLKDGKCKNFMRLLTDGKIEGTIKKAEAEKGDVDKLDYALVAPIAGSPAIKKGIWQSLQVVKELEEFLGRKNIGKIVVEISRDMGGQKGRRTKSRWQKLDALYSSFKEKTGEPIAAGLRDELNGYKGNEKALDNEKLYLYFLQNGKCMYTGEPLYISSLSSYQTDHILPQSLITDNSIDNKVLVKAIENQKKEAQVLDQKTIGKMIQFWNLLVKSGQMSERKLENLKRDNMTDGDRMGFINRQLVETRQITKHVTNILLEHFKDTDTDNNDNDNDKGIEILTPRAGLTSIFRTEFELEKNRAINDYHHAHDAFLNGIVAIYAYKAFPELKDLWVYGNYIRNHTASMSKNAKSVIAGMKESSWTEAGSGEIIAKRDATMSMIREVLGYRDVNIVKKTEMASGKFSNETIGKKGKDKIPVKTGYDTELYGGRVSPESSYAIIVRTSKDEVKAVSLPVVELAKYNGASDKLTYLQNLYPKDKITEIVVGKLEKYTQYRLSNGGVRLLASYQEAQSGVQMKMYKPPTEKSSREELLQAYNLLSEFIERNRLFVDAKIQLLKGEMRNNFIDSEKDVMLKVVGELMRVANGSNQGLKTLSDIGLGTTAQQLKSGNLISQGTTIIHRSTTGLYETQIKL

SEQ ID NO: 8567 - protein, 1041 aa, unidentified
  REGION 1..1041: note = Description of Unknown: Cas Enzyme sequence
MSKKVYIGLDIGTESVGFAATDENYNVLTKSGKPLMGVRLFDEAQTASERRIKRANKVRTNRIKYRLFLLQELLYNEIEKIDPYFFLRLNSSSFWQEDKDENLNSLDSLFSDADYKDKNHHIKFKTIYHLRHYLMDINNWENGIDIRLVYLACHHILKSRGHLLLDADDFNVSDVANVGKESFTELNEYLKDESEDSANYSSFDLSNFSEIENIAKNTQMKLGKKRESLRNFSKHEKDKRIEAIIKLFLGEKVKTNDVLLDKYEDLGENEKITLNTDWEELSAKLTPVLGDEFRLIEIIKRIYDWFSLVSLLKGKNSLSESMISKYNKHKNDLKDLKTLVKEKAKEKYYHIFRANNVPGNYASYIGSNLNNGKHIIKKTKNSKEDFYAFLKKELKDILSEEILDSIENGTFLSKLRTKDNATIPFQLHKIELKKILENANKYYNIDNEKIIMLLSFQVDYFVGRLNTFANDGEKRHVWMQKQEKYENIRTRITPWNYKEIVDLENSGENFIKRMLSHCTYLKKETVLPKNSLLYSKFMLLNELNNLKVNSIPISVELKQKIFNNIFKRYKKVSLKMLAKYLENDITEKDISGIDSEKGGFSNSLSSLIQANLIFGEELNSNEIQTLIEDVILWQALFTDKKQVRSKISSKYPSIDEETHKKLVGLNYSGFGRLSERFLTKNVVFCQETGLVSSIIDLLWDTNQNLMEILHNPLYNIKEWINEENLLDTADITYENIKESYASPSVKRATWQSMLVVNELIEVAGSKPDKIFIEVTRSGSNKDKGKRTMSRREQLLKDLALDIDFKELRKSLEMKTDQEMRSDKLYLYYLQYSKCAYSGDGINLSELYNDNLYDIDHIIPQALKKDDSLNNKVLVKKELNLLKDKNYPLNKTSKIWAQKDKLIAMWETWNRNKTLSDEKLQRLKRTTEIGEKELEGFIARQLVFTGQSATMVANLFKEKYKEAEIVYSKAGNVSDFRQKFELLKCRSVNDFHHAHDAYLNIVVGNTYNQRFNHNKNFYVRQYKNSENNWKIYSQNKMFEYDV

SEQ ID NO: 8568 - protein, 1394 aa, unidentified
  REGION 1..1394: note = Description of Unknown: Cas Enzyme sequence
VEKTHKHEPKQQKYTISLDIGTGSVGWAVLTDAEPDVLATLAKSNKKIKIIQNNNITTKKTRTNLWGVRLFEQALTAQDRRLKRGQRRRILRRTKRLQYLQKIFKNDINQFDPNFFHRLQESFRQNKDEKKTYKLEKGKGLLFAGKLGAGETYACDANFYKNYPTIYHLRQHLMQTTHKVDLRMIYLAIHHIIKYRGHFVNEHQKFEGFENFDITSDLKRFIDACLHKQDENEDGEPTPAIGGFNKSSLLDENMNRANKILTDRKLSKTKKAEDLAAIFGKESKDIFTAIVGGSINLEKIFNTPDYKHGNDENIPKPAEFKYSIDAEKFEELMAKITNVLTDFELEILQLGKQVYGSIVLSGILSKPTLSASMVEKYETHEKQLKELKRFVKSACSNNTYKKIFNDYDKNSKTPPGIYAQYINEAKGMPQDKFYTELKKLLPNDIPQDITDAINMETYLPKQRYRVNGEIPFQIHEHELCAIINNQKAHYPFLGELHQLKDGKREYKIQTLMKFRIPYYVGPLAMRKEYSKNSWLEKNSDEKIDPWNFDAVVDKDKSNTNFIERMTAFCTYLPEEKVLPVNSLTYQEFIIYNELMTCGYYDKNEKRYFPVELKQKIVDALFKKEKNVTLQKMVDFLEKEEGIHIAKSQLFGVDTVKKGAKYNGSYSTYIDLLKALKDDTHIEEQAAQTISQHKPRFEDIIKWATIFEDRTILRRRIKLANETEWGHFLNDPQVNRLAKLRYRGWGRLSAKLLTGLKTSENKTILDSLKNGNYNNFMRLLQDSKIEEAIKQAEVAKGDVTTLNYALVDSIAGSPAIKRGIWQSLKVVQELEQFLGRENIDKIVVEISRDMGGEKGKRTKSRWQKLDEFYKKFKENTGNEIAKNLLEELNSYKDNERALHEKEDRLYLYFMQNGKCMYTKEELDINHLSSYEVDHIIPQSLQTDNSIDNKVLVKRVENQKKQAEVLSQEIINKMENFWNELVKNNQISNRKLENLKRRKIDDNDKKNFINRQLVETRQITKHVVNILLAHFDGNNTEILTPKAGLASTFRHKFNFEKNRDINDYHHAHDAFLNAIVALYAYKTFPELKGMWVYGNYTRETNKNAVPKILKNVISSMGEDIWLDTESGEIIAKRHNILAMIRTVLGYRNVNIVKKTEVMAGALYKDTIKPKSKGDKQVPVKTGYPVTLYGGKDRDKDSSAFTVIVKTEKGKVEALPLYKDQKTAYEKATSTLDFLQKLYPKKKIVEIVVGKLGKHTLYRLPNGNARLLASHQEAKGGIQMKMYTPPTKDSSKEEFLRVYDSLSEFIACNNLFADDKIALLKGDMRINFQDSGTEVMLKVINELMSVSNGKGRDLKSLKTIGLGVSEQRLKNAANLISEGTIIMHRSITGLYETQIKL

SEQ ID NO: 8569 - protein, 982 aa, unidentified
  REGION 1..982: note = Description of Unknown: Cas Enzyme sequence
MRYSIGLDIGIASVGFAVMELDQDDSPSGIIRIGSRVFDVAENPKDGASLALPRREARSMRRRLRRKSHRKARIRGLILGQNILSQDALDRLFGSVSSCIYQLRTEALERMVTNEELARILIHLSQRRGFKSNRKAEEAKKEGALLKAIAVNEVIMKENNYRTIGELFYRDATYEKVKRNKGESYQNTVTRGMVEVEARLIFARQHEFGNTICNESFEKDYLEILLSQRSFDEGPAKFLSNGKFNPYAKGIEGMVGFCTFEKGEPRAPKASYSFERYNLLEKINHMRLNIDGKTTPLTPEQRLKLIALAHNVDDLNFTRIKKELSIPAGARFNSIRKYESDIEAAEKKEKFNYLKSYHKMREALDKVSKNRINAISTKYRNEIGRIFSLYKSEGNLREAFKSTNIDSFDVNALIENLGSFSKFGHLSVKALDKIIPFLEEGLDYYEACEKAGYDFKGMDNDSVSKLISLQHLEDATKNTITSNVAKRAISQCAKVINAIIRDEMGGESPVYINIELGKEMSQPHDKRIKDDKDNRENNAYNEQIKSELYETDELLNPKPLNIVKLKLWKQQDGLCIYSNTKIKRECLFQPGEAEIDHIIPYSISFDDSYNNKVLVKVQENQQKGNKLPLQYLTGKRRDDFIVRVKSSNLREEKKERLLKVEITEEDEKNFKERNKQDMRTISSFMYRYLSEHLEFAPSENRVRRVTAVNGKVTSMLRKLWNLRKNRADGDKHHALDAAVIACTTQGMINRLSSYYKYRETRYITANRELKERIPQPYDNFSDELKGRLNMAPEFAKMKNLPHVFVSRMPSRKVSGAAHKETIKGISDDGSPIKKVPLISLKLKDGEIENYYNPGDDRLLYNALKERLMQYDGKADKAFEEPFYKPKSDGSQGPLVKKVKIEEKSTLNVLVHKEKGVADNDSMVRVDVFHIEGDGYYLVPIYVADTVKDVLPNKAIVAYKPYEEWKEMEEKDFLFSLYPNDLI

SEQ ID NO: 8570 - protein, 1371 aa, unidentified
  REGION 1..1371: note = Description of Unknown: Cas Enzyme sequence
KYTISLDIGTNSVGWAVLDDFSLAKKHKKITEINGKVYKKTKQGTNLWGAYMFEEASTAADRRSKRAMRRRIARRTNRIKYLQEIFDKEISMIDDSFFHRLEESFLQNEDRVKGTKQEYPLFGYIETPDGETYKSEKEYYKKYPTIYHLRKRMMEDDNKADIRLVYLAIHHILKYRGHFVNEGQEFGLGGINIQNDIRSLLEAYAKDDVTSFGFTYEDYKYEDAIKILSNRNWSKSKKVYKMSQLYDNASIDQNYEKYGQGTEKKTKGFLEDKNKQQKALFDAIVGNKVDLSKIFDNPSYSDKENEDMPKAVDFKYSLDAEKYEDKLAIIEQHIEPEELEIIHLGKKVYEGIVLCNILSKDTLSASMVEKYETHQEQLKDLKAYVKSDCNKDTRDKIFGDKGIYARYVKHEILEKSMTREEFYKELKKLLPEYVEAEAISDAIERDVYLPKQRISDNGSIPYQIHMHELEKIIENQGKHYPFLRDEAKKIKTLMKFRIPYYIGPLAENDKSTFAWLKKQEGKEGQKITPWNFDEIVDKEASNKEFIERMTSFCTYLPSEKVLPDNSLLYQEFKIYNELINCGYRDKSGVKVYFSSDLRQEIVRELFKKNKKVTARQMVDFLYNNGNVATELDIKQLFGIDTFGKSPSYNTSYSTYIDLNKKMGLSDDFIEENKVVLDQIIKWATIFKDRDILKKTITAANDANWNGLLDIDQIKRLSKLSYTGWGRLSEKLLTGTLDSNKKSILDNLKEGSYSNLMRLLEDKSISETIKEAQLEGKDDGVLSYSLVEDLAGSPSIKKGIGQALKIIKELEKVLGRGNIEKIVIEMARGGGSKGKRTITRRNQIKKLYDEFAKKTEETLSRDIVAEFENRANDKDFDNERLFLYFLQNGKCMYSGNSLDIDALANYDVDHIIPQTYIKDDSIDNKVLVLKSINANKGGDVPSKEIVNKMSPFWEILAKNGQVSPRKLANLRKGKLDEKTKEGFINRQLVETRQIAKHLANILTNHYKGTKTEILTPRASLTRQFRQEVLEPDFIKNRDINDHHHAHDAYLNGVVANYVYKKRPDLKEIWVYGEHQRKIERQKSDKFLKQILEGIKTEDWVDMTTGDIFADREVVIKEVKKTLGYRAVHIVKKTEMKTGKFGDETVYKKDEKATPVKRKLDPARYGGTKSPISAFGVIVRTEKSEIKTLSISAMHYQNYAKKTNEEKLEFLKTQNPKENIEEIVVGAVPKFTIYKLASGVYRLAKSADEAGPLLQLKSISLPSKESDEDFFLDAYDFMAEHIKNNKLFKEDKLELLHATMRENYASASVEDKIKVLEEMMRVTKGSNQGLKSLSNIGLNTTLQQMRDKENLISKESVLIYQSPTGLFETRKKI

SEQ ID NO: 8571 - protein, 1071 aa, unidentified
  REGION 1..1071: note = Description of Unknown: Cas Enzyme sequence
MRYGIGLDIGIASVGYAVMELDQDDLPIAIARIGSRIFDVAENPKDGASLALPRREARGARRRTRRRKHRKERIRSLIVSKKLLTLEELNALFKGKKLPDIYELRSLALYRLITNKELARLLIHLAQRRGFHSNRNSTTTKEDGVLLKAISANEAEMKQHGYQTVGEMLYKDARYQSHKRNKSENYLNTVSRDMVEHEVKKIFTQQREFGSSICTPELENAYLGILLAQRSFDEGPGPLSTGAENPYAKGIEGMVGICTFEQREPRAPKASYSFEYFELLQKVNHLRLDMAGKTMPLTGEQRKILIELAHISPNLHFGKIRKALALPEDARFNAVRKYIDGVDVAEKSEKFKVLQAYHEMRKAFDKVRKGRIADISIAERNEIGRIFSLYKNEARVHAALDSAGFAAHDCRTLVENLGSFSKFGHLSIIALNKIIPFLEEGYNYNEACEKAGYDFKGNPTGNIVPTISLSHLADEYENTVTSPVAKRAISQCAKVVNAIVRELGNSPVYINIELAREMAKNFKDRRESEKGMLENAADNERIKERITTEFRKANPTGLDIVKLKLYKQQAEMCLYSLEQLDVSKLFEPGYADVDHIVPYSKSFDDSYKNKVLVKSSENRQKGNRLPLEYLTGERRDKFIVWINASNLPIAKKRLLLKEELSDADLEGFKERNLQDTKTISSFLHNYLTNYLSFAPFKTNRKRHVTAVNGAVSSMLRSRWGLAKVRTDGDMHHAIDAAIIACTTQGDVNQASMIGKVQRYYENKEQLYLKVDKSTGDAKERFPLPYEGFVDELVRKVNTEVFVSRMPSRKMSGAAHKETIKGVSHDGMAIKKVPLTALKLDKDGEIADYYNQNDDKLLYNALKSQLVAHGGNGENAFVEPFYKPKNDGSSGPLVKKVKVLEKSNLTVPVHNKKGIADNDNMVRIDVFHVEGDGYYIVPIYVADTVKETLPNKAIVAAKPYEEWKDMNNDNFIFSLYPNDLIYVKAKKQMTFSKVHNKSKLPEKLEQDGAFAYYKGANISGGTMSVITHDNSYKIASLGAKTLQIFEKYQVDVLGNISKVGRESRQGFAQKRR

SEQ ID NO: 8572 - protein, 938 aa, unidentified
  REGION 1..938: note = Description of Unknown: Cas Enzyme sequence
MRYNIGLDIGVASVGFAVLELDEHDAPLRIVKIGSRVFDAAENPKDGAPLAKPRREARGMRRRLRRKSHRKQRIRNLIVSESILTNQQLENLYAQSVSDIYELRRDALNRKIAPEELARIMLHLAQRRGFLSNRKGEATDKEVGKMKKAIQDNFSSMESNNYRTVGEMIFCDERYKDRKRNKSDYLSVVTRKMILDEAHAIFSAQREFGNLLCNPTTEEKYIGILSSQRAFDEGPGVGHSKSLSPYAGNLIEKMVGFCTFHEDEKRAAKATYSFERFNLLQKINHIRLDGDGYSRPLTDDQRLKIIETAHLSPTLNFAKIRKILNLPDNTTFNMVKKENEVKTKFEYLPAYHAMRKALDSITKNRIIAIPISQRNAIGQIFSMYKGESKIRDALQQSGIDSFDIDALINNLGNFTKFGNLSIKALDRILPFMEAGLNYNQACEEAGYNFKGLGNKPAGKLITLQHLAAEAEKTITSPVVRRASSQCAKVINAIIREMGEISPVYINIELAREMAKDFDERKKLDKSMTENHAKNERIKNEIQEVHGFQNPTGLDIVKLKLWKEQDGVCLYSLLQMDRTRLFEPGYVDIDHIVPYSISFNDTYANKVLVRADENRKKGNKLPLQYLTGEKRDKFKVWVNNAHLSDAKKKRLLKEEITTEDRNQFKERALQDTKTMSVFMYNYLTEYLLFSPSNRKRHVTPVNGSITAMLRKRWGLNKVREDGDTHHAIDAAVVACTTQAMINSISKHYDYREQFNADISQDPRGSEFNKFPQPYNHFNEELRARLSYTQEKLDADMRRIQLLGIFYPENELKNLKPVFVSRMPSRKTKGAAHKETIKGLTNSGEQMKKVPLSSLKLNKNNEIDGYYNPNDDKLLYAALKEQLLKYGGKGEKAFEDDFHKPKKDGTIGPLVRSVKITEKSTLNVALRDENNRVKGSADHD

SEQ ID NO: 8573 - protein, 1093 aa, unidentified
  REGION 1..1093: note = Description of Unknown: Cas Enzyme sequence
MRYGIGLDIGIASTGYAVMELDDNDHPIEILHLGARVFNKPENQKDGSTPAEVRREARGMRRRLRRKAHRKLRINYLLVKEGIITEEQRSSLFDGVLPDIYELRVQALERLVTKEEFARILIHLSQRRGFKSNRINEAKSKKENEDKKMVGCIDTNTKRMEEMGYRTVAEMFVKDTNFNDHMRNTRNKWGSYKGTVTRDLVENEVRMIFAAQRELGNAFATSNIEEKYIKIWGSQRSFDEGPGGKSLYGGNLIERMVGNCTFEEGEVRAPKASYSSERATLWQKINNIRFLGEGVESGLSSEQREILCAYAHNTERVTYKQIRKICNIPMIFLFNHVKYDKSKQCEADILAQEQATKFEHLKAYHAMRKALKDYELGADRISSIMPNERNEVARIFTLYKNKDKVAEELSKVNITELDRKAFLSKLVSFSKFSNLSIKALNKITPFLELGYVYDKACKEADYNFHGKESKGRKKYISLKNFTEEIEWQITSPAVRKSLFQCAKVINAIILKMGTSPVYINVELAREMTQSKKVKETRDKENDSNRKRNEAIKSEIKSVTGWDAKPYDIVKLKLYQDQQTAFSSRCPYCKDKIIYEELFGTGYQVDHIIPYSETFDDRYINKILVHTKCNQQKGNRLPLQFLQGETREWFIICVKNSKMDKRKKNALLKPEPTKEDKNKFKQRDLQGTQLVSRFMYNYLRNNLQFSPLLSDYETHVTTVNGGVTDIMRKRLSLKKTRTDGDKHHAMDAAVIACATEGMKRKITLYSQNRENQYNKTRANAIEKDVFPPPYKDFVAELEDKLKDVFISRALERKTTGAAHEKTIMGLAPEGVGGEPLAVFGTVQPKVLIKKVPLTKVKLNKHGEIDNYYCKEADMPLYNAIKERLRIHANDSQKAFAEPLVKPGGDGRLVSRVKLIEKSTLSVPAYKVDGKVIGWAKNDKRMRVDIYHVSGKGGGYYLVPIDAPDTIKEELPRKAVSNKPYDEWPEMKEEDFLFSLHMNDLIRVNSKGGIQLKSNKDGKDVPLTQKEKEQGVFLYFKGIDIANGTLKGAYHDNSCRARVGAKTLQLFEKYEVDILGDIKHVSKETRQVYNKKKKV

SEQ ID NO: 8574 - protein, 924 aa, unidentified
  REGION 1..924: note = Description of Unknown: Cas Enzyme sequence
NIDIPQGYGSLSYKAISKILPFLQNGFIYSEAVLFANLKKVFGENFEKNKEEAKCIVTRTIAEVGKTKEELNIVNSLIQKFFKENEYPRSVGLDEEIVYDAYKKECENYLNVNWKNASGKERERIWKLYANFLNDDQAIEEKASGKPAIDFYKLPRLDEEIKQRLKDNFNVPENGLRHLYHPSDIAMYPVSKTEKNGIKFLESPQPPSKGWKNPMAMRTLHELRHLLNYLLKIEKIDKNTKIVVEMARELNDANKRWAIQTYQRYREEENIMFAKAIVEIVQPKYPNISENDIENINKVRYWWEQQETNKEVVNFYSQIKALKEDVQKYRLWKEQSCQCMYTGKMISLTDLFNAESVNLEHTLPASVSFDDSLVNKTICDTYYNQQVKKNQFPTQLANYKETATIKGKEYSAIEPRLKKWKEKVEHLKKRIDDNKKDTKKATDIERKNFLVRQRHLLQFDYDYWNKKVETFTLTEIPIKWKNSQLVDTQIISKYARAYLKTVFEKVDVQKGSVVDTFKKIYQIKGDEQKDRSKHSHHAVDAAVLTLIPGSAKRENILERYFKAEENKQKFHTKPYEKFEMSHLLDIEKNVIVNHISNDKTLTPTIKNIRKRGKKTGWVAQGDSIRGQLHEETFLGAIKPNVRNEKGYAVKDDETKKYLVQQNNGEDIIWTVQRKSIEEVDLDSVVDVALKNHIKEQLDSGLKINEVKDFRGKTIRHIRFKKFSPSYDKSLKIKPHLFQSEHKHKSLYLANNASNHLCLLYIGKDKNGKQTKAYRFINLFEFSTMENKQNQSIFNNEDYNMFIKRSGKNEYRLPLVYIIKAGQKVLLFKNSDEEIDKFCNSNNQTRIYKIYKFNNSGSDYVFLENAIEARNDEALKKAGINPAGETEFNPEKYQPRLKLTADKLNCLFEGIDFEIKPDGTIKWLN

SEQ ID NO: 8575 - protein, 1158 aa, unidentified
  REGION 1..1158: note = Description of Unknown: Cas Enzyme sequence
AVIFGNSSYNNNENEEMPKSSDFKYSLDADKYEEKLSIIKQYLDPEELELVELGRNVYESIVLCNILAKESLSASMIEKYELHKSQLKALKEYVSNHQSRDVYLKIFGSHGIYSRYVKYEAKEKSLTRDVFYNELKKLLPEYSEREEIKEEIELERYLPKQRISDNGSIPYQIHEHELVRIIESQGKHYPFLLEKVSEAYKLQALINFRIPYYVGPLTKASEGEIGKKSSPLSKFAWMQKQTGKEDEPITPWNFNNIVDLEASNSEFIERMTSFCTYLPQEKVLPKNSLIQQEFAIYNELILCGWQAKNAPKNYFSAALRKEIVEELFKKSKKNEKITHKRLLNFLTNNGYIPASVGEVKLFGVHGTSFNANYSTYADLRNRGFSDDFIEANKHILEEIIKWATIFKDSDMLKRAIEAKIGDEKEFKWRGVFVGEEGKEQIKKLSKLKYTGWGNLSAELLTKTKHTNGKSILQNLKDGNKGRYGNDENFMQLIQDAKISEKIAKARLETASKSTLSYDFVDKLAGSPVVKKSIWQALKIIKELERVLGRENIDRVVIEMARDMKSDKKGDVPKTRHKRVEEFLDNLVADTNCCSREQLKKLKQEFLSCSDDRFKGDKLYLYFMQAGKCMYSKEELDINRLSNYDIDHIIPQAYKKDDSWDNRVLVKSDINRAKGASVPSETIVSNMKTFWKYLEKNGQISTTKYKNLTTVTLDDDAGEGFINRQLVETRQIIKNLVTILVNHYKCGCENAEQCENPHTEVLTMRGALVSQFRSGFVYVVLDEEQLKLETQIAINRGLPTPELFGGKTYKVAINKGFAKNRDINDHHHAHDAYLNGVVANYIYKTRPDLKSKWVYGEYVKETDMEKGDKFFGQLLLGMKDEIWREAKSGDKGDEFATWDEVIPGVCKVMDYRTVHIVKKTEIKSGKFGDETVYKKDAKAIAVKQGLDPSRYGGTKSPISAFAVAVKTKKGEIKTVSVSAMQEQNYRAMTAVEKLVFLQKENPKDGIVKIVVDKIPKFIKFKLPNEAYRLVKSYQESGPATQLKTMDMPTKESGVQEFDKAYDTLVCFIEANKLVSDAKISLLKKEVKENFTQFSIEDKLGVVSDLSKLSKGRNQGLKSLKKAGGFAKEQLTTSANLIKKDTVLIYQSPTGLFETRKKLE

SEQ ID NO: 8576 - protein, 983 aa, unidentified
  REGION 1..983: note = Description of Unknown: Cas Enzyme sequence
AQEYCLLTEEVCEKIKSVMTFRVPYYVGRLNAYKGHHEQRPVWVKRTEDGERLVVGKNGKKHREAIAPWNFDSKIDRHASNRAFMERMIRTCTYIQGAPVLPRHSIVYSQFAVLNELNGLRVNGDRVSVKVKQEIYTELFKKNKKVSVKKLVDFLKAGNAYGYEDVKKDDIAGIDIKGNGFNNSLASYVECFKIFDKDIEDAKVLEVVERVLEWQALNENKQMVQELIWQNYSNLPIAIQQSLGRLNFSGFGNLSEKFLNSKEILDKESDTLVSIAEIMWGYNLNLMEILHSSRFDIQSWLDRECSANTAMSDEELVAQSYASPSVKRAVRQAMQVVDEISGLVGRVPDKIFMEVTRSNQKDMKRTVSRKQQLREMYKEYAKINQNLAQDMERELDGGADKKGVNEKQLKSKHLYLYFRQCGKCAYSGDPINISDILRNSGKYDIDHIIPQSFKKDDGLSNLVLAKSEINRNKKSTYPISAVEEINKNRGKLVAMWEGWCKSGLMSAVKLARLKRTAPLTESEKYEFVSRQLVTTAQSATIVAKLLKQKFSDAEILYSKAENVSDFRNRFGILKSREVNDHHHAHDAYLNIVVGNVYHTKFSKSFWKMDDRQRLSANRIFDWNVTGAWVAPTVIEERNGTIETVDRAVGLKSVLVTKKLHSGGGEFYDQTIYPAHARQKEIERGHKSTEVLGKNSALIRRKGSFNPLSNAAQYGGFKSANTAYFMIVQYSDKKGGSVKRFEQVPAMDKKRWQGLTQEQQESELSVRNPKFKSAKIVEPKILMNSLFEIGPLRIRISGCNETNIQFHNYNQWLPSRKFVEYVRVMSEYMTKISKAKRLLEAEDFRGKEEFALASKNKPKVVSKIVNLELYDEICDALDRMYGSYPTLKGKSLGIPDMYDRLVVAREEFIKIDITEQLVMLDSLVKGMGCNPNCFDLSAVGGVKDSGKIQPTRSIGLLPLVLVRESVTGLFTKRIVIVSHAEVGK

SEQ ID NO: 8577 - protein, 1068 aa, unidentified
  REGION 1..1068: note = Description of Unknown: Cas Enzyme sequence
MSAKQNISSPHPDLHLAFDVGHSSIGWAVLQTPAAPSPEPAAELLGCGAVVFAPDDCLASTRRGFRRQRRHIRATRQRIARMRRLLAHLGVLTPAQLAAPGGAWPWLLAARVLVCAAPLTWPELWDVLRWYAHNRGYDANRAWSRQEKPDTEDSEKAQRAHELLREFKRRHGRPGTMAEVFCDHLLLREFERRHGRPGTLAEVVCDHLGVDPRGPVKSSRQRVRHLGAAFPREGVEAEVERILQAHKGILPGVDDPLIHALLRDHTARPVPGPRLPARYGQRQPDGTLRPGGLLFGQLLPRFDNRIIARCPIAYERVYQQVLAETGDREKARREAEKRAKVPAAHDADFHRFRWAMVLAQINIAVPGAPQPRNLSAPERNSLHAVMEQKGGLTKSELTQAVRQLTGGAPDNLDRLLALPDAERALVLDPVRLYCHRDPLLSVLWPALPARLQRRLRGQWRRGRALTVADVLAACGDARPAAEAALAQYLEAEAAKKKRAPDPPRIPDAPAGRVLRVERARGRAPHTREIMREAVAFVLATDRHPAEEGGPLYRSDAIREAQLRRALDEQTNNHLIRHRLKLLAGDDAAGPRALNGLFRDLANTYAGGDLGRLGRITIEVNRDLRELSGKTAQEQAQLIGQQLANFKSVEKKLTEAYADLGVRVGPGLIRKGRIAEDLGWTCPYTGQPYDALDLLHRRVDKDHIIPRSDRASDSLDSLVITFAEVNKWKGQRTALRFIEEEQGEPVPGLPQLSLRTLAAYRQAVEKLECSKGHENDQRRKRNRKRRLLLRHYVEKDFTPADLTQTSQLVRLCAQALQRLGLGCARPPVVTALPGAVTAAVRKAWNLTGCLAPANPLALNPDDLDDHGQPRPHNKTELRKITHLHHALDACVLALAAHHLPRDGEAWRLLLKRRLAPDEQRRARQLLGRVAAITPQGELRLNDLPPALKEQVSRRLRERRVVQHIPADLSGLRCEETVWRVFDPADPTPTPAASPAGWQIKTSPSPPRTPPPSSSSAANGTARTPPPPPAKSSTKPRPGAGSIRPKTKPPCWGWPRKATPPPPNSNASKR

SEQ ID NO: 8578 - protein, 1267 aa, unidentified
  REGION 1..1267: note = Description of Unknown: Cas Enzyme sequence
MKKILGLDLGTNSIGWALIETEENGNPIRIIALGARIIPLDSDERDQFQKGQAISKNKDRTTARTQRKGYDRKQLRKSSLKRVLQKYGMSFSPELLNLPMVDLWKLRADAANPNTNITAEQLGRILYMLNQKRGYKSARSEANVDKKDTEYVEQVKSRYTEIKEKGQTAGQFFAQNLTAAHNNKQYYRVKEKVLPREAYEEEFDTIILAQKDKFNFLTNEVIDEIRNHIIYFQRKLKSQKGLVAICEFEGFETNVFNKTNNKEEIKFVGPHVAPKTSPLNQICKIWETVNNITFKRKNPEGSKYKWSDWTPNLEEKQKIADYLSTNANISLSDLLKLLDLKKEDVYANKQLLKGLQGNLTFSMLAEILGNESKCLSFNLEIEPTGETALLIDKKSGEILSENKRLIVKDSIEQQPLYQLWHTIYSIKDLTECKNALVKRFGFTIEIAEKLSKIDFNKQAYSNKSHKAIRKILPYLMQGFDYSQSCSLAGYNHSNSLTKEERDKSITYEQLKLLPKNSLRQPVVEKILNQMINVVNAIIEKYGKPHEIRVELARELKQSKDERNETDKQNSANKKINEEIIKRLQELGLPTTKRFIQKYKFIFPTRDKKITEAQVVNQCIYCGQTFNLTEALAGDNFDVDHIIPQALLFDDSQTNKVLVHRNCNSTKLNKTAYDFIAGKGEDALNEYLTRVDDWYKKGVISYGKMTRLKASYEQYLERKKHKKETEADKKLWESFIDRQLRETAYISRKARQILQRVCNNVTSTEGTVTAKLRELWGWDDVLMNLQMDKYRDLGQTEIKEWTSEHGRRKHAKEEITNWTKRDDHRHHAIDAIVIACTKQGYIQRINTLNSSDVRNEMNKEVEEAKIKYNEKLSLLEKYLVSQRPEGFDTKYIEKAADEILISFKSGKKVSTSSKLKATGQNKEKGVIVPRGALHEQSVYGKIKVSDTEKPIKYLFENSEKIINQLIRKKVQIRISEHDNDIKKAISSLKKNPIFIDADNSCPLEKALCYKEVSVLKYKIQDLTEKDIPDIVDKKVKAIVEQRLNQFNGNAKEAFKNTVWYNEQQQIPIRTVRLFACPLAEALVSIKKDEKGNDIGFAIPGNNHHVAIYQDMENNFSQHSCTLWHAVERKKYGLPVVIRDTNQVWNDVIDKALPQSFINQLPADKLQLVYSMQQNEMYVLGMTHDEFNQASENNNKYLISKHLYLVWSVGDNQYWFRHHLETKNTDLKKTEGAKESKRYLLFKSVGAFLAQHPIKVRINHLGEITKIGE

SEQ ID NO: 8579 - protein, 1080 aa, unidentified
  REGION 1..1080: note = Description of Unknown: Cas Enzyme sequence
MHSNAPRPYRLGLDLGTNSLGWFVAWLDRDGDRWRPVGIGPGGVRVFPDGRDPQSKTSNAVDRRTARSARKRRDRFVDRRKRLMEALIDHGLMPPDVEKRKSLETLDPYELRAKALDDPLPAHHVGRALFHLNQRRGFLSNRKADKKDDDKGAIKQAASRLKQRMQDEKARTLGEFLWWRHQRRDPVRTRNRAAGPKAEYDLYPTRDLLLDEFNRIWDVQAPHHPSMSPDSRAKFAHLIFYQRPLKEPAVGKCALSPATAPYEKDPEGYRCPWAHPLAQRFRILQEVRNLEVHETGKSAKKLSKEDGDKVALALLQNNKVSFDKIRSLLRLPQQPRFNLESERRDHLQGDELAERLANRKLFGKTWRGLALERQIMIAEKLLGEGDEKALVAWLQDECGLDAAIADKIADARLPEGHCRLGLRAIKAMLPHMEAGLGYYEAAEKAGYDPAKLPDGVLSPTGYLPYYGEWLPNAVVGSSDPRDPNEKRYGRFPNPTVHIGLGQLRRIVNELVRCHGPPTEIAIEFTRALKHSPKEKAEIKREQQRNQEKNDARRKELAELGFPDNPRNLLKMRLWEELNPRDPLDRKCPYTGEQINLTKLLSDEVDIDHILPFSLSLDDSAANKIVCARYANRHKRRQTPSEAFGNSPGIDGHSYRWDEIAARAASLPRNKRWRFDPDAREKFDKMGGFIGRQLNETGWLARVAKQYLCAITDPYQIWVVPGRLTSMIRGKWGLNALLPDHNYAGVQDKAEDFLAATDDMEFSGVKNRADHRHHAIDALVAALTDRSLLWKMANTYDEERERVIIDPPWDGLRDDLKGVLDCIVVSHKPDHGVQGKLHEDTAYGFVKDAESEGANLVYRKPIESLNENEIERIRDRRLRDMVRAHVRAAKANGTALADALRQLHEKTDDPHIKHGLRRVRLLKPEKPEYLVPIRDRRNGETYKAYSAGENFCVEIFETAEGTWDGEAVRRFDANQPGHAPRLRVEHPGAKLVMRVHKGDVIRLDHDGQSKVMVVHRLDAAAGRFKLAPHNETGNLDRRHSTDNDIDPFRWLMASYGTLKRMDAERVRVDELGRVWRVKAQN

SEQ ID NO: 8580 - protein, 1029 aa, unidentified
  REGION 1..1029: note = Description of Unknown: Cas Enzyme sequence
DEFDRIWANQQRYYPNVLTEANKQKIRNEIIYYQRRLKSQKGLVRRCQFERQRVAPKSSPLSQLDKIWQELNIIKLTSFKAIRGEEVGFDKYGKRMLTLDEKRNLLQILTVKGKLSTKECLKVLGYQSGYKDYKLNIRKEKELEGNRTYAAIEEVFNQFNVDSSHLLRFDLVTQQVEKVDKITREVHQHEQISADCEKQPLYQLWHLLYSVEEMDILVAKLQSRYGFTPELAKALAKIDFHKQGYGGLSAKAIRNILPYLQQGANYADACKKVGYNHSGSTTKAENELRQLDDELKLYPKNSLRQPVVEKIVNQVINLVNEIIHEKNGFVTDAERHAPDRFEIRIELARELRQSVEERNKTFSRNESQKRQHQVIENELKRELGFKKVSRKDIERYKLWKEFGGIAPYEPGTPVSLAELYSGLYDIDHIIPKARLFDDSFVNKTICRREINGGSTEKNNRTAYDYMSSKEATVFNEYVTFIKDYFDKGGISEAKFEKLMMPMEMIPDDFITRQLQLTRFITKEAMHLLEKVCRNVHATSGPVTNYLRHNWGYDGVLQKLNWHKYERIGKTAIEHDKSGNRICKIIGWSKRDDHRNHAVDALVIACTKQRYIKQLNERNKNFENCKYQINQSALKEIEIKTLKPFVLEEVMDAVNRILISFKSGKRVGSKSVLKKGGDVKKKYHIIPRDALHEGTTYGRIKKLKEVKLSTTFKDLEAIVYPEIKVQVEAHLQQFDNDIKKAFNKKNRLIFKEKMGYDTLSVYEYANVVRYKLDAKFEKVDSIVDEGVKAKVKAHLATYDNNPKVAFKSEHVVWINQEKGIAVRSVRCFTKRDELKPLRKNDQGKPIDFVKLGNNHHVSIYRDKSGRLRDDTVTFWDAVKRKQKRVPVIITNPRETWDELLDSGFDDQEILNDLPLSDWEYITSMQQNEMFIFGLPDEELQSAIHENDFGLISKHLYRVQSVSKNDFSFRHHLETKDDKAADKELKKSIRITSLKAMTGIKVKINNLGRIVKVGELPVVYQKRDVSSLSVI

SEQ ID NO: 8581 - protein, 1209 aa, unidentified
  REGION 1..1209: note = Description of Unknown: Cas Enzyme sequence
MNKNKVLGLDLGTNSIGWAIVEERPDGCALREHGVDIFQEGVKIEKGIESSKAAERTKYRAARRRLMRRKLRKIRTLEVLSEQGLCPRIVPERLKAWKQEGQYPLDDEFILWQRTDGDKNPYHDRNEALTRKLDLSVQRDRYILGRAMYHLAQRRGFLSNRLEKTKESDGAVKTGIDELSQDIEKSGCRFLGEYFYRCYCEGEKIRTRYTSRKEHYNAEFDEICRVQQLDENLKKELEKAIFFQRKLRSQKGLVGKCTLEKSKSRCPVSHPRFEEYRMLQLINNIKIQTPIDEALRPLSREEKEQIIPLFLRKSKKQFDFEDIANKLAGKNNYAYYKDNSGKPYLFNYKMNTSVSGSPVTVSLQDIFGEQWDAVLAERYTAKNGKTQQQIVNDVWHVLFFFDDDEKLKEFAMNKLQCSEEEAKKFSEIHLPQDYAALSLNAIEKILPFLREGMLYSHSVFLANMGKALPAEVWNDPESQRVIIRHVADIIDDFPKEGRLPIGDTIESRIASFIEAHFNVLPCRVKDRLYHPSMMETYPEAKSDEFGRLRLGSPRTSSVRNPMAMRALFRLRKLVNTLLDENKIDKSTKIRIEFARGLNDANRRKAIEDYQRERETERKKYYEEIKKLYLEESGREIEPNETDVLKFQLWREQNKICPYTGRTISICQFIGANPEFDIEHTIPRSAGGDDSQMNKTLCESAFNRNEKGSKLPSKLARHAEVLVRIAHWKERCDELRKQIERTKGSFSTKEIKDAMIRKRHKLKLELDYWSGKYRRFEMTEVPEGFSNRQGIDIGIISKYARLYLQSVFPKTYVVKGLTTDAFRKMWGLQEQYEKKERGNHAHHCMDAITIACIGPNEYARMAEYFRNQEQYRWYRNREKPQFPKPWPTFTEDVIAIEQKLLVSHHTPDNMSRQTKKKWRKHGQVQRDDNGKDLYVAGDSARGSLHQDTFYGAIMRDGELKHVVRKSLGSLKEGDVDKIVDEVVREKVRQAVEEKGFKQAMAGPIWMSEEKGVEIKKVRCFTPSVTSPIRLKEHRDLSRHEHKQHLRVVTGGSYLMAVYEVVDAKGKSKRDFEIVNNLDAAKYFKASSDHAAFTDIVPLTSEKGYPLKWTLKSGTMVLFYENSPEEVYEADNTELKKRLYKITIMKKNGQITFIFHQEARSKGELNEKDGEYKSGEEHRPLIRMYSTRLRALVEGHDFELSVTGEVKFKNG

SEQ ID NO: 8582 - protein, 935 aa, unidentified
  REGION 1..935: note = Description of Unknown: Cas Enzyme sequence
MNQKYTISLDIGTNSVGWAVLRNFSLAKKHKKIIEIDGEARRKFKQSTNLWGAYVFEEAETALGRRVKRTMRRRILRRRNRITNLQKIFENEIAKIDPDFFHRLDEGFLQNEDRTKGTKQEMPLFGGFLSSDGESYSSEKDYYKTYPTIYHLRMRLMNDASKADIRLVYLALHHILKHRGHFVNQGQVFDLSNLDITETWVALLSLYNQDDITSFNFAFDDSDKADKANKILKDRNLSKSKKVFKLCELYNSLNIDQNFEIYEQGTDKKTKDFLESKNKQQKALFAAAVGNGIDLAMIFENPSYNNKENENMPKSGDFKYGLDAEKYEEKLATIKQYLTDGEMQVIECGKDVYESIVLCNILTQESLSASMIKKFEQHKDQLKTFKQYVHQNYSREVYLKIFGTFGIYSRYVKHGTLEKSLTRDEFYAELKKLVPQYVEREEIASEMECDRFLPKQRVIDNGSIPYQIHKYELMKIIENQSKHYQFLANETDRLQKLIEFRIPYYVGPLTSAERSKFAWMQKRTGMEGANITPWNFDEVVDRENSNTQFIERMTSFCTYLPHEKVLPDSSLTYQEFKVYNELIICGYEKGEKEKVWFSPKLRQRIVDELFKKHKKVTGKHMVKFLYNNGITSSELSVSQLFGIDTIGKSPGYNTSYSTYIDLIESVGLCDSFIEKNKPVLEQIIKWATIFKDRKILQQTITRANKSEWNGLFTHEQISKLSKLRYTGWGRLSAKLLTGIRCGNGKSILSNLKEEQFNNFMRLLRDEKVKEAVKEAQLSGKEGGTLNYSLVEELAGSPAIKKGIGQSLKIIKELENVLKLENIDKIVIEMARGDGTKGKRTVSRRKQIEKMYQNFTKNTDEVIPKEIRENFDSKANEKEFDNERLFLYFLQNGKCMYTKETLEISNLSDYDVDHIIPQAYIKDDSLDNKVLGVLSK

SEQ ID NO: 8583 - protein, 1598 aa, unidentified
  REGION 1..1598: note = Description of Unknown: Cas Enzyme sequence
MNKTIEKSEKIFIGLDIGTESVGYALTNENYQVPQIGGKPLMGVRLFDTAETAENRRMQRAAKVRLQRVKKRIVFLQELLGCEIERVDSLFFIRLKSSSYWQDDKQLKGLDSLNSLFADVMYDDKGFYKQFKTIYHLRAFLMDEENWKKAVPDMRLVYLACHHILKNRGHFLYENDIDDSNNDTFDVLSQGKILFEKLNDYFQRFAEDGKDDDRIFNNVHFNLDNFNEIQSIAKDERIGKKQKNEKLRTEFKIESKGRAEKILSIICASKVKISDIFGEGYQNDEVTHFELEKNWETEEPKYRGALDDGQFELLMILKEIYDWFMLLKLLKGFSSISDAMVSKFDLHKKQLDFLKALLKKYEPKLYCKFFRESNHKDVYDKGKIANYAHYIGSNLVDGKSILSKGGSSSQDIFYEFIKQELYEKGGFNSGKEFSKQVFKNFIKKDENGYFSFEYDGYKLEDMHNDIEERKFLQKLRSGENATIPHQLHKAELKKILTLAEKYELISDEKDTDSFSLKDKIISIISFRVPYFVGRTNPYFKDKEGRHVWIKRSKQYNELPQTVNGKLRPWNFEKAIDLDASGEKFITRMLSKCSRLRFETVMAKNSLVYAKYSVLNELNKLKINDNPISVELKQDIFNELFKVYKKVSTNKLLEYLNTKGIHNAEGEMLTKEDLSGFDIKIGFTTSLSSFIQAKDVFGDEVFTDEFFYKTQEGKMYDEVIKWHAIHTDKKLVENSIKKEYKSLLEQKYGDNAEDIIKKLKAINFSGFGNMSEKFLTTPIQHGNDDNKTVIKFTGLVNPRISVLNILWDTNENLNEIIWNNEYGFKSFIDAENNISESDSVEDFKKRIQESYASPSVKRSVWQAIKVVNELIELIGNRPDKIFIEVTRSGNEQKGDKGRTKSRRQKIEEIYKEAKKLAKEIKDEGLLDKLGNVDDAKLRSERIFLYFMQGGKCAYSGESINFDDVLGGKSSSYDIDHIIPQALIKDDSFNNLVLAKRNLNGEKGKNYPLNKTPAIAQKLPNLKVLWKKWLDSGMITQAKYERLSRTAELSDKELEGFIARQLVFTGQATTVVAELLKDKYETEHGKQVVFYSKAENVSAFRHKFDILKCREINDYHHAHDAYLNIVVGNVWHTRFNSHFYKTKYQDEKQKRFNANKLFEYDVENVWEKPQFETEERFKKDGTPYQKQTQKIIERTGTLAVVDKVFKYNFLPVSKKLKSKGKDGSLYDATVYGVNTHQKDVKKGKKLLSGDGSDDNSALISLKGKQHILSDTSKYGGFKSAKTAYFIIYKYTNAKEERITYFDQLPQKDKKAWEGKTPEQKIDDIVERIKLKEKSELDKQVQKQEDRLEKIRNKIKQSFLDEEKIDEIKKEIEKIKNFDPQVKIIRDKVYLNSLFEIGTMRVRLAGCNITNVTFHNAKQWIIDYEKEKETVEYVRIISEFNERLKKEKKKADEYVKDGKIILSGEAKHLTKTKELTKEKNEKLWDTILSKLRTIYPTSEGKKMEQLKGKNLGLPDVYPKLKENIEKFLSLEITTQIEVLTGLIQGMGCNAKAFDLSSLGLGNSVGAIQPLRKISKDIPLTLISQSVTGLKEKRIIIKKAGE

SEQ ID NO: 8584 - protein, 1236 aa, unidentified
  REGION 1..1236: note = Description of Unknown: Cas Enzyme sequence
MKYSLGLDLGVASIGWAIVKLDENDSVLRIEDLGVRLFDAMEKGKTDELENAIRREKRGSRRLIRRRSQRLRDLNKYFIDNFKIDIKEIDLSIVSQQFAGEEHTLLPYRLKIKGLNEKLSLEELAIISYHYCKHRGFKSNRKSEDKKSDGVLISGIENTEKTLTNRGITITNFLLETFKDNKQIRNKDKYLHAISRSMYETEFSLILDKQIESGLINNNFKDRMLNKEKYLNCFFNRQRDFSEGPGKGSKFGGQNGKSLIEQMLGNCQFYKEELRAPKGGLSAAKFVFLSHLNNITYTNENNETKRLSQEQINNLLKKALETRVFSYNTIKKEIGLETVYFNMLKNKKGEIKDLLEEKIKFFETYHDQKKILKKHLTTKEIEILKDEDFDHFSDVLLKYRTEAKFDENLKDYSEKIIKAVKEMEPITKTIDLSSKVCRELIPYQLEAMTYDKAVKAIGFNHSDRDQKANNKYIPKLDGECGLFEKLTLEITNPNVKHILFEARKLINALIKDYGKPYIINIESARDIAKIKSERGKIERENEKNAKRNFRTREKLFETGRFTSFAAVSPNDVIKQRLFDEQKGICIYCGEQFQESRLFELNSYQIDHIVPYSASFNDQYDNKALVCTKCNQEKKNRIPLHFLNENQAKNFLYRVNSNRNISGKKRDNFIRKELPEAEFGERDINNLRYANKTILRIIKASLGYSDKDILFIEGQMTNFLKKRWGLSRLTHSLKAKDMNKNRTYYLEHNFCEFNEDKITVNLTYENNKLIFELKKEKAKANRELEEQPKRLNELIDFAIENKTLFIERIGFNKNLSLEELCLYFGEQRYRAQDENNNILYEKILQFLLELISRIEAENRNKERDNHLHHACDAVVLACVTRSTTQKITNHYKYEKNKDFLDLSTEEIKEIYGEHPERFPRPYPEFVQDVKERVFQRDIDKLKEYVRKSKIYLDRCERFNKNLTIIYPSRSPLLKTSGPLHKETFFGYKPNFQTLTKRVSVQKLSIENVEDIFDKNGGNHAVYLACKAWMKNGKTGLPTIQKGSEIRKIEKVKLDLYSDIKDEAQRKEKIASKVRFDVKINGNKNNTFPVFADSENVLIIEVYKKKNSDGSLYYCPLNAFKINNAKNENIQYQLFTGQGVNNLHILSKKELNEGYQKLLSIRKNSMLEIELKNGNKSYCYSVGATSGMMEVASSLGDNYDIVGENTLFKNFCKSQYYLTVSTIKSIKVRNISLLGKIT

SEQ ID NO: 8585 - protein, 1402 aa, unidentified
  REGION 1..1402: note = Description of Unknown: Cas Enzyme sequence
MKRILGLDLGTNSIGWALVNEAENSEEKSSIAQLGVRIINYDNFVSTETGKESKEPEKDFRSGKGISPNAGRTLKRSMRRNLQRYKLRRENLIEILKDYNFISDETILSENGNKTTFETYRLRAKAATEEISLEQFARVLLTINKKRGYKSSRKAKGQDEGQLIDGMEVAKKLYDENLTPGQFCLQLLQNGKKHLPDFYRSDLQAEFDKIWTKQKEFYSEILTDGLKEELRGKNEKQTWAICKDPFDIVGIPRTTKGEELKKENFTWRAKALSEKMDLESLAVVLQKINGQINSSSGYLGAISDRSKELFFSKQTVGRYQMAILDKSPNASLKNMVFYRQDYLDEFNTLWETQAKFHKELTDELKHAIRDVVIFYQRRLKSQKGLISFCEFESRKIEVEIDGKKKTKTVGSRVVPRSSPLFQEFKIWQVLNNIEVFGKGKKSKKQKSTTLFDETEDPIEYGGRRELYQEEKELLAAELSIKKELKKTDILKILFDNANELDLNFNSVQGNITQMALFEAYKKIIEESGHDIDIQKKSAEDIIRSVEDIFKAFGYNSDILYFDSDKELDKQPVYQLWHLLYSFEGDNSNTGNENLINKIMVDYGFDRDAASILANVTFQDDYGSLSAKAIRKILPHLKDGNKYDVACEYAGYRHSKSSLTKDEIENKILKEKLEILPKNSLRNPVVEKILNQMINVINTIIDVYGKPNEIRIELARELKKNAKEREELTKSIAETTKLHEQYKEILSKPPFNLSYISRNDIIRYKLYEELKDNGYKTLYSNTYISPGAVFSGDFDVEHIIPQSRLFDDSFSNKTLELRSINIEKGNHTAYDFVKEKYGEKGLEEYLNRIETLLKQGVISRTKYNKLKMQGKDIPDGFIDRDIRDTQYIAKYAKTMLGDLVRDVVSTTGSITDRLREDWQLVDVMKELNWDKYENLNLTEEFTNEEGHRIRKIKDWTKRNDHRHHAMDALTVAFTKRNIIQYLNNLNARSDKSSSIYGIEQNELERNDKGKLLFKPPIPLNEFRAEAKKHLEITLISIKAKNKVVTQNINSTKKKGGKNKKIQQTPRGQLHNETIYGSQKQYVVKEEKVGTTFDEAKILTVTKPVYREALLKRLEANGNDPKKAFGGKNAPAKNPIFIDNAQVEQLPEKVKTVTFETVYTIRKEISPDLKTDKVIDANIRRILEKRLKEFNGDAKKAFSNLDENPIWLNQEKGISIKRVTISGISNAESLHDKRDKDGNFILDENGNKQPVDFVSTSNNHHVAVYRDADGNLQENVVSFYEAVARVNMGFPVIDKEYKQSEGWHFLFSMKQNEYFVFPNEKTGFNPKEIDLMNPENYNRISPNLFRVQKFTIRDYFFRHHLETNVENNNSLKEITWIRCGLNGIGNIVKVRVNHIGQIISVGEY

SEQ ID NO: 8586 - protein, 1366 aa, unidentified
  REGION 1..1366: note = Description of Unknown: Cas Enzyme sequence
MNKGQQKPYTIGLDIGTNSVGWAVMYDDYKLASRKMKVDGLEKRVHKNFWGVRLFDEGEVAADRRSKRTTRRRIARRCNRIKYLQEIFAEDMLQVDDSFFHRLENSFLSYKHGDKDFKYPLFPTESEEKAYHESYPTIYHLRKALVCGEREFVDNKGNAKPLFGMDEVGRADLRLVYLALHHIVKYRGHFLIEGKLDSENSSVEEALQRFIEEYNRILSLQAEDSVDSKRIELESIENLNKLTNILKEKVSRSSKVDAIFSELGIAKNKNDLLHNFLKLIVGNQGNFKKYVSSREDAKIQMSKDTYEDDLEHVLSQMGDGYEDIFVAAKGTYNAVELEGILQGKYFISEAMIERYRNHEKDLAELKSFVYKNMPSKYNEVFRDRTKNGYAGYIDGSTTQEDFYKYIKNITKDIAEEFDDRIDKEIFMRKQRTFDNGVIPHQCHWQEAAEILHNQSKYYSFLQENLAKIEKIFTVRIPYYVGPLATKADPLKFAWLTRQSEEKIRPWNIEDVVDYEKSAVDFIERMTNFCTYLRDEKVLPRHSMLYEKYMVFNELTKVKYMAGGSNNQDFFSTKTKQLIFEGLFKAKRKVTEKDLRQFLENEMCFSGVQISGIEKSFNASFATYHDFLNMGIEKAFLDDEKNEAHLEEIVKILTVFEDRKMLKSQLKKYDELFSREILKKLSKKHYTGWGRLSKKLLIGLRDDKSQKSIMDYLIDDGNNRNLMQLINDDELSFKIKIQKANTVKNESDLHDIVKGLAGSPAIKKGILQSLKIMEELVNIMGYKPDSIVVEMARENQTTQQGRRNSQPREKSLKKALEAFGVNAITCDVNNQALQNDRLYLYYLQNGKDMYTGEPIDINNLSRYDIDHIIPQSFIMDNSIDNRVLVSSKANRGKLDDVPSRDVVTKMYGFWERLNKSGLISERKFNNLTKAARDGLTENDKAGFIKRQLVETRQITKHVAQILHEQYNVEDGKVKIITLKSSLTSQFRKMFEIYKVREINDYHHAHDAYLNAVVASTLLKVYPKLRPQFVYGEYANYNSWDENKATAKKKLYSNIMRFFASEEKSFDKDTGVILWDKQADLSIIKKVLGYRQMNIVKKVEVQKGQFSKESVLSKGDSDKLIPRKTRKIIWETSKYGGFDSPTVAYAVAISYEKGKAKKRTNTIVGITIMEQVAYEKDREAYLVSKGFTNSIIIAKLPKYTLYEFDDGRRRMIASAKEAQKANQMVLDGRFVELLYHAERYNSELQSDSRRYVNEHKSDFTEILQEIAGFVEKYNLAPKKEVIDTLREFDINQFSKTEDLIKLVQACLILTRAGTTNVTGKIDNREICKIIRMTKSQYQFTKKEDMDILSAVLISQSITGLYETRKRLS

SEQ ID NO: 8587 - protein, 1080 aa, unidentified
  REGION 1..1080: note = Description of Unknown: Cas Enzyme sequence
MNRFAFDLGTNSIGWAVLDISNPKSPKIFKDGLGVRIFPDGREAKTGTPLNEARRTARQMRRQRDRKIRRKKAMLNFLTTNTLMPADKEKRQAVARLDPYELRAAALQRKLESNELARIMMQFSIRRGFKSGRKDQQTENKAESAGMLGGIESLAADLKGLTLGQWLCKQREEGKFIRFKPRIEKTKALYSFYPSRKMYEDEFAAIREHQEKHYKKINWDRLHWLIFFQRPLKRPERGHCQFYPDEERGYRAFPSAHRFRIMQDIGNLRYFNDKSIEETIPLDLKRKLFEALDTKKSLSFDAVRRLFGKSYTGKFNLEDAKRDKLKGNETSTDFRKSEYFGEVWDKLDIRKQDEIVEQLMIEDDESVIFTFLKPFGLSNEQIQKISGYNLPVGTTMLSSRFMAECSQIMREDNLPYHEAVEKMGLHHSKKEQRELQRSLPYYGKVLTTLVSGVGGESDYDNDGKKYGRIANPTVHIALNQLRKLVNALIRRFGNPDQIIMEINRELKQSKAKKDEITREQTKNQKDNERIKAELISLGLLRISGEDIKKYKLWEELAIDGLARLCPYCGKTISAKQLVSGFVEIDHILPYSRTLLNSRDNLIVAHADCNRKKGNRTPFEAFEKSHGDFEWERILEVTAKLPFKKRRKFSPDAMVSFEKDSGFIARQITDTAYLARAGKDYLSAICPANSIVVTPGRLTAMLRGFWGYNTLLNQGGDSWFKNRSDHRHHALDALVIGLCDRNLVSEAARINSGKGYAEIGAPERPIERNDIEAKLKAIIVSHKSDHGKEGKLYAETAMAKRPYLEKISPDELADKEEIKRIVPKVIQVDVSSLVEKEGFKKAKTLLKTKYEYLRVFRDKWVTRSPLDSLSDRDIHNIADDTIRQRLQQFLDANPIQSGQKLQDVLAKFSGETGIHSVRYFPKDQVPLSIDSCDNKAYMPGDFYRVDVWKVPAAKGKYKFEGVFISRPEAMKEQLQKRHEHPAAKLIMRLCKSDIILLSNGKEQEFCKVAGYSTTQNKIDIQPLYASDSIAAWKKNTNINLTSAFWLSGIEGHNFKSINVLFNDFEVKLVKITVDGRVIFRN

SEQ ID NO: 8588 - protein, 1120 aa, unidentified
  REGION 1..1120: note = Description of Unknown: Cas Enzyme sequence
MNRFAFDLGTNSIGWAVLDVSNPEFPEIAKDNRSDDDGIGVRIFPDGRVPKKGIPLNEARRTARQMRRQRERKIRRKKAMLSFLTANSLMPAEREERLAIARLDPYELRDAALKRRLEPFELARIMMHLSVRRGFKSNRLDKPSSETNRKKHKKEKVDKKAEENKGMLNGIDILKTDLQGLTLGQWLYYRKSTPRNSIRFRPNIEKHKALYSFYPSRKMYEDEFAAIREKQENYYGEINWDRLHWLIFFQRPLKRPERGRCQFYTDEARGYKAFPSAHRFRILQEIGNLKYENTQGIREEIPAELKKKLFDALDSQKSQTFDEIRKLFGENYTGPFNFEDAKRDKLKGNEISVDFRKGEYFGEIWDTLDIGKQDEIVEKLMIDDDENSIIDFLKTFGLTEEQARKLSGYNFSGGTTMLSSRFMIECSEIMLSNNLSYYDAQKKIEDALHNSKKGQQELQQFLPYYGKVLTSLVSRAGGESNHDNDGKKYGSIANPTVHIALNQLRKLVNALILQFGRPDEIFMEINRELKQSRARKDKIIQDQAQNQKDNVRIKAELAKLRAPDSGEYIKKYKLWEELVPGKKSGSRLCPYCGKPITAAELVSNNIEIDHILPYSRTLLNSRSNLTVAHKRCNQDKRNLSPYEAFHHNPGEYNWDDIFKRSREARFDSAKRRKFSSDAMTVFEKENRFLERQLTDTAYLAKAGKDYLSAILPANSIHVTPGRLTSMLRKFWNFNTLLNNGDDKWSKNRSDHRHHALDALVIGLCDRKLVAKAARINSHRGYKEIDAPECPLGKDREKEEWQEEIVAKLKAIVVSHKSDHGKEGKLYAETAMAKHPYLEKISPDELANEKEVKRIVPKAIQADVSSLVEKEGFKKAKVLLKTKYEYLRVFRDKWVSRKPLVSLSDRDIVNIADEDIRKKVQELLLLNPEQSKQDLQDVFAKLSNKTGIRSVRYFPKDQKPLEIKSCANKAYLPEDFYCVDIWKAPIAKGKYKFEGVFISRLEAMWKHLPEKRKEQDLRRHPAAKFVVRLFKNDIILLSNDKEREFCRVAGFSTTQNKVDIYPLYASNSIAAWKKNTNNHLASNFWSSGIEGHNFKSINVLFSEFEVKLVKITVDGRVIFRN

SEQ ID NO: 8589 - protein, 1382 aa, unidentified
  REGION 1..1382: note = Description of Unknown: Cas Enzyme sequence
MAKILGLDLGTNSIGWAIRDTDADENQIVDDGVLIFQKGVGDGKSGEFSLAAERRENRSKRRLYNAKRYRKWELLKVLIENGMCPLTLEELRLWSIGNWQKVEDKWKNAGRVYPINNVEFQQWLAFDPAIFGHKGISNNEKPIRKNPYDLRCELIEKEEQNEYEKKLKTGRALYHLIQRRGFKSSRKSGQSTYAKNEDIEKLKIENPDFQIAILAKEKLDKGERFRASGVIQRRYFEDEFYAICKSQKINEQLTQKLYKAIYFVRPLRSQKGLVGNCTLEKNKPRIPISHPKFEEFRALQFINNIKWREKDQKEFVSIPISLKKKIFDELFFRKLTSGKNKGKVNEDSYFKFDEIIKKYSEDGKYEFNYRNLPNASTCPTIAALMNVFENEWADKFIQDENTYGINWQGLSINYIVRYGSKAGQSRTLKIDEIWHLLFDYIQTKDKQEDLEEFCKEVLGFDDDKTKYFSEIDIPQGYGSLSYKAISKILPFLQSGFIYSEAVLFANLKRVFGESFEKNKEQAKSIIAKTIVEVGKTKEELNIVNSLIQKFFKENEYRKSVGLDEEIVYDAYKKECENYLNVNWQNATGEEKERIWELYAKFLNNDQAIEEKSSGKSAMDFYKLPRLDEAIKQGLKDTFKVSDNVLKHLYHPSDIGMYPVSKTGKLESPQPPSKGWKNPMAMRTLHELRHLLNYLLAVKKIDKKTKVVVEMARELNDANKRWAIQTYQRYREEENKEFAKAIVGVAKAKYPNLNENDIENINKVRLWWEQVDKNEEVYKQIKALKEDVEKYRLWKEQECVCMYTGKMINITNLFDGTQTQIMHTFPASISFDNSLANRTVGDAYYNNNIQGNKIPTQLPNYNQDTKEYTAIEPRLKKWKEKVEDLKNLIDENKKRTKKTQDPETKKGLIQRRHLLQFDYDYWNKKLETFTLTEIPAKWKNSQLVDTQIISKYAHAYLKTVFEKVDVQKGSITDIFKKIYQIKGNEQKDRSKHSHHAVDAAILTLIPSSTKREAILEEYFKAEENHDKSYTKPKPYEKFKISHLLDIENNVIINHVSHDKTLTTTIKNIRKRGEKTGWVAQGDSIRGQLHEETFLGAIKPNVTNEKGFAIKDDETKKYLVQQNNNEDVIWTVQRKKIEEVDLDSIIDVALKNEIKRQLDSGVKINDVKDFNGKTVRHIRFKKFSPSYDKTLKIKSHIFQSKYEHKTLYLANNDSNYLCLLYVGKDNKEKTIKAFRFINLFEFSKIENKHDKSIFNNSEYNMFIKFKGKNEYKLPLTNILKTGQKVMLFKNSDEEIDKCDISNNRSKIYKIEKFNTGYIFLRNIIETRKVDDLAKLGFFPKDGETKFMSEKYQPYLKLKVDEFNCLFENKDFEIKPDGTIIWIDK

SEQ ID NO: 8590 - protein, 1381 aa, unidentified
  REGION 1..1381: note = Description of Unknown: Cas Enzyme sequence
MSKKFYLGLDIGTGSVGFAATDEKYNVIAKSGKPLMGVRLFEEANTASERRIKRANKVRLNRIKNRLLLLQELFDEEIKKVDPLFFLRIKSSSLWQEDKEERGLGSLNSLFADENYSDKNHFKNFATIYHLRYFLMNPKNWERNTPDIRLVYLACHHILKARGHLLLDVDDFNVKDVALSGKSLFEELNNYLENEVTEDDSNTIFDLSQYPEVEIIAKDAKMRIRQKRENLQKILYSGKDKKLENIIKAFLGETIKTNEIFPIEDITDETKTITLNSEWETLEANFSAILGDSFELLVIIKKIYDWFSLMNLLKGKDSVSEAMLIKYNKHKKDLKDLKKLVKEKAKHKYYKIFRSESEENNYAAYIGSNLNKGKTIISKCKKEDFYSFIKKELADILSIEVIDDLVNGTFLPKIRTKENATIPFQLHKKELRDILLNTTEKFNIDTSKVLQLISFKVDYFVGRLNTHNQTNRHVWMEKKEEYKYNQTKITPWNYSEVIDLEKSEEKFIQRMLSQCSYLRKEAVLPKHSLIYSKFVVLNELNNLKINSEPITVELKQKIYNDLFKQIKKVSITTLLKFLGNDIAKSDISGFDIEKGGFTASLSSYLQAGHIFNNEADTEENEALFEKVILWQALFSDKKRLEGKIRQNYSHLSEEMIKKLKGLNFSGFGNLSEKFLTAQKIVRHDTGELTSIIDLLWNTNQNLMQIIHNQLYNVEEWIKSENNFNKESVTYEDIHESYASPSVKRATWQAMLVVDEIVELVGQKPDKIFIEVTRSGKNKNEKKRSVSRKDQLLESVSLKEFKEVIKSKNEREFRSDKIYLYFLQNGKCAYSGEAINLSEINNDNLYDIDHIFPQALKKDDSLNNRVLVKKELNGLKGKNYPLNKTQKIWSKKDILIPMWESWHKSNLMSNEKLQRLKRTTELSEAEQEEFIARQLVFTGQSATLVARLFQEKFKESEVIYSKAGNVSDFRHKFDLLKCREVNDFHHAHDAYLNIVVGNTYNQRFSRNKNFYAKEFKDEKWKIYSQNKIFEYDVSNAWKNNETILTVKKFMSRNNLLVTKKTYEKKGEFYNQNLCSASAHQKEIKDGRKSKESLLKESILIPQKGLLSNPLNNVSKYGGYKSLSAAYFIIVEHTDKKGKRQREFWAISLLQKKSWEKLSQDEQLKELSENFVEPKIIVSKVLLGTLFNINKMSCRIVGWNRSKMLFRNANQLFLDKDFLDYIRLIFKYNDMVKEGKSNFFIKDDDSIEIAGGKKTTNKLQILTKEKNIQLWDIILAKLLKLYRNMQDLKGKNFGLPDLYDDLIDCQDVFFKSSIDEQIKALSGIIKGLSCHTKSFDLSGLGKSKYSRIIQPSPKINYPLIMINQSITGAKEKHIKIYPFEDEE

SEQ ID NO: 8591 - protein, 1360 aa, unidentified
  REGION 1..1360: note = Description of Unknown: Cas Enzyme sequence
MKKKNSDYFLGLDIGTNSIGWAVCDSSYNLLKFKNKTMWGVHLFEEAKNSEETRTFRTARRRNRRKQWRISILQEFFQDEIAKVDPAFFIRLKESFFQLADKKVSARFSLFADKDYTDVDYYKAYPTIHHLMKELAENNSAYDVRLLYLAVSYIISHRGHFLLDINKEDSDKIFSFDSVYEELEMYIKNEMQITFDVVDVEKFKSIISNKKLGITRKTSALKEVVFGEKEDIKQREAVLKLISGGSVDLKTLFNKDSYGELEKKSVSLSGDFEETEAALKPFLEEDFQLLTILKTIYDWGLLAGIMGKDEHGTENKSISAAKVQMYDKYGNDLKNLKHIIKKYLPEKYDEVFKTMPGVEKSDPNKGLKNYTAYAGSVLVKGKKCTTVKDARASLEDLYKYIKNLLKEIKEKPLLDDDTTLILAIENDIDAEAFLIKPKNSNNRIIPYQLYWMELKKILDNAVEHLAFLSEQDENGMSIKEKILMLFEFRIPYYIGPLCRKGSSKNSWLKVKSDEKIYPWNFEEVIDSANSQKAFIERMTSKCTYIYGEDVLPKNALLYCEFMLLNEINNIKIRSGGKITPITPEIKSRIYNDLFAELPHSRRITVKALKDYLRKENIIDGTDEIEGIDIDVKAQLKSWHDFKAMLKSKVISFADAEEIIKYITLFGDEKKLLKQWLKEKHPRLSEEHVSHILKLKYKDWGRLSQKLLTDIYDVDQETGEMTNIITAMRNRNDNLMKLLSNDFDFGKEIENINAEYSLINKKSDTEKLDDMYISNAVKRPILRTMEITKEITKIMGCSPKRIFIEMARGGEKEKKRTISRKQKVLDLYKSCKDDVREILSEIENYSEERFQSDKLYLYCIQQGKCMYSGDPIDLDQLLSGNSNWDIDHIYPQSKVKDDSLNNRVLANKILNGAKADKYPISSEIRMKMRGFWDKLLKHDLISKEKFDRLTRDREFDEKELAGFIARQLVETRQSTKAVASLLKEKYKDQSEIVYVKAGLVAEFRHKFEMLKCRDVNDLHHAKDAYLNIVTGNVHHLVYTSNPMTYIKENPQYSVNGLYERDRNRNGEEAWVKQGDKTISNVKSMMAKNNALCTRYAFCRKGGFFDQNPVSKGNGQLSMKADERMAIEKYGGYNNLTATYFILVKHTLNGKPCISIKPVDLVVSERFERDRGFAEAYCRNELRLENPEIVRKLKINTLLAMDGAKVAIASKSNGGETIVLGNSNQLIFDSAKEVYVKKLSSFVEKHKKNDKYTISPDFDKVYFEENEKLYDELYEKLLQPCYSNILNSQIKTLVAGKEKFKGLSIEEQCRVLMNIISLFKSGRTTGCNLKMIDGSGQGGVITLNACLSKTKYKSIKIIDQST

SEQ ID NO: 8592 - protein, 1324 aa, unidentified
  REGION 1..1324: note = Description of Unknown: Cas Enzyme sequence
LDIGTNSVGWAVTDRNYEILRFKGKAMWGVHLFESGKTAEDRRMHRTARRRLERRKWRLKLLRGLFEGEIAKVDPLFFERLDESNFVSEDRKHKQHNSLFNDPSFSDKSLFERYPTIYHLRKDMMMTKEKPDIRLVYLTCHHIIKYRGHFLFENVSNGEIPEFGQLLGSVIEMLNDVCDTELSTDNVSKEIEGILSNRSLGVRDKTVELGRLITSIDDPKCIKEFINLISGGTCKLREIFDPEGNNDDLKDEKLKFGDTDWEARRPELEDKIPDGIYLLDLAKQIYDWAILKKLLGEHTYVSSAKIDEFEQHKKDLKLLKMAVREHLSKADYAEIFKKKTITGNYVAYSKKEAEAGTCTQDVFCKFLKKKFEKEFPKPAFESEGYRKMKERILDGVFMPKQTSKENGLLPNILHLKELTNILVNCSPWHPFLETKDESGFTVSNKIEQLCKFRIPYYIGPLSPNAKNRWMVRKGEGRILPWNFDDLVDKDRSSEGFMNNLIGTCTYLPGEKVLPKNSILYSRFALYNELNTLSINGDRVGVDLKKEIIGDIFERLDGPKKVTKKTFESYLRKRGLFHDDDKIEGIDDTIKSDLRSECQLKAILKEKYNVSLAEEIIRSVVVFGDDRKRLKGKLYSDHSEILTKEEIDSLSTLQFKDWGKLSKRFLKGIKAQVDGCDIDILTALEGTNLNLNEILFRYGFKKQIDAIRDEAFGITSGKITYDLVKDLQISPSVRRGIWRTLRIVDDIVKAAGRPPAKIFIETTREKRESKRTMSRKADLIKLYKACKEEDWIKEIEGEDEGKLRSKKLYSYYCQHGQCMYCGTKIDPNDLSDASKCDMDHIIPKSKKADDSIHNNLVLVCKTCNSNKNDVYPIRQEIQQKMGSIWKSLRICNFITEEKYKRLTEVKPLTEDELSGFIARQLVETGWSVKAVADTLKRIFGDEIEVVYVKGKSISDFRNNKGFVKCRSVNDYHHAKDAYLNIVVGNVYRVKFTSDPLRFIRSGERYTLNIEKIFDHDVKRNGESAWIKGESGSIAVVNKHMRRNNILFTRFAYKASGKLYDLNPLKKGRGQYPLKTYGKEMDVSKYGGYKNVYGSYFTVIEHKVKKKIVRTMRPVPIMLSSNKTGVKELLEHYSLEGLDEPKIVFDTILTDALVEIDGFKLHISGRTGDRIIYKCGEQLILPDETYEYCKKLSNHSERSKEAKKLLPAEYYELTAEENLKTYDKFIEKFNGKYKMVPDGLAEKLSDKRELFKNLTVEKQAEVLNEVLHGFQCKSTAVNLKKIEEFGGSSAAGVIDLMNDLTKFKSVKLITQSPSGLFENEIDLKTI

SEQ ID NO: 8593 - protein, 1080 aa, unidentified
  REGION 1..1080: note = Description of Unknown: Cas Enzyme sequence
MKRFAFDLGTNSLGWAVLDVSDSKKPQIIDMGVRIFSDGREAKTGTPLNEARRTARQMRRQRDRKIRRKKAMLNFLTTNTLMPADKEKRQAVARLDPYELRAAALQRKLEPQELGRIMMQFSIRRGFKSGRKDQQAENKTEGAGMLGGIETLAADLHGLTLGQWLYKQREASIPIRFKPRIEKAKALYSCYPSRQMYESEFAAIREHQEKHYKKINWDRLHWLIFFQRPLKRPERGHCQFYPEEERGYRAFPSAHRFRIMQDIGNLRYFNEKGIEEPIPLELKRKLFDALDSKKSLSFDAIRRLFGENYTGKFNLEDAKRDKLKGNETSTDFRKSEYFGEVWNKLDIRKQDKIVEQLMLEDDESVIFTFLKPFELSDEQLQKISGYNLPVGTTMLSSRFMAECSRIMIEEKLPYHDAVEMMGLHHSKKEQRELQRSLPYYGKVLTTLVSGAGGESNYDNDGKKYGRIANPTVHIALNQLRKLVNALIRRFGNPDQIIMEINRELKQSKAKKDEITREQAKNQKDNERIKAELTGLGLISVNNEYVKKYRLWEELAVEGLARLCPYCGKTISAKHLVSGFVEIDHILPYSRTLLNSRDNLIVAHTECNRAKKNRTPFEAFRNSPGSFDWERILEVTAKLPFKKRRKFSPDAMASFEKDNGFITRQVTDTAYLAKAGKDYLSAICPANSIWVTPGRLTGMLRGFWGYNTLLNRGGKEDSWFKNRSDHRHHALDALVIGLCDRALLAEEARVNSGRGYAEIRAPEPLIKRGEIEAKLKEIIVSHKSDHGKEGKLYAETAMAKRPYLEKISPDTLADEKEIKRIVPKAIQEDIAQLVEKEGFKKAKSLLKPKYEYLRVFRDKWVTRTPLDSLSERDIPNIADETIRRQVQQFLDANPLQSGQKLQDILVKFSSETGIHSVRYFPKDQVPLSINSCDNKAYMPGDFYRVDVWKVPVAKDKYKFEGVFISRPEVMMKKLQKRHEHPTAKLVMRLCKNDVILLSSGKTQEFCRVAGFATTRNKIDIRPLYASDSIAEWKKNTNIRLTSDYWPSDIEGQYFKSINVIFTEFEVKLIKITVDGRVIVRN

SEQ ID NO: 8594 - protein, 1437 aa, unidentified
  REGION 1..1437: note = Description of Unknown: Cas Enzyme sequence
LGKFDAGNSVSQTAERTGFRGTRRLRERYLLRRERLHRVLNVLGFLPEHYANQIDFEKRLGQFLNEAEPKLAWNNKDFLFMKSFNEMVEDFKEKGRDIKIPYDWTIYYLRKKALLHKIEKEELAWLLLSFNQKRGYYQLRGEDEEENPNKLVEFHSLKIVDVVPDEKPNSKGDIWYSLHLENGWIYRRSSKAPLFDWKDKVRDFIVTTDLNDDGTVKTDKEGAEKRSFRAPSEDDWTLLKKKTEADIDKSQKTVGTYIYETLLQNPTQKIRGKLVRTIERKFYKTELEQILKKQIELQPELFTEDLYNDCIRDLYRNNEAHQLVLTKRDFVHLLVSDIIFYQRPLRSQKSSIGNCTLEYRIHKINKKDEKGKPIKNVFEKDTNGNDIEIKEYLKGVPKSNPYYQEFRVWQWLYNLKIYLRDDDKDVTTDFLKNTDDYVNLFDFLMSRKEVDNKALITYFLNLQGIKGKTADKELKKYRWNYVFDNSKEKEEDKSKKYPCNETGTQIRTRLAKVENLPEDFLTPEIEQKLWHIIYSVTDKNEFYSVSEKGEPKGALKTFAEKHKLDVNSFVEHFKNFPPFKSEYGSFSEKAIKKLLPLMRLGKYWSENAISDCVKERAKSIKERLDNIQEEQTIDSVADDDVQKRVLKSFFKFKNIDIENFVKGLQLYQASYLVYGRHSEAEVAEEWEMSYDIQKYLYEFRQHDLRNPIVEQVITETLRVVKDIWEHNAEQNNIQPVMVYDEHKKKEVKSYPNVFDEIHIELGREMKNTAEDRKAITSSVLNNETTNLRIKKMLLEFSADDDFKNENGENTVRPYSPTQQDILKIFEDDVLSQFSEQELKNQNFENTGKDEAKNVFEVSRKSQPSKSEVIRYKLWLEQKYRSPYTGEMISLSKLFTTAYEIEHIIPQSRYFDNSYTNKVICEAEVNKLKDNNLGLEFIKKFYGQKVQIGNKTVEVFTETQYKDFVNQHYKNSNKKRKNLLLEEIPDKMIDRQLNDTRHISKFVSKLLSNIVRSETNDDGVNSTNLIPVTGKITSKLKRDWGLNDKWNELILPRFERMNQLTNSTQFTTKNKEGHTIPAIPLEHSKGFQFKRIDHRHHALDALIIACTTREHVQYLNNENAKSQKFHLQKGLAKKLREFENVSIEKMIKNEKEIWIKSNKTETREVPKAYFKPWDNFTVEARNELEKIVVSFKQNLRVINKMTNKYQVYENGKKVLKPQTKGDSWAIRKSLHKDTVYAKVSLRKIKKVRLSEALKVWKTIVDKELKQEIKRLIAMYGGEFKPDAINKYFKDRKYLFNEVDIAKVEVYYFETENAAVRKPLDISFTEKAIKESVTDTGIQKILLNHLSAKDNKPELAFSPEGIEELNQNIVQLNDGKFHQPIYKARIYEPIGNKFQVGYVGNRKDKYVEAAKGTNLFFAIYADENGNRSYETIPLNMVIE

SEQ ID NO: 8595 - protein, 906 aa, unidentified
  REGION 1..906: note = Description of Unknown: Cas Enzyme sequence
PSRKMYEDEFTAIREKQKNYYGEINWDKLHSLIFFQRPLKHPERGRCQFYTDEARGYKAFPSAHRFRIMQEIGNLRYENTQGIREEIPADLKKKLFDALDSQKSQTFDEIRKLFGESYTGPFNFEDAKRDKLKGNEISVDFRKDEYFGEVWDTLDIAKQDEIVEQLMIKDDENSIVDFLKPFGLTEEQARKVSGYNLPGGTMMLSSRFMIECSEIMLNNNFSSHEAKKKIEDALHNSKKGQQELQQFLPYYGRVLTSLVSRAGGESTHDNDGKKYGSIANPTVHIALNQLRKLVNALIVRFGRPDEIFMEINRELKQSRAQKDKIIQEQAQNQKDKERIKAELAKLHVSDSGEYIKKYKLWEELVPGKKSGIRLCPYCGEPISAEELVSTRVEIDHILPYSRTLLNSRSNLTVAHKKCNQDKRNFSPYEAFHDKSGKYNWDDIFKRSREARFDSAKRRKFSSDAMTVFEKEDRFLERQLTDTAYLAKAGKDYLSAICSANSIHVTPGRLTGMLRGFWNFNELLNNGKDTWYKNRSDHRHHALDALVIGLCDRKLVAKAARINSHRGYKEIDAPECPLGKDRQKEELQEEIVAKLKAIIVSHKSDHGKEGKLYAETAMAKHPYLEKISPDELVNEKEVKRIVPKPIQADVSSLVEKEGFKKAKALLKTKYEYLRVFRDKWVTRAPLVSLSDRDIVNIADEDIRKKVQEFLLLNPVHSKQELQDVLAQFSNENGIRSVRYFPKDQVPLSIDSCDNKAYMPGDFYRVDIWKVPLVKGKYKFEGVFISRLEAMWEHVSEKRKDQDLLRHPAAKFVMRLCKNDIIFLSNDKEREFCRVAGYSTTQNKIDIRPLYASDSIAAWKKDTNNHLTSDFWSSGIKGHNYKSINVLFSEFEVKLVKITVDGRFIFRN

SEQ ID NO: 8596 - protein, 1114 aa, unidentified
  REGION 1..1114: note = Description of Unknown: Cas Enzyme sequence
RVLYHLNQRRGFKSGSKHDLGDEDATKTQKEMLSKFQQLKDEGKTIGQKFYDEIKANPHYRVKEQTYPREAYMEEYNAIMSCQQKFYPEVLTDNFIHKLRDQIIFYQRPLKSQKNLVSICEFEGKWVKNKDGETIFIGPRVAPRSSPLFQYERIWEALNNIEINREKLSLDVKKTLFTQLYEGKNLNFSDIKKLLGTDKDVNFSKIQETTYLKLKEILSGTAFQQLLQFEVEKHIIDYEFIHPETGEVQQKKIVAETIIQEPLYQLWHTIYAISDVEECKKALIKKFNLPEEIAQKLAEIDFVKDGYGNKSAKAIRKLLPYLMEGKQLKDAESEAGYRIQPITEIKDKLDLLPKNSLRQPIVEKILNQLIHVVNQIIDPAEGLVTPEERKNGQFEIRIELARELKASKSERKKILDDIKKNEESNKDIAKKLEKEYNLTPNRKNITKWKLYHVVDLEESKSKKDNKKFNNEVSELNGICLYCGKPFSLTEALTGENIDVDHIIPRAVYFDDSLNNKILVHSQCNRDKSNQTAYDYMKNKGEEALKLYTERVEELYKKKFISKRKYQYLLMSSKDIPNDFLNRDLRETAYISRKAKEILQSITANQIQVTSGAVTGKLRHLWGWNDILSDDESNESIETNIADETQSNSDDVTENQTTQTKKKRNDHRHHAIDALVIACTKQGFIQRINTLSSQETQQQIREELKNTQVKLDAYENRLSLLDKYLISQKPFETHEVKKHVERILISSKPGKKVATWSKNIYPSGKIQKVLTPRGKLHDETYYGEIKVPISKTIEDIFSDYEKDSGILENIISPKLRELIEKRLADYNYDAKKAKKSLKQQPIYVDEEKKNKLEYVLCYETKFVYKFPVENILKDTKKLKNVVDTKVKEILANGSKDANKGKESVLYFNPDKQIPIRSVRIEAWFVPTPLYPNKENTPYVTSGNNHHIAIYRDEQGKLQELVCTFWQAVQRKLYGFPVIITDPAQLPKLISEAKEKLKDKGKDLPETFTEALPNPSWTFLFSMQSGEHFILELDHEQAKQWIAEKAYDKLSPFVYRVQKLSSKYYLFAHHTKTTADFDPKKSRRVSSLTALKSIKPIKIHLNVLGDVDHYELIKFE

SEQ ID NO: 8597 - protein, 1504 aa, unidentified
  REGION 1..1504: note = Description of Unknown: Cas Enzyme sequence
MKNIVGLDLGTNSIGWAVVNGNINDDGSEQLVKIQASGSRIIPMDAAMIGDFNKGNSISQTAERTRLRGIRRLSERYLLRRERLHRILDILGFLPSHFARDLDRYGKIVKDKEPKLAWRKNEAGQFEFIFQNSFKEMLEDFKLNHPNLITDDKKVPYDWTIYYLRKKGLTSKISKEELAWILLNFNQKRGYYQLRGEEEEENKNKQVEFYALKVIAVEDSGEKKGKDTWYNVHLENGWIYRRTSNMPLDWVGKTKEFIVTTDLEKDGTPKKDKEGNIKRSFRAPKEDDWSLVKKKTEADIDQTHKTVGTYIYDTLLGNPSQKIRGRLVRTIERKYYKEELKLILDKQKEFHPELQDRALYAACVEELYTINEAHRNNIGNRDFTYLFLEDILFYQRPLKSKKSLIDNCPYEENHCLDKETGEIKFFPVKCIAKSHPLFQEFRLWQFIVNLRIYRKDLAQDVDVTNELLKTEEDYVALFDWLNGKKEIDQKAFLKYPPFGLKKEVENYRWNYVQDKSYPCNETRSLMLARLEKCDISIEFLTKENEEALWHILYSVEDKNEIVKALQKFADKHNLNASFVDIFQKFPSFKKEYGSYSAKAIKKLLPLMRMGKYWSEDSIDKGTRERMDKIITGEYDEKIENRVREKAIHLADISEFKGLPLWLVCYIVYGRHSESKEIAKWESPADIDSYLKSFKQHSLRNPIVEQIIIETLRVVRDIWKQVGNIDEIHVELGREMKNPADKRRKMTQQISENENTNLRIKYLLTEFLNPEYEVENVRPYSPSQQDILRIYEEGVLNSVSNLPEEISDILKKFTETDLKKRPSRSEVLRYKLWLEQKYRSPYTGEVIPLGKLFTPAYEIEHVIPQSRYFDDSFSNKVICEAEVNKLKSNLLGHEFIVKHHGEIVELPFGKKVKIFTVDEYEQFVKDNYSRTRGKMKKLLMDDILEEFVARQLNDSRYISKVVKSLLSNIVREKGEEEAISKNVIPCTGGVTDRLKKDWGVNDVWNKIILPRFQRLNELTGTNKFTTMSLNNHEIPAMPLELQKGFNKKRIDHRHHAMDAIIIACANRNIINYLNNESATAKAELSRYDLQRLLCDKAKTDDNGNYKWVIRKPWASFTQDVHGVLEDIIVSFKQNLRVINKATNHFLHYNEEGKKIFVKQEKGDSWAIRKSMHKDTVFGEVNLRRIKTVALNEAMKNPQSIVVKDFKRKLLELLNLGFDAKRIKKYFEDNRETWSDINLSKITVYYFSKDTKDRFFATRKPLDTSFDRKKIENNITDTGIQKILLRHLELKDNNPDIAFSPDGIDEMNRNIIQLNNGKYHQPIIKVRWYEQADKFAVGQTGNKSSKFVEAAKGTNLFFAVYESNILDEKTNTIIKKRNYATIPLNVAIERQKQGLSVAPKDENGNDPIFVLSPNDLVYLPTADDLANGVVAQPLDRKRIYKMVSCTGNEGHFIPVRIANPILQTIELGSNNKAQKAWTGEMIKEICMPIKVDRLGNILKSSSLHKK

SEQ ID NO: 8598 - protein, 1076 aa, unidentified
  REGION 1..1076: note = Description of Unknown: Cas Enzyme sequence
LQGEPFKIENLGVRIFEKAEQPKTGASLALPRREARSARRRLRRRRHRKERIKDLIQSAGLMSKDDMESMFTASGFQRDVYTLRAEGLDRKLENEEWVRVLLHLAQRRGYRSNSTAEAAKDQENSILKLALATNQELMQEKHYRTVGEMFCLDPKFQIQGPNGTLWRKTRNVPGDYSFTVTRRMVEEEAHLLFDSQRQAGSSFASAELEDSYCEILLSQRDFDAGPGGDSPFKKGDLRGNCTFELGELRAFKATYTFEYFKLLQDLNHIRILSAGQSARTLRPDERERVIALAMRADGLHYARLRKELGLGENERFNTVRYADKLMDEAEKKTRFQEMQSFHKLRKALDGIGKGYIAQVPHDRLDEIATILSLYKADQKRIDELEKLGVERMVIDQLLPLSFAKAGNLSIKAMKKLIPLLERGEPYHEACKAVYGDHRGHTEGKRSKTLSFGALKQSGALDEITNPVVLRAVSQTIKVLNAVVRQYGSPQVIRIELAREMSHNFADRQKMERQYQENRAENDRRMRQIEEIKGGRPTGQDLVKLKLFQEQNEICLYSGQKLDSRRLFEPGYVDVDHIIPYSISFDDSYRNKVLVLSSENRQKGNRLPLEYMSGDPEKTERFTTLVETTIRDYRKRQKLLKQELTPEDMEGFKNRNLTDTQYITRAVYNLLNDYLEFAEDSPFSQKPVRAVNGAVTDYMRKRLGLQKNREDGDLHHAIDAAVVAITTERMIQRISNYAKRREWGKKVLGKYVDPETGELMAQVDFDEKYAPTFPSPWPQFQKELMARLSSDPMEEIAALHLPHYDSEEEIKPIFVSRMPSRKVSGAAHKETIRSGKLPGYSIVKTALTELKMDKDGEIKDYYQPDSDRLLYEALKTQLRAYGGDGKKAFAAPFHKPKRDGTPGPVVNKVKTFGKSSLNVAACGGIADNGGMIRIDVFYVEDDGYYFIPIYTADAVKAALPQRAVATGASGWKVMNDADFIFSLYPGDLIKIKSPKPVGFQLTNALATGQAELLRQEWMLYYVKAGISTASISVTTHDRKYKKDSLGIKTLASIEKYEVDPLGNYHKVHIPEKRQTFR

SEQ ID NO: 8599 - protein, 1091 aa, unidentified
  REGION 1..1091: note = Description of Unknown: Cas Enzyme sequence
MKYAIGLDIGIASVGYAVVALDHEENPWGIIRMGSRIFDVAENPKDGASLALPRREARSVRRRLRRHKHRIERIKELLIQAKLLTKEELLHLYEGELTDVYALRVKALDHTVNNWEIARILLHLAQRRGFKSNRKADAADKEAGELLKAVSENQKRMQENSYRTVGEMFLKDELFAQCKRNKGGQYLTTVHRDMVASEANLIISQQRLLGNKRLNEDFQKQYLAILLSQRQFDEGPGEPSPYAGNQIENMIGQCTFEPSEKRAAKACYSFERFNLLQKINHLRLMENGATVPLNDAQRQKVIALAYSKADLKFTHIRKELGLSDKILFNGLIYDKNDIKTVEDKTKFNFLPAYHQIRKALENVGKNHISALETTTLDEIGRILSTYKGDAKRKEAFSALNLSEEEIAALLPIACLAKFGHLSLKALRKILPFLEQGMIYNEACAAAGYNFKAHDNQEKTFLLPAKKDEMDNITSPVARRAIAQTIKVINAIIREQGYSPSFVNIELAREMSKAFDERTQLTKSMKDNQAANERIKEEIRTEHHKTNPTGLDILKLKLWKEQDGISPYSQKSINVARIFEPGYVDIDHIVPYSISFDDSLKNKVLVLSSENRDKGNQLPLQYLQKKFGQKAADSFTVWVQNNIKNYKKRLNLLKAKITDEDLNKFKERNLQDTKTISRFLYNYINDYLLFAPSETGRKKKVTAVNGAITSYLRKRWGINKVRADGDKHHAVDALVIACTTDKMIKDLSNYSTYREMEYTQTDKYSILANPATGEIINKFPYPWEDFRPELMARLAENPEQALQKLQLLFYSTMDLNTIKPIFVSRMPRHKVTGAAHKATIKSARHLDQGIVVSKKDLTSLKLDKNGEIADYYAPESDLLLYNALKLRLQQFNNKGKDAFAEPFYKPKADGTQGPLVKKVKVMEKSTLNVPVQQKTGAADNDSMVRVDVFKVAGDGYYLVPIYVADTLKKDLPNKAIIAYKSYAEWPEMNEKDFIFSLYPNDLIKFTHKKQVKFSKVNADSNLPDEFSCKEAFVYYKGTNITTGAIGIILHDNSYIVKGLGIKTLQSLEKYQIDVLGNYTKVSKEKRQPFGKR

SEQ ID NO: 8600 - protein, 1016 aa, unidentified
  REGION 1..1016: note = Description of Unknown: Cas Enzyme sequence
DEKGSYSSYTGKIHGDHVVKRVKRTGTDEFYKKIKNLLEKVPKDDEHVKHILDAIENDSFMPLLKSFRNGTIPYQMNKIELDAILANCSKNFEFLEKKDPDGFSATEKIKELLKFRVPYYVGPLGSNPYGKETKGKNSWVERKTSGRVLPWNIEQKIDYESSAEKFIERMTNKCTYCKDQDVLPKNSLEYSKYMVLNELNNLRICGDRLSVPRKQEIFNELFKKEKKVSISKLTKYINDNCWYSGKIKKEDITGIDGDLKASLSSYFDFKDFLESHRLKADDVDRIIKWATVFSEGGDMLRKRIEREFGEVLTKEEIDKTSKLKYAGWGRFSHKFLYEIQAINKETGELMSVMRMLWETQNNLMELLSNKYEFIEQITKPKTIGKLDYSIVDEMYVSPAVKKETWQTLRIVDELIRIMGHNPQKVFVEVTRSEQEKKRTVSRKQTLIDTLKDATKTDSNYINELRELISKLEEKSESDVSRQDKLYLYFSQCGKCMYTGERIDIEDIYDISKYDIDHIFPRSRTKDDSLTNRVLVKKTTNNRKSNAYPIDDFIRAKMQSFWKFLYEKKFIPKEKYDRLVRNSPLSDEEINGFINRQLVETSQTVKQVTDTLKSLFGEETKVVYSKARNVSDFRNQYGFVKCRSMNDLHHAKDAYLNIVVGNVYDTKYSSNFYLQANGHGYGNLTKLFDFDVKNAWKVGASGTLSVVAKTMNRNDILFTRQLVTKKGKLFDIQLVKKGANKGTLPSKVSDKKLQSAIEDFENKESAYDDWTSKYGGYNSLATSHFAVIKHEEKNKKFVSFVPISMIDAKHLEKPGALMEYCSTTLGLINPTIVRSKLLINTQLKIDGYLFAITGKSTGGKALTLSSNVPLVLSAQSQQTVKNIESFFKKSEKNKDLQPTPKFDKISTENTLDLYCELQKKSKSPIYNKRPGNQSDVLENGVSLFEKLSLLERCKAIREILNYYAMEGNGQSDFTAIGGSKTCGKLTKKAGFDITKSNILIFDQSITGLFEEIEEIKA

SEQ ID NO: 8601 - protein, 1097 aa, unidentified
  REGION 1..1097: note = Description of Unknown: Cas Enzyme sequence
MNMESKHYTLGLDIGIASIGWAVLNNDVDGTPDRIIDLGVRLFESAEVKNTGESLAAPRREARSARRRLRRHRHRLERIRYLLVQQGVLTQEEMTHLYDKCSMLSPYQLRTEELDRILNAQEFSRVLIHLGQRRGYQSNSTAEEAKNEKENGVIKSAILENQQRMEHGGYRTIGEMMYRDATFWETINGIRYHCTRNKAGDYRFTVDRASILSEVHILFEAQRRLGSPWASQEMEDTYTAILSSQRSFDEGPGCGSPFRKGISERVGNCTLIPTELRAAKADKTFEYFKLLQDLNHMRLVDNNGSHPLTQQQRDLLEAAAFRTANLTYGQLRKKLGISDEVRFAGLYYGQDSIEKAEKRKWAQMQSYHKIRTALDKVSKDAISMFSQDQLDAIGEIVTAYKADATRIEHLQAAGIPKEYHNALLSLSFSKNGKLSCCAMRKLIPFLQQGMRYDEACKAAGMNFHGANGSVEKLSDFLDEITNPVVRRAVSQTIKVVNAVVRTYGNPDAVRIELAREMSHSFDERNKMKKRQEDGRRKNEQIKAQILETKAGNRVTGLDIVKFKLFQEQDGVCPYSGKALDVQRLYEPGYADVDHIIPYSRCFDDSYSNKVLVLASENRQKGNCTPYEYFGADERRWHEFSVRVGASVRDFKKRQKLLNTSFGEEQGKEFIQRNLNDTQHITRVVYNYLRNNLSFADSTYANAPVQAVSGTVTAMLRGRWGIEKMREDGDLHHCKDAVVIAATSPSMIQRLSNYYKEEERLFMGKTHFVDPETGEVLTRKAFQQRFAPKFPQPWDRFREELEARLDPVNPMDAVMALHLSTYEPDEDITPVFVSHMPKHTVTGAAHEETIRGKTETGTVAKTALTALKLDKNGEIEGYYNPQTDPRLYQALVERLKQFGGDGTKAFVEPFYKPKKDGTPGPRVDKVKIAKKASLSVSTGRGVADNGNMVRIDVFHVPDDGYYFVPIYVADTKKAALPSKAVVAHKLPEAWKQMKPEHFLFSLFKGDLIQVDSRKGISLTLAEKAIGEKTIQVKFGLFYFCGANISSGSIEIETHDRRYGKESLGLKTLTAIEKYQVDVLGNVNKVKLPEKRLEFRGRK

SEQ ID NO: 8602 - protein, 924 aa, unidentified
  REGION 1..924: note = Description of Unknown: Cas Enzyme sequence
MKKTYGEYYLGLDIGTNSVGWAVTDPEYNVLRFNSKAMWGIHLFNEGEAASERRSHRCARRRLERRNQRIALLRELFDSEVSAVDPGFFARLDESNLVESDRKNHQKNSLFNDDLFKDKEYHDRFPTIYHLRKYLMTTDEKPDIRLFYLGVHHILKNRGHFLFEGLSDGSIPIFEEIFNDLVMKVNSELNMGFNVKEVIPEIKELILNRKLTKTDKKKKMIELLSATTEQEKSFAALLSGSTVKLASLMDDVDKDSSDNVGGLSFANSSLEESRLILEGIIDEDRMAILDLMKTVYDWGILSSMLNNHEYLSDAKITEYNQHRDDLALLKYVLKVIATENDNDLSLYNQIMRSDDFGSYSSYSGMVKDLKDQSKIKFCTQEEFCGYVLKKLEKFDFDKTDKTKDMKERLENGTFMPKQRTKENSVLPNALHSKELNRILENMSRFYPFLNEADGRGKTIKEKIGLLCTFRVPYYVGPLNKASKYAWAVHRTDERVLPWNIEDVIDIEKTSEEFINKLVSSCTYLVGKKVMPKCSVIYQRFKLYNEINLITINGKRIENKLKREIIDELFIKSSSPVTKKKIAEFVTSRTGVKDLKITGIDEKIASNLKIENQLRDIIGEKINNHRFVEEMIRAATIFGDDRRRLQSILSKRFGDKLSPDQIKKIARLNFKDWGNLSEEFLTGIYSQFPDGREMNIITAMESESLSLQELLSKDYQFKRKVDEENSKIEGKRDGRIRYSMVEDLYCSPAVKHAIWRTVSIVKEIVKIMGHNPSKVFIETTREKKDDGRKSSRKDDLVEKYKAIKDCEDYNKLFEELDMMDNARLRSKKLFAYFMQQGRCVYCGKRIDLNDINNNTVCDIDHIYPQSKVVDDSINNTVLSCRDCNITKTNKFPIEDSIQQKMSSFWKVLRDNKFMSTEKYDRLTRK

SEQ ID NO: 8603 - protein, 1407 aa, unidentified
  REGION 1..1407: note = Description of Unknown: Cas Enzyme sequence
MKNKMDKKKKNQIDEYFVGLDIGTNSVGWAVTNENYELLKAKGKDMWGSRLFVEGASASERRIKRSSGRRSNRRKFRLTLLEELFDDEIKKVDPYFYLRLHESQAHQEDKSKNTKGQYFLFNDKNYTDKDFHKDYPTIYHLRYELMQRPPKDIRELFLAIHHIVKSRGNFLYEGQDFSGSGSLTEAIKNVIKLDFIEAIEGEKNIEDADIEKHIEELASNIAIILQDNSLSRKDRVSQAKKLFTEAKKKSGEALVNIMIGLTGKLADVFEEPELKDELGNDKNSFKFGAKDYTEQRNEYAALLGDKITLIDNCKVVNDILVLHKMKPNGKGFSENKVDLYKKHHKQLEEIKRVLRAKEYRTIYKRLFVDKPKKSGTAKSVKHCNYVTYINKNPNAAVCSQEDFYKNLNKELGFLPDSDLKSRILKAMDMNEYLPLQKGPENGTVPFQVHLEELDAIIAQASKKFSFLLDTDSDGYSIADKLKKLVDFRTPYYIGPLNPTHKVGKNGYSWVVRKEAGRVTPWNFSDKIDEAASAEAFINNLTNKCTYLRGEDVLPKQSLLYTEFMLLNELNMIRCNNKPIETKSKIALIETVFKKNARKITEGRLKEALKSLGEYKNEKNLVLTGINKEIKTDLKSYRDMKDILKDGFDIVKAEKIIYYVTLFGDAKGILRERLQTDELLKGSLSDKQIKDISNLKYKDWGRLSYKFLHGLNGEKKENATFMPMNIITAMREQPLTLMELLSSHYTYIDQVKSFNDQFIDESEFSLEDGLSYRIVDELWISPAVKRSVWQTLKILREIIQIKNGVPKKVFVEVARTNKAPKKETSSRKNALLTAYENEAEEKEKWKADIESRNVGEFQSKRLLLYYQQMGRCMYSGNPINSVDEIFTDLYEIDHIYPRSLTKDDSINNLVLVEKKKNEDKKNFYPVFSDWQEKNKAHWKRLLKNNLISEEKYARLTRTTPLSNEELADFINRQLVETNQAIKAITELLRRLLPNTEICYVKAEDVSWFRNKYNFIKWRTLNNQHHGKDAYLNIVVGNVIHEKFTKNPVNFIKKARLRIQKLKEKLKDKDKKKNRVFSLYNLTTVFKYAVKANNKIVWRPDTSLNVVENVMKKNSVLVVKKWEDVKGGFYKETIIKASDVNLDGSRPLKTKSYLKDMAKYGGYTGIATKYGTVAKITKINKRGKEVDEVHIVLVPVIDSLKIKTDDDLKVYIKSQIEGCINVKILYKHLYRSALIQYNGFLYYLGGKDGARMYLKQAVSLVLDDNIVKTLKQAERYLVNVKGNSQYQPNRKLINDELLLDCYDSLIKKLKTPIFRKLKGNNVDEVFTSATRQRFIAIEELQMKCEVLMSLVAFMNRDIQKGYEFPGLEVKKWTQPEMSRNLTRVNSFSIFNQSVTGLYEEEVKIIEKKK

SEQ ID NO: 8604 - protein, 1511 aa, unidentified
  REGION 1..1511: note = Description of Unknown: Cas Enzyme sequence
MKKILGLDLGTNSIGWAVVNADEISREDGSSYLKPKSISAAGSRIIPMSADILGDFEKGNSISQTAERTRMRMTRRLHERAILRRERLLRVLNLMGFLPKHFGDKVNRYGKFTDDSEPKIAWRKNADGKMEFIFQESFHEMLEDFKRHQPELVKEQKKVPYDWTIYYLRQKALKEPLTKEEFAWILLQFNQKRGYNQLRGEEEDEQQDKRVEYLAQKIVKVEATDQKKGDDIWYNVFLENGMIYRRTSKVPLDWEGKIKEFIVTTELEKDGTPKKDKEGNIKRSFRAPQEDDWTLLKKKTEADIDQSGKTVGCYIYEALLQNPNQKIIGKLVRTVERKFYKDELRLILEKQQSLIPELQNEKLYQACIEELYASNEVHRKNISKPDFVNFFLNDILFYQRPLKSKKSLISNCPYEEHFYKENGETKIAPIKCIAKSNPVFQEFRLWQFVQNLRIYQREIEIDGELHTDEDVTEEWLKNDDDYVQLFDWLNDRPSIKQDVLLNSYFKIKKEKGIEQYPYRWNYVEDKEYPCNETRATILAGLKKCEISEDILTHDVEMSLWHLLYSVEDKKEIEQALKKFASKHSLTEKFVETFKKIKPFTKDYGSYSEKAIKKILALMRMGNYWKEENVDENTRNRIDKIINAEYDERISLHTREQVKKFEEKKSKELNEEYHLDEISKFKNLPLWLACSIIYDAKKTEKWESPESIDNFLKKFKQHSLHNPIVEQIVTETLRTVRDIWKQEHSIDEIHLELGRDLKNPADVRKKMTERILQNENTNLRIKALLMEFANPEMGIENVRPHSPSQQDILRIYEENALDNLSKDDKDYQDISKISKLAQPSKSEIIKYKCWLEQKYRSPYTGKQISLSKLFTSAYEIEHIIPQSRYFDDSFSNKVICESEVNKLKDNQLGFEFIKNHHGEKVQLSQGETVEILSIDAYENFVKEHYFKNRGKMKKLLLENIPDDFIERQLNDSRYISRLIKGFLSNIVREKDSNEEYEQEAISKNLIPCNGAITDRLKKDWGMNDVWNSIVLPRFQRLNQITGKDCFTTTNGEGHEIPAMPIELQKGFNKKRIDHRHHAMDAIVIACTTRDHVNLLNNEAAHSKSNINRYQLQRKLRKYEKVIIDGKARDVPKEFLKPWDSFTTDAKNTLESIIVSFKQNQRVINKTSNYTQHFNDQKKKVLVKQAKGDSWAIRKPMHKDTVFGEVNLKKIKDISLDIALKDPSRIVDRELKNKILSLKSAGKTTKEIKKEINLSKITVYYFTNETNDRYFATRKPLDTSFDKDKIENEITDTGIQKILLAHLATKSDNPELAFSPDGIDEMNRNIKILNGGKFHQPIYRVRWYEKGEKFAVGQKGNKPQKFVEAAKGTNLFFAVFTNEQGVRSYLTIPLNIMIDCQKIFGAKWDVSIEQYLKEQKLVSDDLTLLFILSPNDLVYLPTEEEQSNTIKDKERIYKVVSFSGYQMFCIKANVSSTIVNKVEFTTSNKMERAITGEMIKETCIPIKVDRLGNILQV

SEQ ID NO: 8605 - protein, 1195 aa, unidentified
  REGION 1..1195: note = Description of Unknown: Cas Enzyme sequence
NCFDSTAAIGSIGQILMEPGKTKSDKAKAIERLVDTYIITDEVDTSGKTQKEQVKEDKKRLKSFANLVLGLSASLTDLFGSVEDLDEDLKKLQIIGDTYDERRDDLAKAWGEEIHSIDDCKSVYDAIILMSIKEPGLTISESKVQAYNKHKDDLVLLKSLLKADRKLYNAMFKTDEKGLHNYVHYIKQGRTEETSCNREDFYKYTKKIVEGLSDSKDKEYILSQIELQTLLPLQRIKDNGVIPYQLHLEELKTILDKCKSKFPFLNEVADGYSVAEKLIKLLEFRIPYYVGPLNTHHNVNNGGFAWAVRKASGQVTPWNFEDKIDREKSAAAFIKNLTNKCTYLLGEDVLPKSSLLYSEFMLLNELNNVRIDGKPLETKVKAHLIEAVFKQDHKKMTKNRIEQFLKDNGYISNPHKPEITGLDGEIKNDLTTYRDMVRILGDGFDTSMAEEIITDITIFGESKKMLRETLRNKFSSRLDDEVIKKFAKLRYRDWGRLSKKLLNGIDGCDKAGDGTSVTIIEAMRDFSYNLMELLGDKFSFMERIQEINDKLTEGQVVEPHDIIDELAFSPAVKRAVWQALRIVDEVIHIKKALPSRIFVEVARTNKAEKKKKDSRQKRLSDLYAAIKHDDSLVEALNGQKFNTLKSDLSGCDDAALRSKKLYLYYTQMGRCAYTGEVIDISQLNTDNYDIDHIYPRSLTKDDSFDNLVLCKRTANAQKSDIYPIGEGIQKTQKSFWKFLKQQGLISERKYARLTRIAPLTEDDLSGFIARQLVETNQSVKAATTLLRRLYPGVDVVFVKAENVTDFRHDNNFIKVRSLNHHHHAKDAYLNIVVGNVYHEKFTRNFRAFFKKNGANRTYNLAKMFNYDVNCTNAKDGKAWDVKTSMDTVKKMMDSNDVRVTKRLLEQTGALADATVYKATVAGKAKDGVYIGMKTKSSVFADVSKYGGMTKIKNAYSIIAQYTGKKGEVIKEIVPLPIYLTNRNTTDQDLINYVAFITPQAKDISIIYRKLCINQLVKVNGFYYYLGGKTNSNFCIDNAIQVIVSNEWIPYLKVLEKFNNMRKDNKDLKSNVVSTRALDNKHTIEVRIVEEKNIEFFDYLVSKLKMPIYQKMKGNKAAELSEKGYGLFKKMSLEEQSIHLIELLNLLTNQKTTFEVKPLGITASRSTVGSKISNQDEFKVINESITGLYSNEVTIV

SEQ ID NO: 8606 - protein, 1489 aa, unidentified
  REGION 1..1489: note = Description of Unknown: Cas Enzyme sequence
MSLMKKVLGLDLGTNSIGWAVINVERNGSGDEVFSRISGAGSRIIPMDQETIGNFNKGNSKSQTAERTAKRSARRLYERGHLRRERLNRVLATLGWLPEHYLKCLDEYGKLLPGLEPKIAWADGENGRCEFLFKEAFLEMMEDFRKNNPDILSESKKIPYDWTLYYLRKKALSTPLSNQELAWVLSSFNQKRGYYQLRGEDNETENKNEEYLASKVIKIEDTGEKKGAYTRFNIIFENGHVYPRTLKEAPDWEGKVKELIVTTTTGKNGEIKRSYRMPGEDDWQLLKKKTENDIEKSQKTVGEYIYDSLRESPDSKIRGRLVRTVDREYYRDELERILDCQMKFNADLRNTALYDKCILKLYPSNTAYRNSIAGRGFKYLFVNDIIFYQRPLKSKKSMIADCPFEERHYTKDGQKCTSHLKCIPRSNPLFQEFRLWQFISNLRIYEKECKVAGTVKENVDVTSAFLPDKGAVADLFCWMNDKEQITQYEFLSYPGFGLSQAARKNYRWNYIDDPKKKYPANETRAAMLGAFSKAGISEDFLTPEIEYRLWHILYSVKDKEELHKALKKFAVSHNLPDKFVEVFVKHHPYDNDYGAYSEKAVRRLLALMRAGKYWRAEVIDESTKTRIGKLITGEYDEKIKDRVREKAISLLSIEDFQGLPVWLASYIVYNRHSEIKETSKWTSPEDIDEYLSEVKQHSLRNPIVESVIMETLRTVRDIWKAEGHIDEIHVELGREMKNPADKRKQITERALENENANLRIRALLTEFLNPEYDIAGVKPNSPSQQEKMRIYEDEVLQSIEDNKVSAEIRSILDKFSQSDPKKKPTHSDIVRYKAWLEQKYRSPYTGRVIPLGKLFTPAYEIEHIIPQSVYFDDSFSNKVICESEVNKLKDNTLAYPFIKEHQGETVTLTGGATVSILSVEAYEKFVKEHYGSRAGNAKRQKLLADEIPEGFIQRQLNDSRYISKVIKTLLSNIVREKDEEEAISKNVITCNGSITDKLKKDWGLKDVWKGLVMPRFERMDEKYTDEDYTAINANGKKVPVVPFKHQKGFDLKRIDHRHHAMDAIVIACASRNIVNYLNNSSACRGAEVKRYDLQHLLCDKTHQDDKGNYQWIIKKPSPNFVSDVNTTLKNCIVSFKQSLRIINKTSNYYEKIVDGKKIRVKQEKGDNWAIRKSMHKDTVFGEVDLRFVKEVSVNEALKHPDRIVRKDIKAILSSCRDEKTMKAALKEKFPDMTKLEIYSFAHDTNDHYYASRVALSPDFKKETIEKVTDSGIRAILLRHLEQYEGDPSQAFSPDGIDKMNANIAELNGGKPHKPIFRVRKYEKADKFHIGETGCKSQKFVEADKGTNLFFGVYRSENGKRSYASIPLIEAIGREKDGFTPVPETDKNGNRLLFALSPNDLVYIPTPDEIERGIVDGELDRERIYKMVSCTGSICLFIPSTVAKSIVDKSEFSSLNKMERAITGEMIKEICIPLKVDRLGEIVDFNGRLL

SEQ ID NO: 8607 - protein, 1007 aa, unidentified
  REGION 1..1007: note = Description of Unknown: Cas Enzyme sequence
MKYIVALDIGVASVGWAVIDKDTEKVIESGANIFPEASAAENQIRREMRQGRRMRRREKTRLNDFNKLWEKCGFTIPQDRKIDVVELKVKALYEAVSLDEVYFILYHYLKHRGISYLEDAEDDSAKGNSAYANGLALNAKELQTKFPCEIQKERLRKIGKYRGQTQLVDVSGEKTDLSNVFTTGAYRKEILQIFKTQKKYHDTLSEEFSNEYIFLFNRKRKYYEGPGNEKSRTDYGKYTTRLDENGEYITEDNIFEKLIGKCSVYKDEIRAAAASYTAQEFNLLNDLNNLIINGRKLQENEKRLIVDLVKTSNIINMRKIIAGAIGETIEEFSGARIDKEGKEIFHKFESYNKMRKELNQIEVDITDFSREELDEIGYILTINTDKEAILEAFANSKLDLSDEIKECLITLRRKNASLFSKWHSFSLKIMKELIPVMYEQPKEQMTLLTEMGVLKGKTEEFAGLKYIPVDAASEDIFNPVVRRSVRISFKIINALLKKYGALSEVVIEMPRDRNSEEEKDRIKKEQNLNEKEMKFIEQKLALTYDFPLLPAYFSSQKQLNLKLKLWNEQDGKCLYSGKTINPKDIIEHPDMFQIDHIIPRSISFDDSRSNKVLVYDTENQKKGNQTPYYYLTHSNNGWTFEQYKATVMMLSKKKEYSLSRKKVQNLLYSDDITKQDVLKGFINRNINDTGYASRVVLNLLQNFFYAQEVDTKVKVIRGSYTNQMRKNLKLSKNRNESYAHHAVDAMLIAFSQLGYESYHKLQGSFIDFETGEILNQDMWEKQMLDEVYDGYLYGVNWSNINIRKEVTRAEKEVKYWHYVDRKSNRGLCNQTIRGTREYGGKTYKINKLDIRTKEGIATFKKLAFSKKESDRERLLVYKNDRRTYDDLVQIMKDYSDAANPFVQYEKETGDFVRKYAKKHNGPRIGTLKYTDGEVGACIDISHKYGHEKGSKKVILESLVPYRMDVYYKESENTYYLVGVKQSDVKYENGKYVIDEDAYALTLEKEKM

SEQ ID NO: 8608 - protein, 1106 aa, unidentified
  REGION 1..1106: note = Description of Unknown: Cas Enzyme sequence
MKCIATFDIGIASVGWAVIDKETEKVIESAYNIFPEATAAGNQIRRDMRQAKRLKRREKNRLKDFKKIWRKYGLLIPTVSRTDIVELKVKALHEKISLEELYLILYNYLKHRGISYLEDAEDDSVMGSSSYANGLKLNAKELEKKFPCEIQQYRLEAIGKYRGQTQSIDADGNKIDISNVFTISAYRKEIQQVFETQKMFHNELTEDLCDEYLLIFNRKRKYYEGPGNEKSRTDYGKYTTNLNEDGTYITEKNIFEKLIGKCSVYPEELRAAMASYTAQEFNLLNDLNNLTINGRKLDEKEKRDIVEKVKTSDSVNMRKIIADAIGEKIVEFYGARVDKSEKEIFHKFESYNKMRRALATVNVDIAKFSREELDEIGYILTINTDKEAMLEAFKYSDLNLEDTVRDCLIEIRKKSGSLFNKWHSFSLKIMNELIPEMYMQPKEQMTLLTEMGVMKGRKNEFVGLKYIPVDEASEEIFNPVVRRSVRITFKILNALLKKYKTFEEVVIEMPRDRNSDDEKKRISESQKVNEKEGKYIENKLISEYGIRLLPSDYASHKKLGLKLKLWNEQDGKSIYSGKTIPPQDLIDHPEYFEIDHIIPRSISFDDSRSNKVLVYKTENQDKGNQTPYYYLTHLNGTWTFEQYKAYVINLSKKKEYAISRKKVQNLLFCNDITKIDVVKGFINRNINDTCYASRVVLNTIQSFFDANEMKTKVKVIKGSYTHQMRVNMKLDKNRNESYTHHAVDAMLIGFSQLGYEAYRKLQGSFIDFETGEILDPAMWEKQMTDEVYVEYLYGKRWSNIRNEIIKAEKNVRYWYYVDHKSNRGLCNQTIRGTREYEGKTYKINKFDIRSKDGVKIFKKFALSEKESDREKLLVYRNDRKTFDDLVKIAKDYSDAANPFVQYEKETGDYVRKYAKKHNGPRIDKLKYIDGEVGACIDISHKYGYERESKKVVLENLVPYRMDVYYNATKELYYLVGVKQSDIKCEKGEYMIDEEAYIKTLIKERMLSLGQKIEDLQGLGFEFKLSFYRNDIIEYEKDGEIFRERFSSRTMPKARNYIETKPIDRAKFEKTDRKLVGLGKTKMIRKYRMDILGNCYLCENEEFSKKC

SEQ ID NO: 8609 - protein, 1159 aa, unidentified
  REGION 1..1159: note = Description of Unknown: Cas Enzyme sequence
GVAIVKCKKRGNIMNEVVKNYYLGLDIGTNSVGWAVTDDEYNLCKFKKKDMWGIRLFENGETAAERRLQRTARRRTDRRKQRIDLLQMLFADEMAKVDDTFFIRLNESRLHAEDKSVDFKYPLFVSDEYNDVDYHKEYPTIFHLRKELIDNPKPHDIRLVYLALHHIIKNRGHFLIDGDMKAARDFDATFLQILEEMTSDIFPFDVEVTPEGIQTAKEILNSKMPNSSRAKALEAVFLYGTQDLDKDEKKKRKDSITHICKLFVGNKGDLAKIFYNTDFGGMEKTAFSFGDEIFSNAIFPELEASYPDEARIIESMKMLYDWGKLSEILGEEEYISKAKVKQYEKHKRDLRTLRTLILKYCDKKTYNEFFNNPNAKNAYSNYIGEVKKNGKKYAAKKLTDEKAYDAFFKNIKKILAAMNCSEDDQSAVSAIFEDIENGKFLPLQRSKENASIPKQVHEAELNAILNNAESYLPFLKEKDAEGISVREKICSVFRFRIPYYVGPLSDRHKSQGANQWIKRKKEGYIYPWNFSEMVDEQASNEEFIQRMTNKCTYLVGEDVLPKNSLLYTKFMVLNELNNLRIRGNKVSVKIKQEIYNELFKTKNRVTGKSLLTYLQKDDPELRREDLTGFDGDFKAQLKSYMDFGKKVFGKRIDEEPIQNIVEDIIRWSTIYDSDSKMVRRAIEQKYGDVLTSEEIKNATKLHYTGWGNFSRKFLNGVVGIKRETGEVFTVIQALWETNDNLMQILSSDYTFMDEINTLNEKNMDEITHISYEDLVQPLYVSPSVKRAIWQTIQITEELRKVQKGAPEKIFVEMARGEEKEKKRTTSRKNQLLELYKNCEADIRSWIKEDYENWIEGIENREEREFNSIKLYLYYTQMGKDMYTGEPIDIHQLMNGNSKWDRDHIFPQSRIKDDSLDNLVLVNKTSNLGKSNTALSAEVQQKMKPFWAKLRKNGFISEKKYTRLTRSGEFTDDELSGFIARQLVETRQTTKIVADLLQKIYPNTQIVYVKARLASNFRHDDLKMLKSRRVNDYHHAKDAYLNIVVGNVYNSIFTSDPRRWFKENGEDAKKYNIQKIFRRDVVDKNGKIVWLKPNVNEENKYIRNEDGGLTGGSIDTVRKTMLQNNVLYTEYTYCETGQLYDLTIYKKCDSSITIPIKAGL

SEQ ID NO: 8610 - protein, 1220 aa, unidentified
  REGION 1..1220: note = Description of Unknown: Cas Enzyme sequence
MKKILGLDLGVGSVGWSVISCDDEHRPLEILGMGSRIVPLTPDESNEFSSGNAASKNQSRTQKRTARKGYDRYQSRRKALTDKLRELDMLPDETLIKLPVLDLWTLRARAATPGDKLSLPEIGRVLYHLNQKRGYRHSKQDDSADKTQRDYVQAVNKRFQEIKDEGLTIGQHFAEKLKESEIITDKGAFYNYRIKEQVFPRAAYVEEFDRIIQCQREFYPEVLTEANVNEIRNEIIYYQRPLKSCKHLVSVCEFMQRELFDADHNPIRNGKGEIVVAGPKCAPKSSPLAQVCKIWEEVNNIRITNKENDEYFISIDNKHEIFDFLNTHEKMKADDLFKILGIAKNSGWSADKAMNKGMVGNTTRVALMKALKGRRDIDEILRFDLREVESNQVNADTGEVLMEIGAECKSEPLYRLWHIIYSISDKNEQKSALEKQYGITDESMLESLCRIDFVKQGYSSRSFKFMRKILPSLMDGAKYSEACDVIGINHSDSITKAENQTRKLLTKLPQLQKNELRQPVVEKILNQMINVVNAVIDKYGSIDEIRVEMARELKLSKSGRESAAKNIRTREKANEEIAKRIEELGLVPSKNKILKYRLWEESGKRCFYCGQPVSATEFLNGLDVEIEHVVPKSLLFDDSFSNKVCACRKCNAEKGNATAFDFMKGRGENAFEDYLKRVETAFKENKISQTKRNRLLTPAGKIPKDFIARQLVQTQYISRKAMEILNQVCRNVYGSSGDVTAYLRRIWGYDEILHSLDLPRYRKGNLTGDVTYVHKVQTHTEERIKDWSKRLDHRHHAIDALTIACTRQSIIQRLNTLNAKTAIGEEQMSLDKWTLAQAHFSVADVADHVADILVSFKSGKRVTTLGKRYVYKAGRRIVAQENILVPRGALSEESVYGRIKSIEEKVPVKKLFERVDDIVKPRIRHLIRERLEACGGDCSKAVSSLKKSPLYLDEENTIMLEYGSCFKPEYVIKYSLNSIKAKDAVSIVDKHVREVVTARLAAFGDDPKKAFAEPLYADEAGKIQIKTVRCYTGLSQVVPVKKDADGNDIGFVKPGNNHHIAIYKDADGKYQESIVTFRDAVERKKYGIPVVVRNPVEVLDTIIDKNVPEDLAGGLPSPEWTFVMSMQQNEMFVLGMGDDEFNDAMAGRDYKSLGEHLYRVQKLTSSYYVFRSQYETKLDDSKNALRMKKYYRTQSFNALFSLNPRKVSISLLGEISMKDD

SEQ ID NO: 8611 - protein, 1340 aa, unidentified
  REGION 1..1340: note = Description of Unknown: Cas Enzyme sequence
MSSIMKLKKEEINYSIGLDIGTNSVGWAVINENYQLIKKGKRNLWGARLFDPAETAQARRLSRSSRRRYNRRRMRIRLLQEMMNEMIMDVDQTFFIRLKNASFLDEEDKASLLQEQYKNNYNLFIENNYTDKNFYDQYPTIYHLRDYLVHTHEKVDPRLIYLALHHIIKYRGNFLYENQNFSSDMHNIKDQFHDLLVQFFDYHQINPIQTDNDKVEANILSILKEKKQRTQRVDECLRMISLDKDYRASYKQFLLALVGLKFDLTKLFGDNALTNEGKNISLCFASEKYEEEKSECESILNDEYDEYLQEMYAVYSWIELQGILNHRGEQSEISISNAMIQRYDKHHNDLKQLKTIIKKYIPSQYNQIFRSKNGKEHNYYQYIHCPSKTKREDFYKFLLKKLLQCPKDNPAVQYCQEEIKKENFLLKQNDRTNGNIPYQLNEIELLKIIENQSIYYPTLKEHAEHIKKLLTYRIPYYIGPLNEKSSFSWIIKRPEFVNEKITPWNLENVVDIDETAHAFIKRMTNYCTYLIDEPVMPKNSLTANMYEVLAELNKIRVNDKLLSVSVKNQIIEQLFMKYRTVTDKQLREWFKKEQIFLNNENLEITGYQKDKAFSSSLRSWIDFHDIFDDIRANYNTIEKIIYDMTIFEDQKILKRRLKKIYGLSDSHIQLLLKKKYKGWSRLSRKLVDQLYADNYISSHCTILDVMKETHMTLMEIINDDKLGFKQLIQDNRPQLNDGKFSYKEVESLGGSPAIKRGIWQSLKIIDEISSYMKHRPSNIFIEFSREEGKKQRTISQVKALKNIYDTLSLENTDYAEASHHLQQENDSNRLSNERLYLYYTQMGHCMYSGQPLDIHKLNLYEVDHIVPQSLIKDDSLDNKVLVIKDENQRKLNDYAISSHIIDRYKDGFWKYLLNNKLISQKKYFNLIRKEYDEKTTEKFIHRQLVETRQIIKNVSQLIVEHYSSTKVMTIRANLISQFREKYHIYKNRNVNDYHHAHDAYIACIIGNFIQKCYPKLEARYLYGEYQKVFKNMEKKHFHDGFLLNAMNNDGFDLETGELVWNASYIGSILKCFEYKDCYITKKLEDNDSSLFNVTIISGKEKTKQGETKASIPVNKARNNIAKYGGYSGLEYEMIAIEGMKKKKIVRLLVGMPLAYRDYPLDKKIEYIEEKESLTHVKILRTIKKNQLIEYKGGLFYMTSFQEIVNAQQLVLNMHFHKIINCINQALISHNYENIKAQDNIEVFHIWLEKLSHFYPLYHNIYEKIKAMESAFITLSVEEQCQVINELLKITVAKPASNKKLHLNDFVLSERINRSQRTLSLDDIQLIENSVTGIYSKKVKL

SEQ ID NO: 8612 - protein, 1100 aa, unidentified
  REGION 1..1100: note = Description of Unknown: Cas Enzyme sequence
MQTFHYTLGLDIGIASVGWAVLQNDSDGEPIKIQNLGVRIFEKAEHPKTGESLAAPRREARSARRRLHRHRHRLQRIRWLLEKQGIMPEQDILELYQRGAFSISPYELRCEALERPLSKEEAVRVLIHLAQRRGYQSNSTAEAAKEEQETGKIKAAITENRRIMDEKGYRTVGEMLWKDERCWQKNPDGTKFHQPRNKADSYRFTVRRSDVVEEVHSIFRRQRELGVTWMTEELEDAYLSILESQRSFDEGPGGDSVYKVDFNKRIGICPFEKSEHRAAKATYTFEYFKLLQDINHIRLVESGQPSRPLCPDQRESLRRLAFRSASVSFQQMRKELNLADTVTFNCLYYGEDGVAKAEKRKWPQMQSYHKIRLALDKVAKDAILTLSTAQLDEIGRILTLYKNDERRLQALHSAGIPEVYHASLLPLSFSKFGKLSLTAMKKLIPFLEQGKRYDEACAEAGIVRRDTSSVQKGAKLSIDDLEEITNPVVRRAVSQTIKVINAVVRTYGTPDAVHIELAREMSRSFADRQKLQKRQDENRKQNERLKEQIMEVKRSTAGGLDIVKFKLFQEQDGICMYSGKNLDISRLYEPGYVDVDHIIPYSRCFDDSYQNKVLVLASENRQKGNRLPYEYFGQDAQRWHSFEVRVETKIRNYRKRQKLLKRQFTEEESQTFTARNLQDTQYITTVIFHLIKDHLEFTQVRPASRQVQAVNGAITAMLRGRWGIQKIREDGDLHHCLDAAVVACTSPGMIQRLTAYNKYRESPINGQYLDHSTGELLTKKEYDEKYAPKFPEPWPRFRQELEARMEPADPRGAIDRLKLSTYDSDEPIKPIFVSRMPNHKVTGAAHAETIRSSALGDGYTVSKVPLTRLNLDKNGEIPDYYNPASDRLLYDALVERLKAFGGKGEQAFAEPFYKPKADGTPGPLVKKVKVYDKSTLNLSVRNGVADNGDMVRVDVFYVPGDGYYLVPIYVADTQKAVLPNCAVVAHKKYALWKEMDDSDFLFSLYPGDLIRIQSKKGITLNISKGGTGEAKILRKDALFYYCGTDIGSGNISIETHDRQYSQPGLGFKTLLLVEKYQVDVLGNYYKVTSPEKRMPFSKEG

SEQ ID NO: 8613 - protein, 980 aa, unidentified
  REGION 1..980: note = Description of Unknown: Cas Enzyme sequence
VGFSDVAKIVKLKNDNTEYLNGLNVKAKLKGCDTSISINKVLSKRGINSASIEDIWQALYNNVHEGSEYDEKSKRIQSIVNTLPQNIEESVRIEVALELAQTIKFPRKYASLSKKAIEKILPLMRPNPLPQDIPDVVKHNFGQIQHLLETGEAIEEYLLNDYIIDFVNSNPNALEKGGLMYAFAASLVYGRHTKENIKPQITNYHDIKYDKERERNLRNPIVSQIANETMQVVKAVWKNYKLDPNELEIRVELARDLKNSAQERDKIYKSQIKNRKVNENIKKRLIELHQEVNERNIELYKIWSRQESLFDENGNPKSRPKFKNENNPTPDEIEKMKLWEKQQFISPYTLKPIPLAKLFDDRLYDIDHIIPKSRYFDDSLTNKVVCETNINEEKDNRTAWEYISQQNSALGICSLEKYLEHVNKNFFGQKKRNLLAEKIPSNPVNRQLKDTQFISIAIKDELAKIVGSDNVKTTTGGVTDYLRSHWGLKKLFMNLTESRFKQMELWNLDENGNPKESWITKGFDKKRNRNIYEIKGWSKRYDHRHHAIDALVVALSDNKFIKRLNDLNKYFQEELNKHKSEISFSDEDSLEEAFFKLNKEKRDAIMKEIEGSRKFKSPIEDLIPEAKEFLETMIISQKPKDKLAITENKEGKKQLKIRAALHQETYYGKTNNRDTKTINISLLQAKDIGQIIDKNLQDEIDAHRKKYDTMKEAFSGEGLVAFNDSRLQNNKPPVYKVKVWYSKKETEESGLQQLYSNNPKQSVLTGDNYMFIVMAKNEKRIFDIAPLYDSVALAKELIKTKTIDIEESKRMICERIREENAEKPDTTLFYLQQNDLVYMPHPEDSILELSANALKEWFKNNDNKKDFANRVYKVVKFTGKDCFFIPNNYAKEISLAKDLSDAEIADLKNRKYKDKKIPKQELNYEEFSSFGNCVKFVPDERFIKNILDKKNPKPPKIQDYCVKIKTDWLGNVIEFNGIRL

SEQ ID NO: 8614 - protein, 425 aa, unidentified
  REGION 1..425: note = Description of Unknown: Cas Enzyme sequence
MKKILGLDLGTNSIGWAVVNADENGNPVKIEGMGSRIIPMGSDKIDYEKGATITKNAERRAKRSARRMGKRYKMRRNKLLFILNELGMLPEQFQFKNGFPEANKLQELELLPIRKKNLQLDSLQHYELRAKALKEKIELKELGRILYQYNRLRGYAGGGDEEPEKKNSSKDEDQDDLKKYETRVQKFVIKEIEKSDLTFKAKSGKDKGKDLPVFNITVLDEDSEINGTTLLQNLEEKVGQEIELEIRIKRTKKTETVTFALPQKTNWRKQMEETEKTLKEKGFFPCQLFVEDLRKNKWTKIRNRVILRQQYTNEFDAVWSEQAKHYSFLNECSPEILRKILDYIFPGKSPSQEQLRNDGLRNGLKYIIKNQIIYYQRPLKSQSDLIAKCQFEKDEQVVPVSHPLFQEFRCWDQINRLYITSKQDV

SEQ ID NO: 8615 - protein, 1306 aa, unidentified
  REGION 1..1306: note = Description of Unknown: Cas Enzyme sequence
MKKILGLDIGTNSIGSALVSIDENPSNSKLVYSGCRIIPMPDDQIQNFNKGSVESAASARTGFRSMRRRNERHILRRQRLHKVLNEMGFLPEHYVAKIDFSNGKSDFLKDEEPKIAWKPTADGKYRFLFMDSYAEMVTLIKAKHPDFGKIPLDWTVFYLRKKALTQKISKEELAWILLHFNTKRGYYQRGADEEDDNKTYECLTVKDVEKADIDRRGDQWYNVTFENSDLVYPTKSAEIRNLIGQEIELIVTRKTQKDGTIKVSFSKPSEDDWGLKKKRTESLIENGKTTVGEFILNALITNPHTKIRGKLIATIERKYYRSELEKILQSQKEYHPELSDRSLYHRCVKLLYAKNESHRSNIISRDFTYLFVNDIIFYHRPLKSKKSLIDNCPFEENRVEEKAFPVKCVAKSNPFYQEFRLWQFISNLKIYRRVDDCDVTGEYLASPADYAELFDFLNDKKEISQNQIFSCGIFGRGVSSKNFYWNYADDDKKKFPCNETRALIVNALNNAGISDVKKLDAPVNGENSATWLYRLWHLIYSVTDKEQYEKGLASFADKFLSDSDKKDAFVESFAKIEPFKNDYGAYSEKAIKRLLPLMRCGKYWDFDKIDSATKSRIANIINGVDDESVSEKVREECKKNSLCEEINFQLLRPYLATYIVYNRHAEAKSTDKWETPDELDNFIRSFRNGSMRNPVVEKVILETLRVVRDIWKKYGKIDEIHVELGREMKLPKDKRERIFKQNLDNEQTNLRIKALLTEFLNPELGIEDVRPFSPNHQERLKLYEKSVLEQVDDVPDYVSDIIKKFAESDVKKRPSASDIKRYKLWLDQKYVSPYTGKTIPLSRLFTTDYQVDHIIPQAFFFDDTLNNKVICEAKVNSDKSNSFGRQFIKEFEGRTIELGGGKTAKILSLEEYDNLVAETFKNNRRKRDNLMCEEVPDEFVSRHLNDTRYITRIVMQLLSNIVRERDERGNLEPEANSKNVVPCNGEITSRMKLDWGINDVWNSILAPRYENLNRKYAERMGLKSSNHFGEMVNGHFQINMPLEYQKGFKPKRIDHRHHTMDAIVIACASRNIVNYLNNSNANQRNERLDLRAAVCFKKPDTNSNGYKWVLKKPWPTFTEDTKQALLQTIVSFRQNIRVLTASTNFFDYIAENGKKARKKQSSENHFAIRRQLHKDTVAGRVNLRSIKEVKFAAALDNPSRIVDKELRSFVKILLGQGLSKVAVERDVADRFDNFNPKKVEVYVYSDETDTPMIANRVTLDDSFNEKKIKTVTDTGIQKILLNHLRRHGGNSKDAFSAEGIAEMNNN

SEQ ID NO: 8616 - protein, 1062 aa, unidentified
  REGION 1..1062: note = Description of Unknown: Cas Enzyme sequence
GFRQGRRLTRRRRTRLSDFKSLWTGRGFAVPKNTSEDVLAYRIKGFSEKLSEEEVYLVLLNSLKHRGISYLDDAESGDLSSDYAKSIARNEEELKEKLPCEIQWERLQKYGAYRGNITVTEEGEPITLRNVFTRSAYKREVEMFIDSQTKYNPKLGGEFKDKYLEIFNRKREYYEGPGNELSRTDYGKYTTELNPDGTYVTVENIFDKLIGKCSINPDEQRAAGASYTAQEFNVLNDLNNLTITSDSKYVEDSKLTEDAKRQIVETIKTSKTVNVKKIIGDVIGDKKCNISGARIDKNEKEIFHSFEAYRKLRNAFEEVGEDITLVSREELDAIGKILTLNTDKESILKAFSKDNMSLSSETIEVLIKVRKANGTLFSKWQSFGLSIMKELIPELYAQPKNQMELLTDMGIFKSRGDRFIECDAIPSDVIVEEIYNPVVSKTVRITTRVLNALIKKYGFPDRVVIEMPRDKNSEEEQNRIKKEQRDNENELNAVIAKVKSDYGRTITDEDFKQHSKLALKLKLWNEQQGVCPYSGKSIRIDDLLDNPNLFEVDHIIPLSISFDDSRSNKVLVYSSENQDKGNRTPMSYLSGVNREWDVHAFMDYVIKTYTGVQKRKKKENLLNEADITKVEVLKGFVNRNINDTRYASRVVLNSLQEYFDAKDCDTKVKVIRGSFTHQMRVNLKLKKDRDESYSHHAVDAMLIAFSQMGYEAYHKITEKYIDYETGEIIDRGAFDKMLENDTEYKNAMYEDKWLRVKGNIESAEKKNKYWYQVNKKCNRGLCNQTIYGTRELDGKVCKISKLDIRTDDGFKKFKNIVDKGNENKFLMYRNDPKTFEFLKEIYRDYSDAKNPFVQYENETGDVICKFSKKNNGPKITQLKYEDGEVGSCIDISHKYGYERDSQKVILDSLNPYRMDVYYKADEHQYYLVGIKQSDIKCQSKAFVIDEEKYAEALRNEKMISLGQSRSDLKSLGYEYRLSFYKEDIIEYEKNGETYVERFLSRTMPKQRNYIETKPVDAPKFNDITQNKVGLSKTTSIRKISTDILGNRYYVDKMKFSLVVGRQ

SEQ ID NO: 8617 - protein, 1363 aa, unidentified
  REGION 1..1363: note = Description of Unknown: Cas Enzyme sequence
MKEYYLGLDIGTNSVGWAVTDENYELYKFHGKRMWGIRLFEQANTAADRRMKRANRRRLSRRKQRIDLLQELFAEEMYKIDPTFFIRLNESRLLVEDKSTDEKCPLFISKDYSDKEYYKEYPTIYHLRKELMTNPNPHDIRLVYLACHHILKNRGHFLIDGNLSDAKNLQVIVDKMEQVFCDQTGVTLSVNNMQEFEYVLQDKTLAKSAKAKKISEYLDCNYTGETEEIEDEKKLKTVKDQFCRLIVGNQGDIKKLFSKNFEDLKAVAFKFSDAKYDEEIFPDFMTKYPDYAHALEQMKAIYDWSVLNEILNGEDNLSSAKVKSYDKHKKDLSNLKHLLKNYMPEEYKEFFNSTEGKCNYGNYVGTVVKNGRTIPLKKCTEDDFFKGLSKIMAAFPIDKLDESDAKCYKSVSQDIANRTFLPLLRNKSNGVIPNQVHTQELKKILQNAQEYLPFLKTEDNYGTVADKILKLSVFRIPYYVGPLSTRHRDNGANAWIVRKDGKEQDRIYPWNFEDVVDLEKSNEEFINRMTNKCTYLLGEDVLPKNSLLYSRYMVLNELNNLKIRGNKVSVQLKQELYRELFCKKIKVTGKNLLDYLKKNDPSLELQDLSGFDENFKANLTPYLDFEKQIFGDKIACEENQMIAENIIKWKTIYGDDSKMLKQRINKVYPGVFNEDQLTKMCRFNYSGWGNFSEKFLNGIEGADRETGEVFTIIKALWETNNNLMQLLSKQFTFTEEIDALNAAQAGKIGKVTYENTVQDLIVSPANKRAIWQTVQIVEEVKKIMGCEPKRIFVEMARGEADEKNKKRTTSRKQKLLDLYAACEDDVRNWTKEIEGREEREFNSKKLYLYYTQKGRCMYTGETIDLDELMSANSKWDIDHIYPQSRIKDDSLDNMVLAKKSENAKKGNKLLSSEIRKRQYPMWSDLYQSEFISKKKYERLTRKNDFTDEELAGFIERQIVETRQSTKAVAELLKRINEKSQIVYVKAGLVSTFRHDHDDDPVFVKSRRVNDYHHAKDAYLNIVVGNVYNAKFTDNPGRWIKENRNTNYSIRRVFDFDVMRGTKIVWHGMKESSQSIATVKKVMGRNDILYTEPSYCDKGQLFNETLASKGKDNVIPLKKGLDAYKYGGYSSAKTCCFAFIEFDGKKNTRQKQIVDIPIYIANMAKQDVSVITDYLQESKGYQNVVMKKYPIKKNACIVVDGFPMRIRGANEKQLLLKNAVQLVIDKEFVGVIKKIEKFLEKGLNQDVEEKYDGFDDETLEELYDVLTNKFSETIYKGRPANQYKLLAGTKEIFKDLKLSEKAKVINEILNMLRCDATTTANLLLVGGTALSGNIAITKNKAGSVKLKLVCQSVTGLYEEREVLE

SEQ ID NO: 8618 - protein, 989 aa, unidentified
  REGION 1..989: note = Description of Unknown: Cas Enzyme sequence
IGEDGKSCSQEDFCKFLKKRVDGMKVSEDEEERRIYIEIENNQFLTKLRSKENGLVPYQLQLKELKAILENAKEYLPFLTSKGDDGISVEDKVISLLTFRIPYYVGPLAKPTDNNKAWLDRRDDIIYPWNFSEVVDLKKSAKNFMKKLVGRCTYTGETVLPKDSLLYSQYMVLNEINNIMVNGHPISVENKQQIYNDLFLHNKKAKTKKSLKQYMIANGIMEKTDEISGVDDKINSNLKSYHDFLNILEKTNNNTDLVEEIIEHIIVFGSDKKMLREWLDEKRELDENDKKHILRLNYKDWGRLSETFLKKIYHVDKKTGEAHSIIDRLWNTNNNLMILLSDKYDFNDEAKKYREDHFGINVSIKAQLDEMYIAPAVRRSVLQTMRIVDEIVDIKKSYPDKIFIEMARTSSKEMEKKRTESRKDKLKKLYDSCKKQLLDLIPDYDDLYDNLMKETDQSLRRDKLYFYYTQMGRCMYTGEKIDLKKLLNDTDKYYDIDHIFPQSKVIDDSLDNRVLVKSTENRDKTNIYPIKEETRSKMYKFWTMLHDKELISTKKYERLKRATPLTEDELSSFVQRQIVETQQSTKALADILKRTYPDTTIVYSKAMNVTRFRQKYQIPKFRNVNDYHHAKDAYLNIVVGNVFNTKFTENFFKHIMEKQDDYSLNRVFEFNTPGAWVAPTREENFNYNRKQNKEALSGTIETIYKYAVKNTPIVTFMPTQQKGELYDAQLVGKNKGQLPVKKNLPIEKYGGYNKVTGTYFFLVEHTEIKKRVRTILPVYLYALKEYENNPVDYCVTNFGLVDPVIILNKILFNSLFEIDGSRLILTSRSNGGDYIVYKHTYELTIDDKRALYLKKIQKFIDRNAGMKVEPTVTVYDGLTIDDNIKLYEWFVEKINSNVYKNVFGKTVKYLNDNRNQFVELSIYCQSKILLEILKLFVCDRRISNLNELCKKSQVGTIMRSSELTKFKTAFLINQSVTGLYETKIDLLKE

SEQ ID NO: 8619 - protein, 1072 aa, unidentified
  REGION 1..1072: note = Description of Unknown: Cas Enzyme sequence
KKEVKKMSKTDSISSYTLGIDLGSNSIGWAIVKLDENDNPCGIEKVGVRVFEAGMKGQYEEGKEESRNKKRREARLVRRQIERRARRYRKLANLLQQIKLLPQGDLNDSGERQRILDELDKVLRTKYINNHLSPEEKNRLHQIFIYYLRSLSVEQKLEPNALGRVLYHLGQRRGFLSNRRGQKKDNEEQGKVKKGIAEIRVEMSRLGTETLGKYFAQIDTMDINQKRIRGRWVARDMYEQEFYTIWDFQSQFYPELLTEEKKKQVFFAIFFQRPLKSQKDKIGFCQFECIARGKKRNRRRAPWVILKAQRFRLLQKVNDLLIVADKNTKNPLTDDERKLVIEHLEKNGDTTFTQLRSLLRLPEEVKFNLEVAGEEKIPGNRTASEIRKVIGEHWDGMNSEEKDKLVEDIYSIVSDRALKKRLMRHWKFTEEEAQKLSEIPIEDGYCNLSRQAIDKFLPGLQQGRRYGELVKEIYGMDAIREGFKVDLLPPIEEAPIGEIRNPTVQKTLSEMRKIVNEIVKLYGKPRYIRIETGKDLRNTKKERERLWKNSRDMEKERKKIKDVLMKNGIANPTRDDIERYMLAEECRWICPYTGRSIKFKSLFEESQYDIEHIIPLSRCLDDSFKNKTLCYHEENRNRKHNKTPYETYSQDETRWNEILERVSKFNSAHAKEKLKRFNLHGKTLEEFIDKFSSSQLNDTRYAAREAVIFCGLLYGSEYRKHVFAVAGPTTAVIRRMWKLNKLLGSPEKNREDHRQHAIDAIVIAITSPAMIKNISEQAEKIPKSERKHDRWWRFIQPPWDTLYNEAKEKILSIIVSHKPERKVSGRLHEETNYSPPKQGDNKDETVVHVRKAIASLSKGEVEEIVDPVVRETVKKKLEELGKENPKKAFTDLKNYPLMPNRKGLQIPIKSVRIRKKLSVFPVGSKHRVRYVATDENHHIEIFETKDKKGRIIWDANVVSMFEAMQRKRRGEEIIQRKLIRDGKVVEDAKFLFSLCKGDMVYMKDSEGEYQYYKLVIVSEYASGAKVMFFLPHHVAKIPKSWVGLTRYPSSLQKSEAKKYSINVLGETHIAHD

SEQ ID NO: 8620 - protein, 1027 aa, unidentified
  REGION 1..1027: note = Description of Unknown: Cas Enzyme sequence
VLHPSDRCVPIADRHASYFRVLETVNNIRIVAASGLDRALTAEERERVIALLRGPLLAPGKGEFKGQLVPKGSASAADIRAALGLSKRAAARGASSAGRGSRHGSAPPDADVRLNIEADADREINTDWFHREIVCKAIGVEHWDAMGERERESVNRAVLRFDPDYPEDANKLRTGAEKWWKLEADAAERLVAAWRTRPKLERRLKLSRRAVRNLLVFMEKPLRDDRTAEVRWPTQIEARRAIALDPSFRDLTTGQALDDRTRRRYLTGAAGLTARDRYYQRQEKHWIKRDGQVVCDANGEPIAVLPPAPMLPNPVVRKAIHEVRRHVLAYLRKFGRKPDRIVIEMTRSATQPGKLRDEQLRRNRFREKQRKDIIKEYQLAQLTLNQQRTAVDRVLLAVQQRQMCPYCGEGGLTPRVAAGGQDVEIDHIIPFSRCGNNSLNNKVLVHRGCNRDKLNQTPREWWGAQFNERSRIAARMFRDYKWEKGDYFTHRDYQQKWANFAAKELPREWRGSQLTDTAYASRQVAAYLADALYGGEGLPERGGTRRIFFTKGTYTNQLRKDWQLFETLRPPRSADGTPPIKPTAQEEEALAQKNRADHREHALDAVAIALTDQQRIEDLARYAQRVAVARTEWQARHGDTDNFQPPRREPIPPPWGSVAEFRRQVLAMVYERFDSAPDRSGQKDARGNEKRLIVSHRAIKRKLVGALHEETLFGTVPGSRDLFTGRKGILSLTPNHLRVPKGWDALSAKLDGDGIAPPEKKSIRRKLAKLPDPPPGKSGIVRDRALRDRLRKCLRSAGFDPDKFTKNDIKEAAENGKLTHASGVPIKRVVLLRTMTDPVIVSRWAYDPTNGERVKIFDADAHRLGDNPGNLRAARVYVGGNNHHIEIRQNRMTGRWTGEVVPTFEAVRRVRQERRPAVDRSDRDDEVFIMSLAEGETVYMKRPGHDYADYFVVFKLDKPHTAQFIHHWDARPSTPRKDVDGREIADSARVEIPVTASKLRDLAPPGYEHPVKVRISPIGDVTVLNRD

SEQ ID NO: 8621 - protein, 999 aa, unidentified
  REGION 1..999: note = Description of Unknown: Cas Enzyme sequence
MSDFRDFLAESGIVASDQLEITFIPAPDEPTPYQLRYEGLDRQLSAREWARVLSQLCKRRGYKSMKLAVDSSGKNDDEGRVKSAIAENAARMTERGYRTFGEMLWLDERFKESRRNRGDYKGVASRNQIIEEIRLLFEAQRSHGNPFAAASLEDRYLEILQQQQVILEGDAIRAKVGKCSIDRVNPRIPAACPTFERFRLVDKLHNVRYTLPGAGTRVPLDKDQRDLVIEKALGRTAKLTYADVRKICALPEQARFVGVRYGSDATDVSAEGKERIPLPRAWHDIRRALSDLPADTWENLSGDIDRLDDIAEVLTYYKYEESVIRELRSLGLSDEVACALSGLRFSGHGHLSRQTLRSILPFMEEGLPYSEACAAAGFHHSQRVHGERQEKLPPIPVEDVRNPVVLRALAQTRKVLNAIIREFGSIEELHIEFGRDVARSHEDRRKIEKAQKENRARNESVLEDIEKEFGITSPRPLDIVKYKLWKEQLHSCVYSGDYIDPARMLSGEPGIAEVDHILPHSRSFDDGFMNKVLATTTENRRKRERTPYEYLGGDPQRWHEFEERVLSMHLPRPKRERLLRADFDERASEEFRERNLNDTRYIARQFKSFVEENLIFVGDRKAPVVTVNGRATAYLRTAWRLQKVRADGDLHHALDAAVIAATNRSMIQQVSRFFSVRPLRNPHGEYIDAATGEIVPAKHVPEPWEGFAGELRERMGARWGTDPFGELQHIDREAPRPILVSRMPSRAVRGEIHKETVRRIEGLDEKGLIRTSKRVRIEDLTPRMLDNMVGRTRDRELHEALAERLAAFGGDGKKAFAEPFYKPSKPGRKAPRVRAVRVYDSPSSGGTEVRGGLADNSTMARTDVFERDGRFYLVPVYLKDTIKDELPMRAIVQGKPESEWREIDDSYRFVFSLHLNDPIRLVRKSGGSSVAIGGYYKGVNRSNACIDIEAHDASWKKQGQGVAMGVESFEKYSIDPLGRTAHLVRQEKRRGFSNGSGKQ

SEQ ID NO: 8622 - protein, 947 aa, unidentified
  REGION 1..947: note = Description of Unknown: Cas Enzyme sequence
MKYTLGLDLGIASVGWCVINWDPKRIEDLGVRLFDKAETPKDGSSLALPRREARSARRRLRRKRLRIQEIRNLLVDSEVISMNEIDSLFSKAHEKSPWQLRYEALDRALEGNELSRILIHLAKRRGFKSNRRTENENKNSDEGKLLAGVKLTGDLLESGEYRTIGEMVWKDPEFGEHIRNRRSSYRHAFLRKNIEDEIATIFSRQRELGSSICGKNFEKKYKDIWGRQRPFSDHATIEKMVGKCTFEPDEKRGPKASATFERFQMLEKINRMRIGRNWDKRELTTEERNECIKTALELNKVSYTQLRKRLNLDSEDTFNLVNYSRAKGVDDSEKVVFLELKYFHTLKKAVQKRLGREKWTEIEVDEELMNNIGYGVTFMKTDEELSEFLKGEDVSKEWIDVALDMPSKFSGVGHLSLKAMQKIIPHLKAGENYTEACRLAGYESKVADKKSMKLPAIPADEIRNPVVIRALSQARKVVNAVISRYGSPCAIHVEMAREMTLSYTDRLKLIGKQRKDREQREISVEKIREIYGYDSPKGGDVLKFRLYNEQSGRCAYSLKPIDPMRVLEDGYCEIDHVIPFSRSYDNSYFNKVLVLTAENRDKSNRIPAEWFGADEQRWHEFSEKIKSMHLPFPKLNRLLSKKLSPDHVRELKERNLNDTRYIARFMKEYIKENIEFHPEAPGKQHVFTMNGSVTAFLRARWGLTKDREEGPFHHILDAAVVAAADRACMMRVESYYKYRELRDHESQKTVTDMTTGEVIAIEEMETRFPEPWEGFRIELLGRLSADPKAEMLNQNLETYSLDYINTLKPVFPSVMPRRRHSGQAHKDTIRSAKLLKTKDKVTYVKRQLSSLTKSDVKTLEEMKKTPLYASDHLLYDAVLKELRKWTDSNIKPDWESFRKPKANGDPGPKVFGIKIASKEGISGIPIRKGIAGHAEMVRVDVFRKDKA

SEQ ID NO: 8623 - protein, 1246 aa, unidentified
  REGION 1..1246: note = Description of Unknown: Cas Enzyme sequence
MKKILGLDLGSASIGWAIITESNENGNSKYSILGMGSRIVPYEGTEGKDFAKGTGESRNAIRTQARTARKGYDRYQLRRKYLVETLIKSQIYPNEATRNLPKMKLWELRAKAAHSPVSLMELGRLMLWLNQKRGYKSSRSDVNIGKKDTDYVATVKSRHEKIRELNITIGEYFYKELLADEFFKVKENVFPREAYIEEFDLICKTQQTAHPTILTNELIAKIRNEIIYYQRPLKSQKGLVSVCEFEGFWRCGKDGKEYFVGPKVAPKSSPMFQLAKIWENINNIKIGSRTGENFTLTTEQKWAIFQHLDSNEKLTAGDLLKILDLKKENCYVNKQLEKGLHGNITKHAIRQCLNDSKKYDYLLKLDLKVLESENNGYLYDRKTGEILNSKPVKFIDAEVEQEPFCQLWHTIYSINDQEICTRVLQSKFDIEQSVAEKLAAIDFSKHAFGNKSTKVIRKILPYLIEGDGYSEAMSYAGYDHSYSMTKDENLQRKLLDFLKPIPKNSLRQPIVEKILNQMVNLVNAVIEKYGKPDEIRVELARELKQSKEERNDTEKAMSKRQRENDAIAKRLEEFGLRATRNNIIKCRLYEEIDNEDKKLNAFCVYCGQPISFTEALRGNDVDIEHIIPKSKLFDDSQSNKTLAHRHCNKNKNDMTAYDFMKGKPEAVFDEYVGRVNMLYANRVIGKAKRDKLLMTESKIPDNFIDRQLRESQYIAKKAREILQTICRDVWSSSGTVTAELRHLWGWDDVTMNLQMAKYRELGLTHYVEWESEHGKNKHKKEVIKDWTKRDDHRHHAVDALTIACTKQGYIQRFNTLSAAKTREDMKFDVDQRSLEFNEKRSLLEKYIIGEQPLRVDEVQKAVSNILISFKSGKKVAVWGTRKIGKRGNKKVVQEKIIVPRGALSEQFVYGRIKTLKENRPIKYLFENPQFILKPNIKAKVEERLFMFDGDVKKAIESLKKEPIYLDNEMKVVLEYATCLKDEYVIKYPVDINFNKTDKVVDPKVKEILQSRLKKFGGKEKDAFKDVQLEDKTIIKWYQDEGLERPIKSVRCFTGLSAVVPVKKDENGNNIGFVKPGNNHHIAIYTDTEGNKQQHVCTFWHAVERKKYGVPVIINDTSEVWDNLQSQPDGTFPESFLEMLPPPNLDILVSMQQNQMFLLNLPDEIQEDLEIIDKSTLSKYLYLVWSVSESDFWFRHHLETKNSELKSVNGARESNRYFRFKSISSFLASNPVKVRLNHLGDIVQIGQ

SEQ ID NO: 8624 - protein, 1128 aa, unidentified
  REGION 1..1128: note = Description of Unknown: Cas Enzyme sequence
MTKILGLDLGTSSIGWALIDDTQKKIIQMGSRVFPEGVENLGEGEGREMSKNASRTGSRGARRQFFRRRLRKKILLRTLAEHQLCPISVEKFKLLKQSPQLFEIELADWFKLNPYELRQKALTEKISLHELGRIFYHIIQRRGFLSNSRSASKDDGAIFKGDIKAGKIGISETLEKIQDHTLGSYLYEIMPKDNQSYTDGLERIRNRYTTRSMYINEFEQIWEAQSKFHPSLNSALKELIGGRKKDGYNTDGVLFHQRPLRSQKHLVGYCSFEPKKTKCPISAIPFEEFRVYQWVNTVEYNGKRLNEEERKVAAELLLRKEKTDFKAIRKALGKIDNQYKFNYKDDDKIVGTYTISNLCSKKYFGEEWFSLTDKEKEDIWHALYFFEDKDFTKNYAQTKWGFDEDSAVAISKFNLKDGYANLSRKAINNILPFLKEGYHYDIAVVFGGVKNALGQQWKQLTCEQLMFLNDNIPAIVRSKTKGGFIEPLKEVLKEEFNLTDKELEKLYHHSAAISVDELVAKLPVNPEADKEIQSIKNPVVITALFELRKLVNELIETYGKVDEIKVELARDLKSSKSKRNDVRRDQKRLEKENDRVKDRLEELGQRVTHDNILLYKLWEECKHTCPYTGKEISVTDLFTNKFQIEHIIPWSRSLDDSFMNKTLCEAKENIEKGNQTPFEYYSKQSEAKWTEVKERALKLFSDTKEYPNSYQKFKRFVQAKVDDDFISRQLNDTRYISKEAKNYLQKICKDVQIAPGQMTSNLRHKWGLNTILNPLDDEKTRDDHRHHAIDALVMACSKRSYLQELSKWNRYNRSYKEKDFPLPWDGFWSDAQKQIEQVLVSHKKLNKVVTLRTHKTKKNGIEYKNLGVAARGQLHKETIYGKRKAPNSEEAFHVRKPIDSLTTKKQLDKVVDAKIRQLIYQRIAQLGGFTKGDTIPNETFFTTDANGIKQPMLFLPNKNGAPVPIKKVRMSENIGNAEQLKDKLNQFVNQRNNHHILIYIDDKGQMQEEVVAFWTAVERKKQGQAVFQLPADGVEIVTTLQMNEMFLLGLNEDEINWENKALLKNHLYRVQKLSSKFYEFRLVSESSLKNTFNPYYSRITSFGDGKAGWQTFNPIKVTVSVAGDIKPV

SEQ ID NO: 8625 - protein, 915 aa, unidentified
  REGION 1..915: note = Description of Unknown: Cas Enzyme sequence
SFVSFIRQFFYEKELLHKGVYLYKASKMFDICDLKPKKKKNTIEENLCNMLRISPQQLPEEISFKSLGITRSVCEKASKAQKDYGNVLNAAIQSSKQGGKDFPDITKLVASCEKEAVKLSEKFGIDPNKFRSIYQYAQLFNLLEKDINGFNKSCPHCNRDNFIRSSEFKEGIAYATRLKSEYRKTSYGMENVYYDKYSTKVVEQSKQSIKNSDTVVINIETNAFTFEEGVKGKDIQKNLDKVRKREVVEFEEKKEAILKKSSYCPMTGELLSPSTTELEHVVSRKFSRANFSTILNDSINLIPISRDGNVRKGGKILNLDNVHQNFLNSMFGTTNVKNIKKQIGELMDFIQRTNPIIRSLTKEQRNLLTGALMTSEYQSQAIRLLNHRTKSVVNGYAKCFVNKIIERVTEINPGIKISVNFISSKDISLVRRQYPMLEKYNKEISLKKQSALSHIIDALLVFLLSSKIDNNIPLEIDSLEGTHRYFDEVISQYYSAGAKNIILRRKYKSEVARPHSQPLYKKSVGKVDFLKVYVEADGKVYVGIDEESKYQTEPSILQVLNSFYRTRKGKPIYPVIPKKGCNTYKIHKKTALEFIFEFKNNIEFRSDCHREVFNTLSKLMISTIKKDIISILEKGKNWVKLFERDVVKVGSSAKYKMRRTGTVKTIQKVLDDRNIDLEKVNLKDPQEVDIIRQMFKQCFPHSKKDYKHHKVKTSCSFEVMESFSHLSRSKSLSQGYTYSMRNVEGLKTEKVTYYPKGKGGRVTASLPCYNSPNCFSLKDLETELNFKEKVKGSTFTIGSVVKDLPVPDNSHGISTADIRIINSEAPQIILKDISFEKLKQICDPRFEELRTMKSVSELGDRIKAPKMRIIDDIPGLGVVRTFLLIEETKVENGEEFVTVSYTPESFPTFLNNFFS

SEQ ID NO: 8626 - protein, 1173 aa, unidentified
  REGION 1..1173: note = Description of Unknown: Cas Enzyme sequence
MRIKHDFGPLTFGFDIGMASVGWAVLNATQIVDLGVRCFDKAETAKEGESLNLARRMARLTRNRLRQRAWRLTKLVRVLKKAGLIEGKETLYAPRPDLDNPWVLRVNGLDRKLTVDEWARVIYHLCKHRGFFWQSRAEEKKAEGDAKGEGGKVKQGLARTRALLADKGYRSAGEMVLNEFPDAQRNKRGDYNKALSRVLLGDEFRLLFNRQRELGNAYATADLEKELIGTAEHRSGLFWLQKPALSGEKLLAMLGKCTFEKNEYRAPKASFTAERHVWLTRLTNVRLIDDGRTRSLNEIEWRTALTLPYESPEKFTYKHLRKVLVKLGASESFRFAGLAYPSARQRDEGKAKDPEIETLVKLPAWHELKAAFKKAELESEWQQISTAAIEGDPKTLDEIAWILSVYKEDDEVVRELSKLNLPNAEKMIDVLLDIRFDKFHSLSLKALRNILPHMERGLRYDEACIKANYHHSQLFKLGEGNQKYLPSLYKGRDKKKRMIFNEEIGDIPRNPVVLRALNQARKVLNALVHTYGSPTAVHIEMARELSKPFDERRDIKKDQDEYRALNQKDKSTFASEYNIVGSPRGGDFEKWKLYREQMGKCAYSLATIDINRLLEEGYVEIDHALPYSRSFDDSKNNKVLALTRENRNKGNKTPYEYLDGSSNSERWRQFVGFVESNKAYRIAKRSRLLRKDFGLEESKEFRERNLNDTRYICKFFKNQVEQFLKLHDKSEQKRCVVLSGQLTSFLRARWSLIKVRDESDRHHALDAVVIAACSHSMVKRMSDYSRRRELRQVSEGFVDVTTGEIPNPVMYDKLKEHFPDPWPHFRDEVQVRLKIDDTKLLREELARFGSYAPEVINQINGVFVSRAPQRRSGGAAHKETIYARARQAHALWVTEKGSKSSRPASGKELSNLVIERIGLEEKDQKGKFKITLNNLDLIVDPVRNEKQIYSLRQWLEGRDRREAEAKLIEANTGRGKEKRSLTAEEEAQIFELRGYPRKPLKSDPEHGPFTGPEMKTVKLNVGKTTGITVRGGVAANATMLRVDVFTKGGKFHLVPIYVHHRAKGLPNHAIVSGKDEDEWTLIDESFAWYFSLYPNDLLRVAQKGKAAISGYFSGCNRRNGSIDLWAQDRNKLIGNNGLIESIGVKTALTVEKFHVDVLGNIFPAQPEPRRGLA

SEQ ID NO: 8627 - protein, 1285 aa, unidentified
  REGION 1..1285: note = Description of Unknown: Cas Enzyme sequence
MKTDVLKDANPSSSSKDLFLNGLVFGFDVGTGSIGYAVREKDKFLDVGVLICPEDTNKLDKRRGSRSQRRRLRNRSRVRDWLADQLEGKLGLPSPWTKTADGQITFKSGLDYARISNPVLLRCEALQGRIEKPEELHAAITHLWKRRGKTEVPWKQGEAKQETPEQKEEKKIIAKKLNALAKEMAAGDDAKNPDGSPKAFEHPCQLLLHRQKLGIKQRDEVWPRDEFQKPFDFNLKTEFLAIIKIAAGLKNENGGQLFPKVSEANADWILYGDTQTVINKGQERHVYFKTTECENPGVLGLRWPRFDNRNPGLDLLKPLDELDRPLHVVRRNKPVFQETQFEQALFNFRVIDKVSGKRILPDMASLNRLRQIYDLAKRKSKSDDLKISESVIKNWAKEFADKYELIKDQSELVSRAGDGRAKFSSATLRDFKQVLEKLSTGQTIDAIQPLLRMPNESKEQAMARFLGDIRHGLVRHRLNLFLQMLHRLIKEHGKPDFIVVEAVRSLAFSEKKKDEHKKEQKKNRVDRDQVYQKLKDEENSTSKDAMLRYRLARDAGFECPFCRQSFDQADLFNGGVDISHLYPKSLTPCKEYYNLTIAHTKCNRTDMEAKIPREAFGADPLWPAIEANARKRFFGKKLELFLAKNREDAEKVIESKAPLAATAYISKMIRRLCLIDMEWQGEDGRDPTNKEGNIPSQQFLVTNGEITARYRDTWKLNEILHQPVPAFTDEEWNKLTAEEQQAHKEARKRRFEKNRGDHRHHALDAMVISCTWPAYAQRVHNATKDWQDKGWWYFDKLKNQLMSRHPLFESFEPMKSAGAEWMNRLITENRVQHHASKSNHGRAYKTSFFSQRPGIQMIPRSAASAELSDPAKPKRQKTIKLRLKSNSSERELELNEEEANDYNLLLSEKGEVIAKSLAFNRELPCQIAARIKTETLRLGAEKLHQYFYLLREKLVDISPKDLRLRKVHPPEFSDYLYTAWDRYLEDLYSYVEKSAADFLKTFDAHTNVKIAAKQFANRLEWSDFRAWLKDKSKAPVLAKDEATDRITLNPKAVPEFKKNQAGEWTVKLPEPEKLLKTMPEDFQRRLCFSHYQKWSQERPAGFNFPEHVITPIVRVRYRQPVNDNSVAAGPKTIPGWNGGHVYVKRAEIREVWLMPYADGTGVVPVFVPYSKQDKPFSKDKFVQDAKPLMVLRKRGIVHFANDYSPAYKKGDYVVTVLGESVAKFALPHVANTKEALIANGFPKSGLQAKWHLLIHALGFQFPKAVVVTEQAADEEDDEDQDQDEA

SEQ ID NO: 8628 - protein, 1057 aa, unidentified
  REGION 1..1057: note = Description of Unknown: Cas Enzyme sequence
VNCLKICVAKLRKYFEITILFPKKIVYLQNYCQNIVLQTKAYMKKILGLDLGTNSIGWALVNEAENDNEKSSIIKLGVRVNPLTVDEQQNFEKGKSITTNADRTLKRSMRRNLQRYKLRRENLIEILKENGFISEETILSENGNRTTFETYRLRAKSATEKVSLEEFAKILLMINKKRGYKSSRKAKSQDEGQLIDGMEVAKKLYNENLTPGQFCLQLLQEGKKHLPDFYRSDLQAEFDKIWEKQREFYSEILTDELKGNLQGKNEKATWAICAEPFQIVGVKRETKGEELKKENFAWRVQALSNKMDLENLAVVLQKVNGQINNSSGYLGAISDRSKELYFHKKTVGQYQIAVLAENPNASLRNMVFYRQDYLDEFNTIWETQKQFHSELTDKLKNEIRDVIIFYQRRLKSQKGLISFCEFESRKIEVEVDGKKKTKTVGSRVIPRSSPLFNEFRMWQVLNNLEISEKVRGGGKRALEQEEKESLAFELSIREKMSKDEVLKHLFKNAKELDLNFKSVEGNRTNASLFKAYSDMLERSGHDGIDFKKSTKKIIEQVTEIFSVLNWNTEILQFNSNTENLDEQPMYKLWHLLYSFEGDNSVTGNDNLVKKISDFFGFEKEYATILANVTFQDDYGSLSAKAIRKILPHLKEGNTYDVACEYAGYRHSASSLTKEEIENKVLKDKLEILPKNSLRNPVVEKILNQTINVVNTIIDVYGKPDEIRVELARELKKNAKEREELTQAISKTTAEHEKIKEILKGKDFGLSYVSRNDIIRYKLYEELKNKGYKTLYSDTYISPATLFSGDFDIEHIIPQSRLFDDSFSNKTLELQSINKEKGNRTAYDFVREKYGENGLENYLNRIETLFKEKKAKLRKLKMQEEDIPEDFINRDLGNTQYIAKYAKTMLGDLVKRVVSTTGSITDTLREDWQLVDVMKELNWNKYDRLGLTYYEENRAGKQLKRIKDWSKRNDHRHHAMDALTVAFTKDVFIQLFNNMNASLKPNSNEFALKNLYVENGKIKPPMPLDEFRAEAKKHLENTLISIKAKNKVVTQNINITKK

SEQ ID NO: 8629 - protein, 1382 aa, unidentified
  REGION 1..1382: note = Description of Unknown: Cas Enzyme sequence
MKKILGLDLGTTSIGWALVSEAEKENEVSEIIKLGVRVNPLSTDELTDFEKGNPLSINADRTLKRGARRNLQRFKLRRKNLIETLIKNNIINSDTILTETGDNSTFSTLSLRAKAAKEKIEKEEFARILLSINKKRGYKSSRKAKNEEEGTLIDGMSVAKELYENNFTPGEYVYQLLLNGKKYIPDFYQSDLKNEFLKVWEFQKQFYSKKLTEELFKSLEGKNKNQTWAICKEPFDLKGITQKGKAIEKKLEKYKWRSEALKNKIDLEILAIVLQEINNDLNKSSGYLGAIGDRSKKLYFNKITVGQYLYGQIEKNNHTRLKNQVFYRQDYLDEFEKIWETQAKFHPELTSDLKEEIRDVIIFYQRRLKSQKGLISICEFEQKRIEVTIDKKIKKKTIGPRVVPKSSPVFQEYKIWQNLNNLEFTPKNGTETNLFNQEFPEEILTLEQKQLIFEELNVRGKLKSTDVLKLLKLKPKEWKSNFESIEGNNTNEAFYNILQVISEEEGHGFDWNKKTAPEIKEELKATLPEIGIDPNILEFDVNNDNLQQQLSYQLWHLLYSAEDDAKVNKEDEAIYGKTAVNLKKKLHLKFGVPVKYTALFANISLQANYGNLSAKAIRKIIPHLQNGNDYSQACALAGYNHSNSITKEENLKRELKEKLELLPKNSLRNPVVEKILNQLVNVVNQIIDSYGKPDEIRIELARELKKSAKQRKEMTKGILDATKRNEGIKKMLQKAPFLIKNPTKNDVIKYRLYEELKSNGYKTLYTNQYIEPQKLFSKEIDIEHIIPKAKLFDDSFSNKTLAFRDVNRIKSDMTSYDFIEDKYNGELENYVLRVKSLYDSGIISKGKYAKLLMKEANLPDGFIERDLKNTQYIAKKAKNMLHEVVRHVVPTTGSITDKLREDWDLINVMKELNLPKYRELGLTVLEERKNGNKVEKIVDWTKRNDHRHHAMDALAVAFTTHNHIQYINNLKAKNNETSPIYSIQQLITSKNDKGKRIFSQPMPNFRAESKKHIESILISFKTKNKVVTKNINTTKTKKGTLKKIQLTPRGQLHKETIYGRSKKEIVKQEKVGSKFTIDKINTVTQPEYRALLLKRITEFNNDPKKAFGGKNSLSKNVIILANGKEMPLIVTTKSYEDIYTIRKEITPDLKIEKILDAKIRELLYKRIDLFNGDKKAAFSNLEANPIWLNEERGIAIKRVTINGVSNVEALHDKKDHLGKPVLDVKGNAQPVDFVSTGNNHHVAIYKDEKGKLQEQVVSLFDAIARVNQDLPIVNKNYNQDKGWEFLFTLKQNELFVFPSDDFNPEEIDLLDTNNYTKISHHLFRVQKLTSKDYFFRHHLETTLQDKKELKGITFIRTGLNNIENIIKVRTNHLGNIVQVGEY

SEQ ID NO: 8630 - protein, 1393 aa, unidentified
  REGION 1..1393: note = Description of Unknown: Cas Enzyme sequence
MKKWYLGLDIGSNSAGFSATDDKYTILTKNGKLQCGARLFEDAEDASGRRGFRSSRRRFARRKVRIDLLQALFNTEISKKDQAFFIRLNESSLHLDDKTAKTKYTLFNDAAFTDKEYYKKFPTIYHLRKHLLENDEPDIRLLYLACHHLIKYRGHFLSSNFNVSRSDSGYGDIINNINSVLGDDDIAFDVSNINNIPLIIKDKSKSSAKQWFDIKEKINPNNNRLLNAVFTAMQGNKIQLSKIWNDLDDAEKEIKDELKEFKFSSEKYDECLTYAETILNDDQLGFLALCKSFYESVQLDRVMSGVSYVSEAMVQRYDEHKVDLKLLKDFIRKYMPTEYNKMFKQNTDFKDKGFAHASYVNYIGSNITHNKDVKKRSHFIMCIDKGSEPMTASHEDFLKYANALLEKASDTSKGTDEYKALKEKVENKTLCKIHNTQDNSYIPYQLHEAELAAILEKQAKNFDFLQSKDDFGSIADKIVSLLTFRIPYYVGPLSNKDDKFAWIERKDNHTKITPWNYKEMVNEAASGERFITGMTAKCTHLKAEDVIPKQSLLYQKYMLLSDLNNLKINGNRISQDLKMLLLNGICQTETSLSKKKIKDYLVAQGKIEKSDTVGKESENDLGFNSSFSSSIRFKSILGSKIDEEMCENIIKWHTIFGDEKKPVKERIKAQYGEKLNDEQIEKLGKPSFKGWARFSAKFLNGIVATDKSTGETALTIIKLLEDTTLNLQEILNSDNYSPKFTDAIANENKGRDDVKVDYDLVAGLYCSPIVKRSIWQAILICKELTKINGCPPEKVFIEVTRGEDKKQKGKMKSSRRKQIEELLNKAAKDGNDLTALIQEFNGKTDEREFRSDRLFFYFTQLGKCMYSGRKIDLSDLNNHVLYDIDHIYPQSKIKDDSLTNRVLVGRTDNAHKKDAYPIEQSIQTNMKSFWEMLKSKGLISTEKYNRLVCAQELTPDVIGGFINRQLVSTNQAVKETANALKILFGDGTKIVYSKAGNVSDFRHNYDLVKCREVNNLHHAHDAYLNIVVGNVWDSVYGQYWKTNFTFNENNALDKLFKYDRGDIWQTAYIDKIKAYLFDNKKYLDKFPVTTRPFEKKGAFYDQTIHPKEKGQFELHKGFDTAKYGGYKNGNTAYNCLIEYNNKKKGRTRGIFSVPVRFVHLRGDELLEKITADNKITDKNPKLIMPKIQIKSVLEIDGVRYHMRTGAGSGGLQCSVAVEWYPDKDIIQIVKDIFKFKKLTIDKSFSKETLDKWKETTDDIVFATRERNPKTKEGKKISRENNLKLYDAIIEQVKKPFYANYGFAKKVKEGKICRQKFEALATYAQMEQLVSLLNVITMNGTLSDASNIGGSKNETCKYIISGWNDVSSINMFLITQSVTGLFENRVEINRTPVS

SEQ ID NO: 8631 - protein, 1446 aa, unidentified
  REGION 1..1446: note = Description of Unknown: Cas Enzyme sequence
MKTILGLDLGTNSIGWALVEQDFEAKSGKILGMGSRIIPMSQDILDNFGGGKPSKTPTAGRTGFRGIRRLIERNLLRRERLLRVLNILGFLPKHYAHQIDFEKRLGQFLDEKEPKIAWKEVWNEQKNKNEFAFIFQNSFNEMVSDFKANNLDIKIPYDWTIYYLRKKALSQKIEKEELAWLLLNFNQKRGYYQLRGEEEEENLNRLVEFHSLKITDVVADEKPNSKGDIWYSLYLENGWIYRRSSKTPLFEWKDKVRDFIVTTELNDDGTVKTDKEGEEKRSFRAPSEDDWTLLKKKTEADIDKSKKTVGTYIYDALLQNPTQKIRGKLVRTIERKFYKEELIAILKKQIELQPELFTEDLYNDCVRELYRSNDAHQTSLSKRNCFIHLFANDIIFYQRPLKSQKLSIGSCTLEYRIHKINKKDEKGKPIKNVFEKDTTGKEIEVKEYLKCIPKSNPYYQEFRLWQWLFNLKIYKTDDDSDVTEQFITSIAVKEKLFDFLNKRKEIDQKALLKQFKLTDKTHRWNYVEDKKYPCNETKTMISTRFEKVESVPAGFLTPEIEQKLWHIIYSVTDKNEFEKALKTFANKHNIHEVSFVENFKKFPPFKSEYGSFSEKAIKKLLPLLRIGKYWNWEIIDTKTKDRISKILTGEYDAEIKNRVREKAIHLTSESDFQGLQLWLAQYVTYDRHSEASNTEKWKTVADLEEYLAEFKQHSLRNPIVEQVITETLRVVRDIWKKYGDFSEIHVELGREMKNTAEERKRLTNIVTENENTNLRIKSLIMELKESADVENVRPYSPIQQEALKIYEEYAVNNMGENDDEKEFIQKISKTAQPSKSELQRYKLWLEQKYKSPYTGQMIPLGKLFTEEYQIEHIIPRARYFDDSLSNKVICEAVVNQRKDKQLGFEFIKNHHDEIVDLGFGKSVKILDEVAYQDFVKRHYAKNYKKRNNLLLEDIPENMIERQLNDTRYISKFVSQLLSNIVRADKDDDGINSKNVLPGNGKITSTLKQDWGLNDVWSDLILPRFERMNTLTNSEVFTAWNEQYQKFLPTVPLELSKGFQKKRIDHRHHAMDALIIACATRDHINLLNNQSAKSETSRYDLQNKLRNKEKNETIGKGVFKEFKKPWDSFTVDARTELEKIIVSFKQNLRIINKATNKYEKIKNDKKIKVEQEGINWAVRKPLHEETISGLVNLSWVKTGKNEKTTATRKVLDKSFNLEKIKKITDTGIQKILKKYLESKENSPELAFSSEGLDGLNKNIAKYNEGKPHQPIFKVRVYEKGSGRFVLGNTGNKKSKYVQGSPNLFFAIYVDENSNRSYETIPLNIVIERLKQGLNEVSEKNEKGHNLLFHLSPNDLVYVPTEDEREDVSMINFDNIDADRKKRFFNVNDFTGVTVYFTPNSFAKAVASKELDTSFDSKLSKFEGKSIKEHCIKLNIDRLGNIKLLKLP

SEQ ID NO: 8632 - protein, 907 aa, unidentified
  REGION 1..907: note = Description of Unknown: Cas Enzyme sequence
LNYGLNTYNKMFRYFNVRNNYPSYIGSNISYSVNNGKKNVSHCEIVLNKTKSKVEEFARCTQESFLEHLKEVLETKKDELENNENEKIREEYKYFIDKINNGELLARLNTSTQSLVPYQLNEIELRAILNKQSKFNLDADKIIKLLTFRIPYYVGPLNNSNDEFAWVVKNSGFEKCRITPWNYKDAVNESASGERFIKKMTNKCTYLKACDVLPKQSLLYQQYMVLQDLNNLRINGNKIPQKLKQSLFDDFMQKTNATSKKEIKAWLVAQSAMKQDDKLGKEDENDQNFNSSLSSLNKFKNILGEEAIEKYQLFDLCEKVVYWHTLFPNEKKMVEEKIKQNYKERLYEIYKEKAEEIINSLAGKLSFSGWARLSKEFLTEIKVIKKTGGDFANEPVCIMDVLKSEVTNLQEILNSNNYTPSFFEECTKQNRSRGEEKINYEYLEDLYCSPSVKRAIWQTNLIIDEIIKIMGGLPAKVFIEVTRGEDKTKQGKMTDSRKKHLMDLYSKAKSDIIDLAKMRNELNRMSKEDDRKLRGDRLYFYYLQGGKCAYTGKQIDLAKLQTNLYDIDHIYPQSKIKDDSLTNRVLVLKEYNEGTKKDIYPLPPEIQTKMKATWESWNKNGLCSDEKLARLQRKDPLTDDEMTAFINRQLVSTAQGAKEVADLLKIKFSNGEKVEIGYSKARNVSEFRQKFGISKCREINNLHHAKDAYLNIVVGNVWDEEYGDLRTGKAVQKSGGIFNEDRAVNKLFERDVKKAWKTGSNGSIVTVKKFAFENKYIVTARPYEEGGQMFKETRHKKENKPDSNLIKLKETKKENGTDLFDVSKYGGYTARFGAYFVLCESDGKKGKRKLTVEQMPIMYAVREKYKNNLENKKALMEELYGLKNVKIIVPKILFGSLFEIGGIRCRI

SEQ ID NO: 8633 - protein, 1112 aa, unidentified
  REGION 1..1112: note = Description of Unknown: Cas Enzyme sequence
MDGKGPGNLTFGFDVGIASVGWCVLGEDRIIDLGVRCFDAAETPESGESLNLARRSARLARRRLRRRAWRLTKLARLLRKNGLIADVAIIRSAAAISPWRLRVEGLDRKLDSVEWARVIYHLCKHRGFHWISRAEEKKAESDKKEGGKVKQGLADTQRRMAEKGYRSAAEMILGEFPKAQRNKAGDYSKALARTLLADELALLFRRQRELGNPYASSELERALLGSGDRKTGLFWEQKPPLSGEALLRMLGRCTFERDEFRAPKASFTAERHVWLTRLNNLRIVVEGRTRPLTLEERRVALPLPYKQAGDFTYKQLRDHLTKSGLLTNFSFAGLPEEKEKDALVKLPAWQTLRKALKQAGLETEWESIAGRALGGDPRLLDEIAYVLSVFKDEAEVEAELRKLDLPGGEKMIAALSEISFDKFHALSLKALRKIVPYMEAGLRYDEACEKAGYDHSRPRGETPKTKYLPSFYSGRDKEGRLILNDEIANLPRNPVVLRALNQARKVLNALVHEYGSPAAVHIEMARDLSRPFDERNKIRKAQEEYREKNERDKADFAKEHGIAPTGRQFEKFQLYREQLGKCAYSLEPLDLHRVLFDDGYAEVDHALPYSRSFDDSKNNKVLALTSENRNKGNRTPYEYLTSFAGGEQSERWRQFVAFVESNKNYRLAKRQRLLRKDFTGDAAAEFRERHLNDTRYICRFFKNYVESHLQLASGESKRCVVVSGQLTAFLRARWGLLKLRSDSDRHHALDAAVVAACSHAMVKRLADYSRQQELEQVKAGYIDPETGEVLDMEALRRLERQFPKPWPHFREELEARLFIDVPEEMRQRLAAFGTYSQQALAAVRPVFISRAPQRRNGGAAHKDTIYGVPKHLQTEKPGSVTQRVPLASLKLSDLDKLIDPHRNAKLYAAIRARLEAHGGKGDKAFPPDDPLRKPDRNGNPTGPIVRSVTMLIDKLSGIPVRGGIAKNDKMLRVDVFRHKKNGKFHLVPIYVHHAAIYRRTGELPNRAIVAFKDEDEWTLMDEQNFDFLFSLHPNDFIRITQKNRAPILGYYASCHRGTGNLNLWIHDRNQKIGKAGLIEGIGVKTAVALEKFHVDVLGNIYPAPKEVRRGLA

SEQ ID NO: 8634 - protein, 1180 aa, unidentified
  REGION 1..1180: note = Description of Unknown: Cas Enzyme sequence
MNASPNSRNLHLAFDVGHSSIGWAVLRQAPHDRPASPEILGTGVVIFGADDCLAVKRRAYRQARRHARATRQRIARIEQLLAHLGVLTPEQLGDAHRQAGGDSFAWRKAAEILKAARAGHPLPALTWPELWDILRWYAHNRGYFAPPWADQGEEAVPDDDEVPDTEKVANANELMRERRTTTMAETIAAYTVWYDREVARWQQRQRPDKPRHFKGLSAAFPRDTVVWPEVRTLLTVLKGKLPMLDDALIRTLLGNDVDPLKDPAAWRTIPCPAVRLPKRYHGGLLFGQCIPRFDNRIIGVCPIQFARLERKYREEGMASEAARRRAEKESKLPSKASPEFLRFRWAMQLANVFGAAPGERKTHPLPAAARQHLTELAARQGAFTKGEFKKAVREAAGWPEKGGHDNLDALLLHPDAEEALVFDPVQAALRKHPLAEAFLTLPPQFLKRLRGKLARGKSVAPGTVRDWLSGAQAPPPSASDPLAAFDAAIQRVLDAANTRKGRKQSALTREQLLEEPLRATYPKGRAPYARPVLRQAYEEVMKGWDPRAEANDHQPRGCLCQTDELKEAQLQRRLEEQTNNHLIRHRLLILQRLQRDIIAAPEFANGDKSRIASLTIEVNRELRDLSGKTRKEQEQDLGLRLGDFKRVAAKVEEACRRRGIPCTAGLIRKARVAEDLGWKCPYTGKEFSVDTLLDGVMDKDHIIPHADRQSDSLDSLVITWNEVNKWKGKRTALEFIREEGGKPVPGRPELTVMTLAEFQKHVASLDTRKGHDDDRARKKRRIRRLLTEYYEEKEFTPRDLTVTSHLVRLGAQVLQRAFPPEQRPPVISLPGSVTGEVRKAWKVIGCLGAANPAIFEADGKTPKRKDEIRGITHLHHALDACVLGLASLYFPRHGAVWSAAVKAGQHAATEYDNNEHPLWQAMTKRRPTAQEVVLLKATGLYDGPDSNGRMQLRDLPAELKAQIRRRLAEKRVVQHIPADMSGVKVEENTRGVVAVKDGRVILRQRSARDAKTGLQAVKTTDEAPGKLLGLNPPGGDGKLKRQKGVRVITDNFGVAILDHAPEGEEKFVVIPWHRVWHRLNELKARNAGEAPRVLRNGQVVSITSGTYAGRWRVFSIKAKQAGIKVNLGTLDCLGVEEDYLDPATGKKRTRTVAGCKLDAALPTMVQGGLKILTPGFCGTP

SEQ ID NO: 8635 - protein, 1337 aa, unidentified
  REGION 1..1337: note = Description of Unknown: Cas Enzyme sequence
KYKNPYELRVIALDKKVSPHEFGRALYHLVQRRGYKNIGESDLEELDREQASKDSETKKQLERREKEGFAKALQTHNGLIAKALKYDFLDKGVRARNQYPLRKEYRYELEALCKAQGYNVTRSVVGKYANTFVHSLWKAIIWQRPLRSQKGNIGRCTLEPSRPRCPSSHPLFEIFRAWQFINTVKYQSENDAMIFLPMELREKLFEDFFLKKDKNVKFAEIRKFLDKKIGTSKRYNYKDDHSASTMPICKGLIDIFGDNVKEQILRLDNYIIGGSYDKDDLSRKAPKIINNQYSVFDLWHALYSFDEVYLKTFAKEKLGINDETTKKGKTFNPFVELKKLIGSSFSDLSVKAITKIIPFLKEGYLYNEAVLLAKMPELLGKEWEMKKNVVTTCIREANKSYNWHKLTTTIANTLIDLWKGLPDGPEKFAYKNYSYILQNSDIEDILNACIHHFGEKTWTIKAEEERVKIFNQIKTLYQEFFWDQKREYRKIPTLDTLLKEQLTRAGIILKGELYHHSRQENRYLKGLGVKEDGSPKLPIDKASGKEILPLPIIDSIKNPMFNKALSVLRKLLNYLITNNEIDSETEIIIELARELNDNNLRLAIEKYQRERENKRELYKKFLEEFKEKENLDFNIEESIPQFEMWSEQVFDSTREGEDRLARQAILKEKNDIKRYELWVEQKGVCMYTGKMISLTQLFSNEIDIEHTIPRSLLPDNTLANQTICYSWFNRDRKKNQFPTKLENYDKNVEGWGTAIKPRLENWQEIRKHFEELYEKNKKPRPGEDENGKNKRIQDKHYYKMHLDYWTDKIERFSCEEIKESWVRRQLTDTQMISKYAREFLNTYFKQVKVQKGSVTADFRKIFGFQEEDEIKNRNKHTHHAIDAAVLTLIPTNSSYRERLLKTMYDWQEQKKGQFISKPYEGFDSQKLINQIETNVLVVNYTKDNLLKETRKRVRNRGRLVYLRDKNGNYLKDAEGNNIVKWAKGDSIRGGLFKETFVAKLRDVVKDKDGKPIRNEDKTWRFKEGDEEFFYAVRVPVEEAKKYITDIIDPVIRELVEKQKNKPIVLDYNNKPIRHVRIKANKGKIVKPRLNFRSTNDYKNSYYAASDSLPYAALLQKVVTEKIERKLIPISTAEIAQHIKKNGKFELNKFIEDNYKEYSGYQDKKLLKVGQKAIILENDDEFAKKDIKDFQTKRLYVINQFDYLGRKIIFNYHLESRQRGEIDKSTKESKNAILRQVEKDFGIPEIVPDDTISILSERKKDFEKRLYDFKSRLIEIDKYDKSKALQLKKQIEEYQTESSKCNDLNPVPILGRSVSGLNFLLEGEDFEVTFSGELKWKT

SEQ ID NO: 8636 - protein, 1066 aa, unidentified
  REGION 1..1066: note = Description of Unknown: Cas Enzyme sequence
MNTSTKTPDLHLSFDVGHSSIGWAVLQAVENSRPNLLGCGVVIFRADDCLASTRRTYRRQRRHIRSTRQRIKRLKTLLKHLGVLDEQQLDRPGCAWPWKLAARVLCGGNALSWPELWDVLRWYAHNRGYDGNRRWSAAEAAAQAEDTEKEKNAWRLMRDHGTKSMAETFCKVLGVEPLNDAKRSSAERFKGLNAAFPRAVVEGEVRQILRSHFAKLKAVDASFERALLGTDGNDKTAWQAIPCPELKLPRRYQGGLLFGQLVPRFDNRIISKCPISGQKVPSRNCPEFLRFRWAMTLANVRIARSGERDLTPLTADERRELDKQMRETGAMTEGEFKKAVRDKTSAIRDNLDTMLMHPDAKEALLLDPVQKLVRSDDLSPFWVLLPERVQKRLRGQWRRGKRFSLAAIREQLAAAGGDVGRFDAALQQQLDGSGTRARKKARQLTREEWLNRQFPTKPLRLDGRAPYARPLLVKAFDEVMAGKHPMEEGGCLFLTEKIREEQLNREITEQTNNHLVQHRLLILERLLRDIIKEYGTGDKSRVGRITIEVNRDLREMSGKTAKEKAKDLGLRIAHHHHVAAKLEESLGGKTRITAGLIRKARVADDLGWTCPYTGQKYEAVDLAEGKVDKDHIVPRSERTSDAMESLVITYSEINKWKGKRTAWQFVEQEQGKPVPGRPNLSILSLSRYKQFVENLESSKGHDDDKRRKERRKRLMLLPTYEEKEFTPRDLTQTSQLVRMGAQVLRRAFRECPRQPVVVSLPGSVTSEVRKAWKVLGCLSLANSQVLDENGEVRKKDEIRGITHLHHALDACVLAFASHFIPNNGRVWELIINRNLNEAERAQLAALDVFGFDSEGRFNLRDLGADLKEQIRQRLAEKRVVQHIPARMDGLRVEQNAWRVLKIENGEATIRQRVRQPDGKLPPPKETTEKVTKLLGLQAGKLQANKGVLVIPDNFGVALDPEPTIIPFHKVWDRLQQLKTANGGKMPRIIRPGALVDVPKGTHKGAWRIFSIKNNANGVAFALGKRDAVTCEKSKQNVLIRQLLKDGMMVRKTPLSGVPSCPTTSSA

SEQ ID NO: 8637 - protein, 1500 aa, unidentified
  REGION 1..1500: note = Description of Unknown: Cas Enzyme sequence
WQVYKALRSAMQKRGYGPVPWAAKESKPKLTKEEQAKEQEIAARWDKFKKGYRYDENPDADPNRAPLPPQFHFPCYYDAFHTGLWSPDQPDQLRPRPDHRAASTRNVRFDRADVRKELIALGNNAAAMLPQLQQAFERWQRDGWTFRHPVTGEELTKPVRARTFGEFLCDGPAGQPDETSFEAFLNQRRQAGIRIGTFEEWMAALGQKTPRFDNRIVENCALIPRLHVCKVAPRWRLNQNGDKELDPRSLLAAEVTFLLQLKNLQVDDATAGTVRYLNTDELNEWWKHACEKAANVPLSDTWERDVLDCFKITRAEWRRWCVSKNLLPVARERSEAAASAGEIATQSAEAASGDSGAEERSRGKSQDVVQAPKPTGRSRFCRPALAILRHLLLHREKPQDFAARLRNREPALLDALDFDVLDTAPAEERPTGNGKALKRYRKQQRTWLLTGDLDFLDHVWKATDRDGNPRDFEPHQLRIPDMTLRDLRKRHDLTETPYSDLLRQNSAELERRDKAIVELIGQQKNPVVRDRLTRFWQRLKHFQNPVVPSDPKKQKPGLGLADPACLVLEFVRDDKDNSLEGRKRTEAIQQALRENEQRRDKARKALEQCGLPTTDDMVVRWLLLEAQGPACIYTNKPIRCTDLPNLQIEHIVPRSFGGPDAFWNWVLSDENANAEKGDRVPYVWFKEEKTDEEWADYKRRVLARAAQLGRRKVDLLLRPDAAELVGEKYTALAESAWIARLAQTIARLHFGWPLDDEPGEERVITISGGLTARIRRKYLLDSLLGVGNDAETLRREIDSALEELEALRTDTSLSEDARKQKRAELRQRLANLAAEAEKNRDDQRHHALDAMLLTFLPNWARDRNKEDFFRFPTAIGDTQLYSEHDQPRIAAIKSELARLYEENKPVFREIKQARLASDFARVQQLKASVFPARKRIAELYRALDKLKQPRNVRAVREWFRAQLEGASPAANGPVLPRTIAWQRTPIEATLYRRVYLIYKDCPVRSPLALTDLAFAPNPRNSQQPVFDLKWLRTRIQSIAEHPGYDRKKLQSVLSAKLEATLSAKRFASCQFGPEDWQQICAQPEVAACFQPVGRGKSKRPPEPDQRLVKVCKVKVLPATRYELSELGYTSGNNYVWNPDHLAETARNILRKDDAQARTRGRRRTPAPASSPSADASPWPGFLWDREMQAKLASPEFREAVEQQLVPHLLPPKPARMSDAERTDWATREERWKQAFEQFRKSHNLPKSFFVFTSDSDRPPRRPNVSLLRVLFEPKDKVFSRDALAKQAQSVVDAQLRRCLECFADSLTQVRDPRLQEKAWRDYCNVVRVVPKETLEQFTREHPTPTADQWISFFEAQTGPRIFQVMQTVGTSLEEYFDLSKDACGAFARGGNKGYWLCKRGDAIEARPIRFFENPEQVRVRLLGQGWELLDPKPWRTGDLLNLPEAAQSGARSVPAGYYFLGSFSNDTGVNLKPCFGGEVPQNVSLKALWNRGLRRCSPTA

SEQ ID NO: 8638 - protein, 1537 aa, unidentified
  REGION 1..1537: note = Description of Unknown: Cas Enzyme sequence
MAKILGLDLGTNSIGWAVVDDEKNKIYGIGSRIFPEGVVAKTIGKGDKEESKNASRRNSRQQRRQFYRKRLRKIKLLRILIELKMCPLTNEELNIWAKWDKTKGKAGRKAPNSKRYMEWHRQNPYFLREKALHQDLTLFEMGRVLYHLIQRRGFLSNRKGNDDGKIYKGKEGIVGIDNTQKQIENKTLGSFLKSIYPKEGEPFNLITDENGNELRVRARYTLRDMYVDEFNQIWERQAKQLGLTEKKVDKKKTLFLKGTLSNNRNKHKIEKLQNKYGKENVKIDKIKNNKIKGAFYKVTTTTKVSLKIFLGGEIKKDEKGNIKYNSNESVLFWQRPLRSQKGLLAKCRFESDIKDKNGKYLRRGKTPCHLSHPVYEEFRAYQYINNIEYGTKLKLEENQRLQVLDLINSKDSNFNFSEIPKKLKMEYEKWNYADDQKVPGNYTTKHLSSLFKKETWENKKEEIWHCFHFYENNDYLFKKLKKDYDLVEKEDDKVKKIIKNIKLKEGYSNVSLKAIKNILPFLKKGYQFSDAVILGGVKNAFGERWENFKEFHSQIETDILKISNDKTNKEGDAIKKIKNYLADTKNELGFSKNDPNFIKLYHHSQEIEKKQIKEFIDPIENLRNPIVQQGVNETRRLVNNLIKKYGKFDRIQVELGRELKNSKTGRQLQSKRISENTAKNDEARRLLTEYGLKHSRDNIQKVLLYKEMQDKGSGTICPYTNKFINISDVLGQENKIQIEHIIPRSISLDDSLANKTLCDSKFNGLKGNLTPYQFYLKNNDAKLWGGADSWEEIEQRAYKVLPYQKAKRFTSKSKVEDTDDVKSGFIERQLNDTRYISKKTKEIMSQICDDVRVLPGSLTSELRHLWGLNNILQPVMLVDLPNYKIEGGKTIPHYVVLDKANKPVSAIPIYNEKPKLKANETTIIGKVNKGVFKTNEKFVKLNIDTPELANGEYWIKLKLSEPKKIIRIFKDKPITTENEIVLRGKIERRKFKNDGISAIKTTINDDGRYWAKFPITNKKFIKPEKNKQPKKTGKQVLLYGKVKDGLFKSYIFECETKETDGKYWVLLDIDTEKAEFQKAVNDRPDVSETQIIIEGSINDEGIFVSEIDAEHQFKTNERRGKYWIVFDFENELNEFKAIRNPKPKLTDSQTLVEGNIEVDKDTGEIKFDPKKNRYDHRHHAIDALVIALSKQSYFQQLSVRNANLDEKKRYNKFDKEQLNFPKPWEGFHKDAKNEIEKLLVSHKQNNKVLTEVIKKINKNGKIYTSKGMAVRGELHKENVYGRRQSPYETTKSYHIRKKVADLKENQLHKIVDLEIKKIIINARKEEAKIKKQIEAFDKQKKKAKTDEEENLINSQIKDLKKNIFDLYTLKNKNGERVPIKKVRIREKMSNARQLKEINQFVNPRNNHHVLIYKDEQGELKESVVSFWEAVEREKQNQNIFQLPSEAGEIITTLQVNDMFLLGLDENKINWDNPDYKLLSKHLYRVQKISKMNYMFRHHLASTLNRKEQEVNVRSLRSLNELKPVKVKISPTGEISKI

SEQ ID NO: 8639 - protein, 1385 aa, unidentified
  REGION 1..1385: note = Description of Unknown: Cas Enzyme sequence
MKKILGLDLGTTSIGWAYVLEAEKENEKSEIKKLGVRVIPLSTDEETDFQKGKATSINADRTLKRGARRNLDRYQLRRDNLIEILKENDFITDDTILSEEGEKTTFTTYEKRAKAVNEKISKEDFAKVLLMINKKRGYKSSRKAKSDDEGTAIDGMSVAKTMYDNNLTPGQYVYNLLRDGKKTTPEFYRSDLLAELNKVWDFQKQFYSDILTNEFYNQINEKGKKATSKIFLGKYGIYTAENKGKRDEVKLQAYKWRSDAISNKITKEELAYIVVEINNQINQSSGYLGAISDRSKKLYFNKLTIGEYLYNQLKNDVHARLKNQVFYRQDYLDEFETIWEKQKEFYPELTDELKQEIRDIIIFYQRRLKSQKHLISECEFEKHHKAIPKSSPLFQEFKVWQMINNLEIRHIPTRTIYKNDQIELETKALLFNELNIREKLSANEILNILVEKPKEYELNYKDGLEGNRTNAEFYRVYNEILKLEGEDYNFKKLKAEKINDLVVSKFSEIGIVQEILSFNSEIIEDKYDKQPILQLWHLLYSFEGDNSRTGDESLIKAISDKFGFKEEYAKLISKVKLQSGYGSLSSKAIRKIYPFLKDGNKYDVACTYAGYNHSSSLTKEEKEKRELKDVLDLLQKNSLRNPVVEKILNQLVNVVNAIIKDSNLGKPDEIRVELARELKKSAKERESMTKNINAATIRHEKIRKLLQTEFGITKVTRNDIIRYKLWEELESNGYKTIYTNTYIPREKIFSKEFDIEHIVPKALIFDDSFSNKTLTVRQVNIDKSNDTAFDFLKNYLDEEKFNQYLARVEKLYKDNKINKAKYSKLLMKASEIPEGFIERDLRNSQYIAKKATQMLSEVVRNVNTTTGSITDRLRSDWQLVNTMKELNLPKYEKLGLVKTIEGKNGQPEKQIIDWTKRNDHRHHAMDALTVAFTKPAYIQYLNNLHTRVYKTSYIYGIEQKNLHRDKNGKLLFNPPMPIKEFRLEAKKHLESILISFKAKNKVVTRNKNKIKIKGGFKEKIQLTPRGQMHKETVYGKIDRYETKTVKIGTSFDLKMIKKVANQKYREALLVRLAEFEGNPKKAFTGKNALSKNPIYIDDAKTIELPEKIKLVYLKERYTKREKISPDLFKDSRKKDDFINRIENVYDEEIKKVLKDRYIKTKIEVEKFNNSVKKDSDKKKVLETAFSNLDENPIWLNKEKGISVKRVTITGVNNVEALHSKKDHNGNYILDEKGNKQAVDFVSTGNNHHVAIYRDKKGNLQEEVVSFYEAVHRVNAGLPIINKNKEGLEFLFTMKQNEYFVFPSDDFNPNEIDLLNPDNASLISPHLFRVQKIATKDYFFRHHLETSVENMKETKNKAWKREGITGIKGIIKIRINHLGQIVKVGE

SEQ ID NO: 8640 - protein, 1377 aa, unidentified
  REGION 1..1377: note = Description of Unknown: Cas Enzyme sequence
MKTLGIDLGTNSIGLALREENNFEWFGVYTFKKGVGEGKTGEFSFAADRTKHRSTRRLYNARRYRKWEALKVLIEYDYCPLTLEELNRWKHYEKNVGRIFPLTNEQFNKWIKLDFNNDDSPDYTSPYQLRRELITTKLGDSVENKYKIGRALYHIAQRRGFKSSRKTGDSEETSVHKGSTETKTIGRNEYEKLIIEKGSLGAAFAHLEDRGIRVRNRYTLRKDYLEEVEKIIDFQGLEVTFAEKIKKAIFYQRPLRSQKGLVGKCTLEKNKYRCPVSHPKFEAYRAWAFINNIKYKENEKDSFKPLPLELKQKLYKDVFFRKSKSNFKFKDIRKYLVKNERAGWILNYKLKYDEINVAGCPVSARLKAVFGDDWEATHIKTNRTDKKGQNKIVEYDINDIWHVLFSFDDEEVFEEFLKVNINLNETQIHDMMVLFKKFPVGYAKLSLKAINNILPFLKEGMIYTEAVMLAKIPELIGKDLFRENQEIITNAVKDLIKDNKKEKDIIFITNNLISRYKALEIGDKFGYKDVSYRIGDMDKREIIKAIEKYYGKGRWQKEDEPLKTDVIEQVTNKYQGFFSNSEREYFKPPHLLDQLKDFLIGNFNIDGKEASKLYHPSQIDIYTKKEGAIYLDSPKTAAFKNPMAYKSLYHLRDVINYLIKIGKIDNETKIVIELARDKLNDKNKRAAIEIYQRRREIENKEFAKAISELNKDSDFKGNANPDNKTDIDKFRLWTEQIENIDEAIKEISATKDDIKKYRLWKEQHARCFYTGKTIRLTDLFNTNIIDFEHTIPRSKSFDNSLANLTVCYADYNRNIKRNRIPTELENYDNDWNGYSAIKPRLQNWIDKIDNLTKQIEFWRFKSKTAIDRDSKDYAIKQQHLRYFEYDYWRNKVDRFTRKDIPQGFINSQLTDTQLITRYAYHFLKTIFNKVDVQKGTITADFRKIYGIQNKDEIKSRAKHHHHAIDAAVLTLIPDSAKREEILKRAYEYEENGQGQYHEKPFPGFNFRTLKDIEKNILINNLADRDKILSKARRIVRKRGRIVWLRDKNGNILYDDNENKVPKIAQGDSIRGQLHEETFYGKIRLPNKDEAGNILRDEKGKIILSKEYWVVKRELVDNLKISNGIIKDEVIDKHLKRYIEKQLGEGVPIKYIKDFNGNIIRHIRIRVKAGRGFLSDSSLFSLKEQTYKSIYKHKQQYYVKTGDNYAFALYIDNDDYDKANKKVISRNLFEVSRIKSSAEINNVYEFFEKTIKFGRSNAMAHLYHVFQTGQKVLFYENNREELKELGNELSNRLFYVKTLFNAEDGRIQFQHHLEARNDEQLSIAFPKETFGQRGKNGFSKFSTDFIQPRLLLSPGNLSCIIEDKDFTMSLDGQINFLY

SEQ ID NO: 8641 - protein, 1157 aa, unidentified
  REGION 1..1157: note = Description of Unknown: Cas Enzyme sequence
QRPLKSKKSTISGCQFEYRTYKKINEETGKLEIVKEPIKAIPKSHPLYQEFRLWQFIRNLKIYKKEDNSTGKLEHDVDVTSQFLPDENAIVELFDFFNEKKEIGQKQVLNFFIKQKTITKKEAEAYRWNYVEEKKYPGNETRAQFLSRLKKVENFAKDQDLDKSFELNLWHIIYSVNDPEEFKKALGTFARKNNLHEKSFVEAFKKFPLFNSDYGAYSLKAIKKILPLMRQGKYWKENEIPQAVKDRIAQYMERANAITVDSKHTDFYKQLENVSDDDIPKQLVKSFLPFKGKNPLTALNTYQACYAVYERHSEVSEILYWKTPEDIDKYLKNFKQHSLRNPIVEQVITETLRTVRDIWSEYGNLNEIHVELGREMKNPADKRKQMTTRNNKNEKTNNRIKQLLNELMNDGVDVKPYSHSQQEILKIYEEGIINNPDTKYSSLKQEDVEKIRKNSSPSSSEIKRYKLWLEQGYISPYTGVIIPLNQLFTTNYQIEHIIPQSRYFDDSLSNKVICESEVNELKTNQTAYEFIKNNEGRIVELQQGKTVKLFTLSGYEAHCSKYFKSNRGKLKKLLSEEIPEGFIERQMNDSRYISKVVKNLLSNIVREEGEQETISKNLVPVTGAITSKLKQDWGLNDKWNEIILPRFKRLNQITNRNDFTALNSNNIEIPNIPDDIGKVEKKRIDHRHHALDALIISCVTKDHTNYITALNTERKNFSLVSKLREMEEKQKINKQTGEIKTYKVATNYKKPWNNFTVDAKEFLEKTIVSFKQNLRVINRTNNKTMQWVEKDGKLKKQLVPQKGKNFAIRKPMHKETVSGKVLIRDKKTVSLNTAIDGQFILVEKTLNKKIKTLRKKGFDNKQIKKYFKDLKNQFNDKDISRVEVYYFFEATATRTELTDKFTSKQFEKITDSGIKKILENHLKNYLDEKGKPQYNLAFNQDGVEALNKNIVELNNGKPHQPIYKVRLFEEGSKFAISEKKESSKNKKYVEAAKGTNLFFAIYWDEENQKRVYETVPLNEVIAHQKLQADFPKKERTPIPIKPEKGQFLFTLSPNDLVYVPTDEEIENPHLVDFKNLSKEQVERIFFVNDFTGNTCYFTPNHFAKEIIEHEVDIKWNDKKNKFTGMNTKTATFDGQFIKEYCWKLKVNRLGKTTGFFR

SEQ ID NO: 8642 - protein, 929 aa, unidentified
  REGION 1..929: note = Description of Unknown: Cas Enzyme sequence
GKYWKENEIPQAIKNRIAQYMERANAITVDSKHKDFSKQLENVSDDDIPKQLVKSFLPFKGKNPLTALNTYQACYAVYERHSEVSEILYWKTPEDIDKYLINFKQHSLRNPIVEQVITETLRTVRDIWSEYGNLNEIHVELGREMKNPADKRKQMTARNNENENTNNRIKQLLNELMNDGVDVKPYSHSQQEILKIYEEGIINNPDTKYISLKQEDVEKIRKNSSPSSSDIKRYKLWLEQGYTSPYTGVIIPLNQLFTTNYQIEHIIPQSRYFDNSLSNKVICESEVNELKTNQTAYEFIKNNEGRIVELQQGKTVKLFTLSGYEAHCSKYFKNNRAKLKKLLSEEIPEGFIERQMNDSRYISKVVKNLLSNIVREEGEQEVVSKNLVPVTGAITSKLKQDWGLNDKWNEIILPRFKRLNVITKRNDFTVLNSNNIEIPNIPDDIGKVEKKRIDHRHHALDALIIACVSKDHTNYITSLNTERKNFSLVSKLREMEEKQKIDKQTGEIKKYKVATHYKKPWNNFTVDTKEALDKTVVSFKQNLRVINRTNNKTMQWVEKEGKLKKQLVAQKGKNFAIRKPMHKETVSGKVQIRDKKTVPLNIAIDEQFVLVEKALNKKIKTLRKKGFDNKQIKKYFKDLKNQFNNKDISRVEVYYFFEATATRTELTEKFTAKQFEKITDSGIKKILENHLKNYLDEEGKPQYNLAFNQDGVEALNKNIVALNNGKPHQPIYKVRLYEQGSKFAIYENIESSKNKKYVEAAKGTNLFFAIYWDEKNQKRVYETVPLNEVIAHQKLQAGLPKSERTPIPVKPEKGRFLFTLSPNDLVYVPTDEEIENPHLVDFKDLSKEQVERIYKMVSSTDKECHFIPNRSATEILKNENGTNSKSERMQDSFKGNIIVDEKSNKPIMIKERCWKLKVNRLGEIIGIFR

SEQ ID NO: 8643 - protein, 908 aa, unidentified
  REGION 1..908: note = Description of Unknown: Cas Enzyme sequence
CELPEKAAIEERTNKNGTRFDYRRTKSVRPRLTIAARDNAEKEEAGYDFYPDRRHLEDEFHRLWGAQARYHKDVLTDTLRDALFETIFYQRPLKAPKVGHCLFVDEDRLPKTHPLTQSRVRYETVNNLRITAPGRANRPLTLEQRDRVIHALNNKKHTKNLSGMNMKLKALGKVLKLAPDEGFTLESVARDAIACDPVRASLSHPDRFGPRWSTFSTDQQWQIVERLRDEADPVAMEKWLQDTCGLDDDHSRATAAAPLPEGYSRLGETATRNILEHLKADVITYNEAVEACGWHHSDQRTGELQALPYYGAILDRHVIPGTQDPADDDIARYGRITNPTVHVGLNQLRRLINRIICVHGKPDQIVVELARELKQSEKQKVEIQKTIKKNTEAAIKRGNKLVDELKQPDTGANRMRLRLWQDLGPDPLKRFCPYTGTRISASMLFTGACDVDHILPYSRTLDDSFANRTVCMREANREKRNKTPHEAWGGNAARWEKITANLKNLPDIKRWRFTPDAMQKFEGERGFLDRALVDTQYLSRIARQYLDALYTEGGHVWVVPGRLTEMLRRHWGLNSLLPDHNRGTGKVKNRQDHRHHAIDAAVIAATDRALVQKIAKLTEGHVAQNREAFAASTPPPWEGFRSDVKAQLEQITVSHRADHGRIDPAARKSGRDSTTGQLHNDTAYGLTGETKNNVPLVVTRKPIDSLSPAMIAKIRDPQLKRMLEVATKDKEKKDFEAAVKAFANKDGPYHGIRRVRIIEPVEVVTISNNRGKVFKGYKPDSNQYYEIWKLPDGKYTHHVTWTFDAHKTGKTSRPHPAAKRIMRLQKNDMIALETSKFGPVIATVERFDANGGISLVGHNESNADQRYRKKIDDMYIRLGPSTLMKAGGRRIFVDEIGQIRDAGPHDRR

SEQ ID NO: 8644 - protein, 1046 aa, unidentified
  REGION 1..1046: note = Description of Unknown: Cas Enzyme sequence
MANSTGGDYVLGLDLGTNSIGLALIESAAQKPSGLIRAAVRVFDAGVEGDIESGRDASRNVKRREGRLVRRTLQRRARRLTKLANLLQRAALLPKGDLGDGERRDRFLADLDKAIYSRYRDRIPRTTLDQLPYFLRARALDENLAPDEFGRAIYHLAQRRGFKSNRKAPPKKDEDPGVVKKAVAELAQDMTASGARTLGEYLSRLDPHKQRLRGRWTARKMYEDEFDALWAAQAKHHSDLLTDALRDKVREAIFYQRPLKSARHLIGVCSLEPGHKRARRALLVAQRFRMVQRVNDLLVVDTQTGEVRPLTADQRETLLAALDRQVKISFAGIRKALKLKKCKFNLEEGGEKELRGNSTAARLRRVFGDRWDALTNEDRDRIVQDLLSIDSADVLEARGREVWGLDDDAAARFATTTLETDHADLSTKAMKKLLPLMEQGVHYATARKQAGYEVLLRQPVVDELPPVHEALPALRNPTVARVLAELRRVVNAAVREHGKPAAIRVELARDLKKTRKDRKGIWQRNRANQKARGAAVKKIQDEAGLEPRGIDIEKVLLAEECGWLCPYTGKGIAMRALVGPSPQFDVEHIIPLSRCFDNSFFNKTLCYHEENRNRKRGRTPFEAYSADSGNYGAILERVKKFKGDKRIVREKLRRFKADHIEDFDDFTNRQLSDTRYASRLAADYVALLYGGRIDEDGTLRVQVGRGQITKYLRDEWGLNAVLGDGGTKSRDDHRHHAVDAVCIALTTPATVKMLSDAAERAQSAGRRRFAPVPPPWPGFLDDVRRSIDGLVVSHRADRAVRGPLHEETIYSPLIREVDDDDNVIERHHVRKPLESLSAKAMKNQIVDKHVRAAVLAKLDELGGDPKAFTDEKNHPRLNSGIPVHKVRIRVPEKATAVGKGYRQRHVLTGSNHHVEIFAVPDGKGGTKWDGEIVTMLEAYRRVKAGEPVVRRDHGPRTRFLFSLCGGDTVELTTACGRRALYVVRTITKEGMDEHIRFLLAPVNDARRKADMIADAVVLRPGVESFRKKTAQKVTVSPLGEVRRAND

SEQ ID NO: 8645 - protein, 1079 aa, unidentified
  REGION 1..1079: note = Description of Unknown: Cas Enzyme sequence
MNKEKVVLGLDIGIGSIGWGLVKITEEEYSDKKPDGTIDKKYRIIDGTIIDTGVRTFQVPQDKEGKSLALHRGNARRSRKTTRRKARRLKLLVKLATEFNLIDDKFNRDEILKPKEGDKESNWDIWFIRKKALERKLADIELFRVLYHIAKHRGFFFHTKAEEIEEEDKKTEEGREKARVKAGLSRIKKKLKDGDCETVGQMFCKEFRQTNEENRRKRNAKDKYENSIHRSLLKEEIERIFEKQCELGNSKAAEELKKRYIDEILMYEEGIDDAKLQKMMSRCEFTGALCAPKESYNAERFTLFNRLNTLELIDTENKDKHLQVNDEQRKKIEALAYKNAKVTFAQIRIELKLQDKPHIRFNLCSYDEKNPEYNKKLICSIQREKPEFEEKHKLQIVDIYTGDMTILDEEIKEIFRKRKETWKNAKKLYVYYSDIRKQLNIPDNFRFMNLSGYTKSEAEIGGKAKYVKQFEYKETFIELKGYHKIKKAVEENSNNEKWEQIKNDTKKLETIAEALTYHKSDETRSKYLKDKGIVDEDIIAAALTINMKQLSNFSREALGNLLNYMDSEEHMLFNDAKEKCGYGKIEYQKQAILKPYGGFFEKNPAVARVISQSRKLVNALIRKYQKQCPIDQIYIEVATELANSKKRKTQILQGQRRNRDAKEAAKEECRKFGLDPYEGQNLLMFRLAEQQNCFCPYTGSKITLYSTGAANEVYIKDCEIDHIIPISRSFNDSLNNKVLCVQKANQDKRDSIPFEWFEETYGKDSTKWMEFENRAKKMYGMPYPKRKNLIRKSWTEKDKEKFLSRNLNDTRYAARHIADYIRKYFDFSKSRRDDINPLSRIQVRSGGITAFLRHMWGLNKNRGENDLHHALDALVVACSTYGHVYLVSNLAKQIERKGKSWYKHFGRDKFKPWDSIREDIQSVVDKIFISRMPRHTVTTEAHKETVISKNKTNKNRIIEVNSGYAEMGNMVRVDVFMDEAGKNYVVPIYSTDIFSNKPLPDQYVPHDRTLTYEQWPSIFDKDMKFRFSLFKDDLISINGKMYYVAFFEAATVNVNVKNIDGSIFHDKKDARDPYTKKIG

SEQ ID NO: 8646 - protein, 1033 aa, unidentified
  REGION 1..1033: note = Description of Unknown: Cas Enzyme sequence
MKKYFVLGLDIGTNSIGWSLIEFTGKSNKPSIVDMGTRIFDPGAIIEEKTGNITSINLKRREARLARRHYDRRRRRKIKLSNILKRSGLLPDEESNEEFCRRIDREFYLRFKEKIAKPRQFAHTIPYYMRFFALDHKIEPHHLGRVLYHLAQRRGFLSSRKTPAKEDEGIVKNGISSLDSEIKNSGSRTLGEYFSKLDPEQLRIRSRYTSRQMYIDEFEKIWDAQVSYGNSILSNQLKEQIFEAIFFQRKLKSVKNLIGTCALEPGEKRCPWFRFEAQRFRILQNVNNLRLINKETGELTKLNNKQRKILYDFLETKERVSVTQAKKALGLKPRSYVFSIEEGGEKYLRGNSSNATLKKVLEERWGKMTDQEKEKLLEELHFYEKSDALARRAEKFWKLDKEKAQELTELKLESGYCNLSRKAIRKIFPKMEEGISYPEAVKEIYGEFKIRKQVNEALPPVDADEHLKNLRNPVVHRCLTELRHCLNPIIRKYGKPYIIRIELARDIKQNRKERERRIKKNRSNEQSRENAFKKIMEKTGIEKPGREDILKFLLVEECNWICPYTQKTIGWNGLFGTHPEFDIEHIIPFSISLDDSYMNKTLCFHDENVKVKRNRTPYEAYGHDPDKYEIILECVSRFRGNAAREKLRRFKLQNTEEFEDFTQRHMNDTRYATREAVNYLALLYGGISDDKGKLRIQAVKGPITGIMRNYLGLNRILGAEVKNRDDHRHHAIDSFVVAYINPGTIRMISDHAKRYEKVYRVPFKAREQWQEEIVEEVRNKINSIIPFHRSYRRLRGPLHEETFYRKGVEKGTVHLRKALSDISAKDIENIVDNSIRKRVRDKLSELDLKDPAKAFSKEENFPVIVTRKGERRLIKKVRIEKNLKVRDIAEGDRKRLIVGGNNHHMEIVAILDEEGRETKWEGHVVSLFAACRRKKEGEPVVRKNFGKGKKFKFSICPGDMVEMEIKKGVKEIFVVRTVPHSRQLAFSKATDARKKTDIQAANEWYTKLPNPLKETKCRKVFLTPFAEIRYAND

SEQ ID NO: 8647 - protein, 1047 aa, unidentified
  REGION 1..1047: note = Description of Unknown: Cas Enzyme sequence
MTYRLSLDIGANSIGWCLLLLDAAGAPCGIRDMGVRVFPDGRDPKTLASLAADRRLARGMRRRRDRYLQRRTALLNALVRHGLMPAEETARKALAKLDPYALRRDALHRVLAPHELGRAIFHLNQRRGFASNRKTDRTNEAEQGKIKTASDRLKAEIARSGLPTLGAWLAERHDRQQDVRARLSGTGAKAEYPFYPTRDLVRAEFDAIWAAQSAWDPALTNRTRDTIAGVLFHQRPLKDPPVGRCWLEPAEFRAPKALPSTQAFRIAQDLSHLVVRRPGEPDTALTGLERAKLADLLNAGSDLSFHQVRKALGLSGGETFNLESKARENLKGAETAARLAGKKGPLATVWPRLDAVARDELVGVLLTADTPQAAIAAMVELGIAPDAAEAAERVTLPDGHASLSSKAIQATLPHLEAGMTYDKAVQAAGYQHHSDDRDGVILDRLPYYGVALADRIGTGTGQPDDPEERRFGRAPNPTVHVALNQLRHVVNAVIAQHGHPAQIVVEVLRELNQSAFERRRIEKEQTENAKRREEWAAQLTKLGQRVNGRNLSFMRLWSEQSRDPKERLCPYTGERISLARLFSGEVEEDHILPFAITLDDSFANRVIVMREANRRKSRQTPYQAFHSQSDWPDIQGRAALLPPSKAWRFGPDALEKWKGEHGDFLARHLTDSAYLARLARMYLRAVCDPDQVWCVPGRLTGMLRGALGMNSATLLGKGGSRKDRNDHRHHAIDALTIGLVDRSLLQRVATAAGRAQDRGRRLLGDVGEPWPDFVAQAAAKVQAIVVSFKPDTSPAGRLHNDTAYAVLPAAGQKAPNVAHRVPVQALAGWKPDEVREALGDARLAGRVVKVLEHTAGNPAQAAALGALTHDAAGRTVRRVRVRERLDGTAEIRDGRTGQPYKRVKLDANHRVEFWRLPAAGGRPGKVKMMVVPMMEAAADAEAARLKRLVPDRRPHPAAKLLMRLHKDDVVAFGVGEGRKLLRVVKFRDGQVNLAEVHESGNLKARDAAKDDPFKYVNASTSRFASERARKVFVDAAGRVLDQGPLPW

SEQ ID NO: 8648 - protein, 981 aa, unidentified
  REGION 1..981: note = Description of Unknown: Cas Enzyme sequence
SDDNRREVIRMGCRIIPLDSDEKDSVEHGKSFTKNQERRKFRTMRRNNFRYKLRRAYLLQELKEHGMWDENLLHIAREQLWELRAKAVTEKISLTELGRVLYHLNQRRGFKSGSKHDLGDEDATKTQKEMLSKFQQLKDEGKTIGQKFYDEIKANPHYRVKEQTYPREAYMEEYNAIMSCQQKFYPEVLTDNFIHKLRDQIIFYQRPLKSQKNLVSICEFEGKWVKNKDGETIFIGPRVAPRSSPLFQYERIWEALNNIEINREKLSLDVKKTLFSQLYEGKNLNFSDIKKLLGTDKDVNFSKIQETTYLKLKEILSGTAFQQLLQFEVEKHIIDYEFIHPETGEVQQKKIVAETIIQEPLYQLWHTIYAISDVEECKKALIKKFNLPEEIAQKLAEIDFVKDGYGNKSAKAIRKLLPYLMEGKQLKDAESEAGYRIQPITEMKDKLDLLPKNSLRQPIVEKILNQLIHVVNQIIDPAEGLVTPEERKNGQFEIRIELARELKASKSERKKILDDIKKNEESNKDIAKKLEKEYNLTPNRKNITKWKLYHVVDLKENKSKKDNKKFNKEASELNGICLYCGKPFSLTEALTGENVDVDHIIPRAVYFDDSLDNKILVHSQCNRDKSNQTAYDYMKNKGEEALKLYTERVEELYKKKFISKRKYQYLLMSSKDIPNDFLNRDLRETAYISRKAKEILQSITANQIQVTSGAVTGKLRHLWGWNNILSDDESNESIETNIADETQSNSDDVTENQTTQTKKKRDDHRHHAIDALVIACTKQGFIQRINTLSSQETQQQIREELKNTQAKLDAYENRLSLLEKYLISQKPFETHEVKKHVERILISSKPGKKVATWSKNIYPSGKIQKVLTPRGKLHDETYYGEIKVPISKTIEDIFSDYEKDSGILENIISPKLRELIEKRLADYNYDAKKAKKSLKQQPIYVDEEKKNKLEYVLCYEPKFVYKIPVKKIVEDTKKTKKRCRY

SEQ ID NO: 8649 - protein, 1106 aa, unidentified
  REGION 1..1106: note = Description of Unknown: Cas Enzyme sequence
MDAKEKRTPSNHPDFHLAFDVGHSSIGWAVLKRHDAEHFDRSIDIIGCGVVTFRADDCLASNRRAYRRQRRHIRSTRQRIKRLKALLAHLSVLSPEELDRPGCAWPWQLAARVLSSKSGQNPALLLSWPELWDVLRWYAHNRGYDGNRRWSATGIDSNAEREDTEKVENAQTLMHKHGAQTMAETVCAICGIDPLGSKKSSNPAPEHRFKGQNAAFPRDIVEREVQRILEVHVGKLKGLTQEVVRALVGNGSGAWKDVSCPAIKLPNRFHGSLLFGQLVPRFDNRIISKCPISGDKVPTRDCPEFLNFRWAMQLANIRVATATDRDLRTLTVEERKQVDKAIRERGYLTPTELKQAVRTATGCTRDNLENMLMHPDAKEVLLVDPVQKVIMSDELSAFWNMLPERLQKRFRGQLRRHKPVKLADIRNSLIESGMATEPFDSELQRQLDAANTKRRKRDKQTNRDELLRKSFAVAKLSGRAPFARQLLVQAVGDVMAGTHPKEEGGCLYLSESIRTAQMNRRIEQQTNNHLIRHRLLILERLIKDVIDEYADGDKGRVAIVTIEVNRDLRELSGKTAKEKAMHLESRVANHHAVAAKLEKAFAGQTFNGKPIQITAGLIRKARIAEDLGWRCPYTGQTYEPIDLVTRRVDKDHIVPRSQRAADGLDSQVITFSQVNGMKGKRTARQFIAEEQGKPVRDLPNLSILALKRFTEFVDSLESFKGHEDDKRRKKKRKDLLRVERYEEKEFVPRDLTQTSQLVRMGAQLVRKVFQDCREQPVIVSLPGSVTGTVRKSWNVLGCLSLACPQVLDETGAVRTKTDIRDITHLHHALDACVLGLASHFIPNNGRVWELIIKRKLSDAEKRQLLVLGVFGFDTDNRFQLRDLSDQLKKQIRERLAERRAVQHLPSRMGSLRAEQNTWRVIAVKDGQATIQQSMRAPNGSRVLKKATEKIGKLLGLDPEGSGKLRAIKGALVIPDNYGLAILDHAASTEDRVVIVPHHKVWHRLNDLRIRNRGHWPRVLRPGSLVRLRNTKPAGKRDGIWRVYTAQASLKIDLVWADSVERKKKGTDVWREVSIANLGLHNIEVLPRRLSGFPQHGSVRCPTISSA

SEQ ID NO: 8650 - protein, 1095 aa, unidentified
  REGION 1..1095: note = Description of Unknown: Cas Enzyme sequence
MPTHHLRVGIDVGTHSVGLATLRVDDQGTPIELLSALSLIHDSGIGEDGKKTASTRKEISGVARRARRLLRRRRKRLQQLDKVLLDLGFPIPKPGEFLDLSEQTDPYRVWRVRARLVEEKLPEELRGPAVSMAVRHIARHRGWRNPYSKVESLLSPAEDSPFMEALRERIMTGSGEILDDGITPGQAMAQVALTHRITMRGPDGILGKLHQSDNANEIRKICDRQGISPDVCKQLLQAVFKAESPRGSAVSRVAPDPLPGQGFFRRAPKCDPEFQRFRIISIVANLRISETKGKGRPLTADERRQVVAFLLEDPRDDLTWVDVAEKLGVSRQALRGTATLTADGERSAAQPPVNVTDQIMRKTKISALKTWWVEADVERQGAMVRYLYEGLEDSECAEVIAELPEEDQAKLDSLHLPAGRAAYSRESLTALSDHMLATTDDLHEARKQLFGVDDSWAPPAEPVGAPVGNPSVDRTLKAVARYLAAVENVWGKPEVIQVEHVRDGFASERAARERDRANNRRYEVNQRAIKEIQQSYGAEGHVRPGDVMRHHAITLQDSACLYCGGTIGYHTSQLDHIVPQAGTGSNNHRENLVAVCERCNRSKSNTPFAVWAQTCGIPDVGVKEAIDRVRGWRNRPGGMSPGELKRLKKEVIARLQRTQEDPEIDERSMESVAWMANELRHRIAAAYPDADVMVYRGAITAAARKAAGIDSRINLIGEKGRKDRIDRRHHAVDASVVALMERSAAKTLAERSSLRWAQRLTGQEETWKQYTGATVGARERFESWRGHMLRLTELFNERLAADEVHVVENLRLRLGSGNAHDDTIRKYATPRLGDGLSVNQIDRASSPALWCALTREEDFDAENGLPAREDRFIRVHGREIKSDDHIQLFSKKKKTEDDSKEKPFGAIAVRGGYAEIGSTIHHARIYRIEGKKPVYAMLRVFTHDLLSHRHEDLFSAVVPPQSISMRCAEPKLRQAIAEGNATYLGWVVVGDELEINVSSFTKDTIGRFLEDYPNTTRWRICGYDANNKLTLKPRILAAEGLGNPSSAVSEIVEGKGWRVAINVLAKVQPTVVRRDALGRPRYSSRSNLPVSWTID

SEQ ID NO: 8651 - protein, 1470 aa, unidentified
  REGION 1..1470: note = Description of Unknown: Cas Enzyme sequence
MKYIKYILGLDIGSNSIGWALIQLDLLQKTKRIIAAGSRIIPMDQKVLSDFGKGITISPTAQRTSYRNARHCRERHLLRRERLHRVLHILGFLPTHYDKQIDFSKRYGKFVDNTEPKIAYNEGKFLFMDSFQEMLSDFKSHQPDLFYTKKNGEESKIPYDWTIYYLRKKALSQKISKEELAWIILNFNQKRGYYQLREEEGNKENDFEIISSKIISVIKKDKDKKYNKYWYDIILENGLVYQAAFYNDFVYNWINQDREFIIERTSLKNGAEKVKLSYLPTFDEIDKMDKKEQDKYYKKIKIKTENSIGNKTVGCYIYDHILQNPNEKIKGKLVRTIERKYYKEELKAILEKQIALQPELFTDQLLADCIRELYSKNEAQQRNLAARDFVHLFVEDIIFYQRPLRRQKSTIANCSLESRSYIDKDSHTRKGAPLKVCSKSNPYYQEFRVLQWLQNLKIYEIESDQEVTHEFIKTLEDKQQLFDFLMAQKEIDCEELLKYFLSLTYPNAKEKALKSELKKWKDTYRWNYVYDIGEKSSKKYPMNETRYELKRYLEKVANLPDDFLSSEVEYLLWHLIYSVTDKVAYEKGLKKFAQKHHLDEDSFVESFKKFKPYPSEYGSFSEKAIRKLLPLMRFGSYWNFNHIDKNTQKRIDDLITGVENEEIRTILREKAEKYQLEKETDFQDLPLWLAQYIVYNRHAEASSLEKWTSVNDLETYLNEFKQHSLRNPIVEQVVTETLRVVRDIWQQYGQGQADFFDEIHIELGRELKKTAKEREELSKQNQKNEDTNLRIKALLAELGEDSAIENVRPYSLMQQELLKLYEEGVFSSSMEIEDDIKKIHKKATPSKAELQRYKLWLEQKYKSPYTGQIISLKRLFTEDYEIEHIIPQSRYYDDSLSNKVICESAVNKLKDNQLGLEFIKNHYGEKVHAAGKEVSIFTEEQYKEFVKNHYANNSGKMKKLLLEDIPEKMVARQMNDTRYISKYISEILSKIVRADERDEGVNSKNVILCTGKITTALKQDWGVNDVWNDLILPRFERMNDLTQTSLFTSYNEKYQKYLPTVPMEYSNGFQKKRIDHRHHAMDAIIIACATREHINYINNQHALEKGKDKKEKQEKRDTLRERLCIKKYNNKSEGNYNWVFKKPWDTFTQEVRAALEGIVVSFKQNLRVINKATNYYERWVEENGKYIKKMVKQEGTNWAIRKPLHEETVSGKITLEREKVSKGKILTATRKAIDSTFTEKVIEGITDTGIQKILLNYLKFKKSPEIAFSPEGLEELNKNISLYNDGKPHKPIRKVRIFEQGSKFPLGEVGNKSQKYVEAAKSTNLYFGVYQGKDKRSFATIPLNEVIERQKQGLSSVPEYNEKGDPLLFSLSPNDLVYVSIEGEIIEDIDFRNLSNEQKERIYKAASFTRNECFFIKSSIASLIKNYDAKTKIGELGSQNKLEVTICKGIRIKEVCIKLKVDRLGNISKA

SEQ ID NO: 8652 - protein, 1122 aa, unidentified
  REGION 1..1122: note = Description of Unknown: Cas Enzyme sequence
MNAMKHYHAGIDVGTNSVGLAAIEVDSKGLPLNILNSMVVLHDSGVDPGKAKTGTTRLANSGTARRTRKLIARRRKRLQKLDRYIEAQGWPLIDLSSLPDPYTPWKIRAELTQGRLKGEEQGRALSIALRHMARHRGWRSPYERIESLRSPKEASKQFKDLKQRVTELSGVIFDEDATPAEVVCDAGLSPSLRLRSAPSTNYTKGAILAGEPVGGKPKKGLLGGKLMQSDNANELRKIGEVQGLDTETVNELIDHIFAAESPKGKASKRAKKDDLPGQDQYVRAPRAHLAFQRFRIVAAVANLRIRETGSKHGRLLSKEEKTKTIEFLMSADGTDGVTWSDVAKELRIERESLCGRAKCGAEGERPSSFPPVNSSNISITRSKIEPLAKWWKEASDDERSALIIALSNADELTDEQPGAETVRQFLSSLDEQVLEKINKISLPRGRAAYSVNSLERLTRRMLEDSVDLFDARKLEFGVENNWSPKPDPIGEPVGNPAVDRVLKIVNRWLLAVTRKWGPPNIVNIEHVRAGFTSEIQAREYERENKKNRNRNLAILEELRDKLGTSDKIRREDITRFAALRRQNCQCAYCGEAITFSDCEMDHIVPRKGQGSTNTRNNLVATCERCNKSKSNMPFSVWAQNCDIPGVSVEAVIGRVRTWIKDPELSPKQYNNFKRDVIERFRKTAEDDAIDNRSIESVAWMATELADRIGSHFREAGADTQVKVYRGWLTSEARKASGFEGKVNLIGGRGKTRLDRRHHAMDAATIALMRQSVAQTLVERASIRESERLRRVVSSSWKDYRGADRDKQFSYGSWLNSMKVLAELFNRAIDADEIPVTQNLRLRLGNSEAHDATIRKFGDSKKCVGAPWKIEEIDRASTPQLWLALTRQADFDKKDGLPKNPLREIRVKNQWFNAEENVALFPTKSAAIAIRGGYAEIGNTIHHARLYKLPGKKPTYGMIRVFAIDLLRTQHSDLFSSPLLPESISLRTAETKVRRAVEDGTAMYIGWLVDGDEIVIDPETKAFDSNNIGEYLSEFPGTKRWRVDGFPDKERLRLRPLQLAGEGLPEDASAGIKEILGPKGKGWRVAINTLFKSPQLVVVRRTALGTVRKLSRGHLPLTTRLRG

SEQ ID NO: 8653 - protein, 1101 aa, unidentified
  REGION 1..1101: note = Description of Unknown: Cas Enzyme sequence
VWYASLMSAHHLRVGIDVGTHSVGLATLRVDDHGTPIELLSALSHIHDSGVGKEGKKDHDTRKKLSGIARRARRLLHHRRTQLQQLDEVLRDLGFPIPTPGEFLDLNEQTDPYRVWRVRARLVEEKLPEELRGPAISMAVRHIARHRGWRNPYSKVESLLSPAEESPFMKALRERILATTGEVLDDGITPGQAMAQVALTHNISMRGPEGILGKLHQSDNANEIRKICARQGVSPDVCKQLLRAVFKADSPRGSAVSRVAPDPLPGQGSFRRAPKCDPEFQRFRIISIVANLRISETKGENRPLTADERRHVVTFLTEDSQADLTWVDVAEKLGVHRRDLRGTAVHTDDGERSAARPPIDATDRIMRQTKISSLKTWWEEADSEQRGAMIRYLYEDPTDSECAEIIAELPEEDQAKLDSLHLPAGRAAYSRESLTALSDHMLATTDDLHEARKRLFGVDDSWAPPAEAINAPVGNPSVDRTLKIVGRYLSAVESMWGTPEVIHVEHVRDGFTSERMADERDKANRRRYNDNQEAMEKIQRDYGKEGYISRGDIVRLDALELQGCACLYCGTTIGYHTCQLDHIVPQAGPGSNNRRGNLVAVCERCNRSKSNTPFAVWAQKCGIPHVGVKEAIGRVRGWRKQTPNTSSEDLTRLKKEVIARLRRTQEDPEIDERSMESVAWMANELHHRITAAYPETTVMVYRGSITAAARKAAGIDSRINLIGEKGRKDRIDRRHHAVDASVVALMEASVAKTLAERSSLRGEQRLTGKEQTWKQYTGSTVGAREHFEMWRGRMLHLTELFNERLAEDKVYVTQNIRLRLSDGNAHTVNPSKLVSHRLGDGLTVQQIDRACTPALWCALTREKDFDEKNGLPAREDRAIRVHGHEIKSSDYIQVFSKRKKTDSDRDETPFGAIAVRGGFVEIGPSIHHARIYRVEGKKPVYAMLRVFTHDLLSQRHGDLFSAVIPPQSISMRCAEPKLRKAITTGNATYLGWVVVGDELEINVDSFTKYAIGRFLEDFPNTTRWRICGYDTNSKLTLKPIVLAAEGLENPSSAVNEIVELKGWRVAINVLTKVHPTVVRRDALGRPRYSSRSNLPTSWTIE

SEQ ID NO: 8654 - protein, 169 aa, unidentified
  REGION 1..169: note = Description of Unknown: Cas Enzyme sequence
MKRILGLDLGTTSIGWALVNEAENNNEASSIVRLGVRVNPLTVDEKSNFEKGKAITTNADRQLRHGARINLQRYKLRRQNLHDCLQKQGWLGTEAMYEEGKASTFETYKLRAKAEEEEISLHEFARVLFMLNKKRGYKSNRKANNKEDGQLFDGMTIAKKTLRRAPYSC

SEQ ID NO: 8655 - protein, 1186 aa, unidentified
  REGION 1..1186: note = Description of Unknown: Cas Enzyme sequence
LERIWNEQKKYYPEILTDEFKQQLEGKTKTNTSKIFLGKYGIYSADLKGLDRKLQPLKWRVEALQQQVDKEVLAFVISDLKGQIANTSGLLGAISDRSKELYFNKQTVGQYLWASLEENPHISIKNKPFYRQDYLDEFEKIWETQAAFHKQLTPELKQEIRDIIIFYQRPLKSKKSLISVCELEQRKVKATIDGKEKEITIGPKVAPKSSPVFQEFRIWQNLNNVLLIDNDTNEKRPLDEDERYLLYKELSIKAKLSKTEALKILNKKGKQWDLNYKELEGNRTQAILFDCYNRIITLTGHEECDFKKIKASEIRRRVSTIFKNLGFNIEILDFDPSLKKHELEKQPMYQLWHLLYSYESDNSRTGNESLLRKLETTFGFPEEYATVLCDVVFEEDYGNLSVKAMRKILPYLQAGNDYSQACAYAGYNHSRHSLTKEELDQKVYKERLELLPKNSLRNPVVEKILNQMINVINAITDEYGKPDEIRIEMARELKSSAIERENRTRAISQGNAENQRIREILEKEFALSYISRNDIIKYKLYEELKPNGFKTLYSDTYIPKDKLFSKDFDIEHIIPKARLFDDSFSNKTLEARDINLAKSSKTAFDFIKEKYGEEGAEAYKKKLDMLLDNDVISKAKYNKLLMAETDIPSSFIERDLRNTQYIARKACEILGELVRTVTPTTGKITNRLREDWQLVDVMKQLNFEKYEKLGLTEIVEDRDGRKIKRIKDWTKRNDHRHHAMDALAIAFTKPSFIQYLNNLNARSNKGDSIYAIENKELHYEEGKLRFNAPIPINEFRAEAKRHLSAILVSIKAKNKVMTQNVNKIKTKHGIIKKIQLTPRGPLHNSTIYGTKMRPIIKMVKVGAALDEATINKVSSPAIREALLKRLNEYSRNAKKAFTGKNTLEKNPIYLNAGRTKTVPSLVKTVEWESFHPTRKLIDKDLNVDKVVDKGIREILKARLEEFNGDAKKAFSNLEENPIYLDEAKKIALKRVSIEGVLSAIPLHTLKNQAGKPITGKDGKPVLGNYVQTSNNHHIAFYYDEDGNLQDNAVSFFEAAKRKSQGIPVIDKDYNRNKGWRFLFTMKQNEYFVFPNEATGFIPSEVDLTDEANYGIISPNLYRVQKMSKVRRGTYDKRDYWFRHHLETTLNDDLKVRNSIFKEIQSLQHLEGIIKVRINSIGKIVAVGEYG

SEQ ID NO: 8656 - protein, 1421 aa, unidentified
  REGION 1..1421: note = Description of Unknown: Cas Enzyme sequence
MANFNKNYSIGLDIGVSSVGYAVVTEDYRVPAFRFKVLGNTEKEKIKKNLIGSTTFVPAQSAQGTRVFRINRRRIERRNNRIMYLRDIFRNEIEKVDKNFYRRLDESFRVLGDKSEDIQIKQPFFGNKELETAYHKKYPTIYHLRKHLADADVNSVVADIREIYLALSHILKYRGHFLTLGDIDPNNINMQNSWIDFIESCQDVFDLEVSDESKTIADIFKSSDNRQEKIKTILYYFPKEFEKKDKSVFKQLLQLLFGLKTKFKDCFELEEEPDLNFSKENYDDNLEKLLGELGEDFSDVFDKLKILRDTILLSGMLTYTGATHARFSATMVERYEEHRKDLQRFKSFIKQNLSEQDYLDIFGRKTQNGFDVDKETKGYVGYITNKMVLTNPQKQKTIQQNFYDYISGKITGIEGSEYFLNKISDGTFLRKLRTSDNGAIPNQIHAYELEKIIERQGKDYPFLLENKDKLLSILTFKIPYYVGPLAKGNNSRFAWIKRANSSDILDDNDEDTRNGKIRPWNYHKLINMDETRDAFITNLIGNDTILLNEKVLPKRSLIYEEVMLQNELTRVKYKDKYGKAHFFDSEHRQNIINGLFKINSKRVNAERLIKYLSDNHKDLNAIEIVSGVEKGKSFNSTLKTYNDFKTIFSEEFLDSEIYQKELEEIIKVITVFDDKKSIKNYLTKYFGHLEFLDEEKINQLSKLRYTGWGRYSAKLLLDIRDEDTGFNLLQFIRNDEENRNLTNLISDNTLSFDPKIKAIQSKSTVEDDVFDEIKKLAGSPAIKRGILNSIKIVDELVQIIGYPPQNIVIEMARENMTTEEGQKKTKTRKSKLESALKNIENSVLENGKVLHSDEQLQSEKLYLYYLQNGKDIYSLDETGSPAPIYLDQLDQYEVDHIIPYSFLPIDSIDNKVLTHRKNNQRKLDNIPDKETVAHMKPFWEALYNAKLISQTKYQRLTTSERTPDGVLTESMKAGFIERQLVETRQIIKHVARILDNRFSDTKIITLKSQLVTNFRNTFHIAKIRELNDYHHAHDAYLAVVVGQTLLKAYPKLAPELIYGHHVHFNRHEENKATLRKHLYSNIMRFFNNPDSKVSKDIWDCNRDLPIIKHVIYNSQINFVKRTMIKKGAFYNQNPVGKFNKQLAANNRYPLKTKALCLDTSIYGGYGPMNSTLSIIIIAERFNEKKGKIETVKEFHDIFIIDYEKFNNNPFQFLNDTSENGFLKKNNINRVLGFYRIPKYSLMQKIDGTRMLFESKLNLHKATQFKLTKTQNELFFHMKRLLTNSNLMDLKSESAIKESQNFILKHKEEFDNISNQLSAFSQKMLGNTTSLKNLIKGYNERKIKEIDIREETIKYFYDNFIKMFSFVKSGAPKDINDFFDNKYTVARMRPKPDKRLLNATLIHQSITGLYETRIDLSKLGED

SEQ ID NO: 8657 - protein, 1391 aa, unidentified
  REGION 1..1391: note = Description of Unknown: Cas Enzyme sequence
MTNKTWYLGLDIGTASVGWAATDNEYKIIRKNKKRLWGVRLFEEATTAEERRGYRSGRRRLARRKWRLNLLEELFTQEIAKIDANFCLRLKESQYHYEDKTHQVPYAIFNDKDYTDKDYYKEYPTIYHLRTKLMTEENPDIRKVFLAIHHILKNRGHFLLQGQSFKEGNLNNLIKELLNLDILHISIEITEENINKITEIALEKKTLTDKVNDLKKIYPKEKQLLEAFRLIFGGKTSLDKLFAIDEYKELDASVKSVSFKEKIYEEVRHDYEQVLSNYIELLDLAKLVYDSIILSDIKKEGKTLSESKVELYHKHREDLTKLKTLVKNDSKLSEDKKVELYSAIFKEDKDKGTNYVNYIRKSEEGKGCNYEDFKKFLVKELAKLEESSAKEEILRDLELELFLPLQRTKDNSVVPYQIHKEELVKILDNAAKYHKFLNEKDDSGYSIIEKVIQLLEFRIPYYVGPLNSSKKAKVDGFAWSVRNKGYENTPVTPWNYEKVIDESASAEKFITNLTNKCTYLKGEDVLPKSSLLYSEFALLNELNALKYDGNRISLEARNVIIEKLFKEQGKKVTKTSIKNLLKAEGYIDGKGEITGIDITVKNDLKSYRDFKKILGDKFNTEHVENIILWITLYGESRKLIKAKIEAVYGDIYSKEEIAKMSRLVYKDWGRFSRKLLTELVSKKLYNEETGECLNIIGAMRQNNILFMELLADRFDYSQQIIDYNKELQKEVTEITPEILDDLYVSPSVKRSIWQTVRIVEELKKIIGCAPAKIFVETTRSNQDKKKPTDSRKKQLELFYKAVKKDVKDLEKEIGSLNFDKLNERLSSVEPSKLKAKKLYLYYTQLGRCMYSGETIDITQLNTTAYDIDHIYPQSKVKDDSFTNTVLVKREYNAAKTDRYPLGSDIQTPSNRRFWKFLKEKGLITNEKYNRLVRTEEFSDEELTGFIARQLVETSQSVKAVAGILGELNPKTSICYSKAENVSSFRQNFGKIKDGNSKSNNNEQLVKVREINNFHHAKDSYLNVVVGNVYDTKFTRNVYNFIKDKKDGRKYSLNKVFYENVSDSKTVAWEMDKTIHQVEKVMNNNNILVTRRTSEQKGGLFDATVYKAKVAAKAKEGVYYPLKTSNSVVKNVIKYGGFTKIKIAYYSIFEYILVNKKGEEKITRIIPIPIYISQNIKDDSTLLEFGKTQINLKSGEKIKDLKLKYRKLCIGDKICLEGYPYFVGGKTSDYFVYDSAVQVLMDKENEKYIKELVKFTNWKKDNKDGELSKNITRKKNTDLYNALLQKMKTQELINKKPNKFQELEKEETIHKFNDLNEEEQSKVLLEMLNLLTDMKTVYDLKLINITATRGKQNFDLTSLKEFTIIEQSVTGFYEKEITIIGDKENDMENNNC

SEQ ID NO: 8658 - protein, 1237 aa, unidentified
  REGION 1..1237: note = Description of Unknown: Cas Enzyme sequence
MKKGYSIGLDIGTNSVGWAVITDDYKVPSKKMKVLGNTDKYFIKKNLIGALLFDEGTTAKDRRLKRTARRRYTRRKNRLLYLQQVFSEEISKVDSSFFHRLDDSFLIPEDKRGSKYPIFATLAEEKEYHKQFPTIYHLRKHLADSKEKADLRLIYLALAHMIKYRGHFLYEESFDIKNNDIQKIFNELMSIYDNTFEGSPLSEQSVQVEAIFTDKISKSAKRERVLKLFPDEKSTGLFSEFLKLIVGNQADFKKHFNLEEKALLQFSKDTYDEDLENLLGQIGDDFADLFLVAKKLYDAILLSGILTVTDPSTKAPLSASMIERYENHQNDLAALKQFIKNNLPEKYDEVFSDKSKDGYAGYIDGKTTQEAFYKYIKNLLSKFEGADHFLEKIEREDFLRKQRTFDNGSIPHQIHLQEMNAILRRQGEHYPFLKENREKIEKILTFRIPYYVGPLARGNRDFAWLTRNSDQAIRPWNFEEIVDQASSAEDFINKMTNYDLYLPEEKVLPKHSLLYETFAVYNELTKVKFIAEGLRDYQFLDSGQKKQIVNQLFKDKRKVTEKDIIQYLHNVDGYDGIELKGIEKQFNASLSTYHDLLKIIKDKEFMDDAKNEAILENIVHTLTVFEDREMIKQRLAQYDTLFDEKVIKALTRRHYTGWGKLSAKLINGIRDKQSRKTILDYLIDDGKINRNFMQLINDDGLSFKEIIQKAQVVGKTDDVKQVVQELSGSPAIKKGILQSIKIVDELVKVMGHTPESIVIEMARENQTTARGKKNSQQRYKRIEDSLKNLAPGLDSNILKENPTDNIQLQNDRIFLYYLQNGKDMYTGEALEINQLSNYDIDHIIPQAFIKDDSLDNRVLTSSKDNRGKSDNVPSLEVVQKRKAFWQQLLDSKLISERKFNNLTKAERGGLDERDKVGFIKRQLVETRQITKHVAQILDARFNTEVTAKDKKNRSVKIITLKSNLVSNFRKEFRLYKVREINDYHHAHDAYLNAVVAKAILKKYPKLEPEFVYGDYQKYDLKKYISRSKDPKDIEKATEKYFFYSNLLNFFKEEVHYADGTIVKRENIEYSKDTGEIAWNKEKDFATIKKVLSLPQVNIVKKTEIQTHGLDRGKPRGLFNSNPSPKPSEDSKENLVPIKQGLDPRKYGGYAGISNSYAVLVKAIIEKGAKKQQKTILEFQGISILDKINFEKNKENYLLEKGYKEILSTITLPKYSLFEFPDGTRRRLASILSTNNKR

SEQ ID NO: 8659 - protein, 1382 aa, unidentified
  REGION 1..1382: note = Description of Unknown: Cas Enzyme sequence
MENIQYYIGLDVGTNSVGWAVTDTSYNLLRAKGKDMWGARLFEKANTAAERRTKRTSRRRSEREKARKAMLKELFADEINKVDPSFFIRLEESKFFLDDRSENNRQRYTLFNDATFTDKDYYEKYKTIFHLRSDLINSDEKFDVRLVFLAILNLFSHRGHFLNASLKGDGDIQGMDVFYNDLYEACEEFEIDLPQISNINNFEKILSQKGKSRTKILEELSEELSISKKEKIKYAILKLICGMKIKVADIYSDEDIQDEDKKKDFGFRESNYEERALEVKEIIGDEYFDLVERAKSVHDMGVLSNIIGNFKYLCEARVEAYDNHHKDLLKIKELLKKYDKKAYTDMFRKMTDKNYSAYVGSVNSNIAKERRSVDNRKIEDLYEYIKKIALKNISDDNEDKIEILKKIETGEFLKKQLTASNGVIPNQLQSRELRAILKKAESYLPFLKEKGEKNLTISEMIIQLFEFQIPYYVGPLDKNPKKDKNANSWAVIPSGGRILPWNFEDKVDVKASAEEFIKKMLRKCTYLSEEYTLPKQSLLYEKFMVLNEINNIKVDGEKISVEAKQRIYKDLFMKGKKVSQKAIKQELISLNIMNKDSVLSGIDTVCNAYLSSIAKFRGVFDEDVNNQSIIDMVEDIIFWGTIYSDEKKFVKEKIEEKYGDKIDKDKIKRILGFKFSNWGNLSKSFLELEGADVGTGEVRSIIQSLWETNFNLMELLSSRFTYMDELEKRVKKLEKALNQWTIEDLDDMYLSSPVKRMIWQSMKIVDEIQTVIGYASKRIFVEMTRSEGEKVRTKSRKDRLKELYNNIKEDSKQWVKELDAKDESYFRSKKMYLYYLQKGRCMYSGEVIELDKLMDDNLYDIDHIYPRSFVKDDSLDNLVLVKKEINNRKQNDPITPQIQASCQGFWKILHDQGFISNEKYSRLTRKTQEFSDEEKLSFINRQIVETGQATKCMAQILQKSMGEDVDVVFSKARLVSEFRHKFNLFKSRLINDFHHANDAYLNIVVGNSYFVKFTRNPANFIKDARKNPDNPAYKYHMDRFFERDVKSKSEVAWIGQSEGKAGTIAIVKKTMAKNSPLITKKVEEGHGKITNETIVGVKEIKFGRGKGEKSDKTPKKPNVEAYRPIKINDSRLCNILRYGGRGSISSSGYCLVEYTKKKKTIRSLEAIPVYLGRKDILREEKLLEYLKNILNNEGKDTATDIRICLLFIPMNSLIKIDGYLYYLGGKTGEQIYIYNAQQLKMKKEEAEYIRKIEKAVSLSKFDEIDREKNSVLTKEKNIELYDKIQDKIENTVYNKRLSSIEGILKEGKAKFVELDVEKQCKILNSVLNNITNTMKVDLREIGGSVNSGTCRCSKNITNYKEFKLIQQSITGLYSCEKDLMMI

SEQ ID NO: 8660 - protein, 1395 aa, unidentified
  REGION 1..1395: note = Description of Unknown: Cas Enzyme sequence
MKKEIKDYFLGLDVGTGSVGWAVTDTDYKLLKANRKDLWGMRCFETAETAEERRLHRGARRRIERRKKRIKLLQELFSQEIAKTDEGFFQRMKESPFYAEDKTILQENTLFNDKDFTDKIYHKAYPTINHLIKAWIENKVKPDPRLLYLACHNIIKKRGHFLFEGDFDSENQFDTSIQALFEYLREDMEVDIDADSQKVKEILKDSSLKNSEKQSRLNKMLGLKPSDKQKKAITNLISGNKINFADLYDNPDLKDAEKNSISFSKDDFDALSDDLASILGDSFELLLKAKAVYNCSVLSKVIGDEQYLSFAKVKIYEKHKTDLTKLKNVIKKHFPKDYKKVFGYNKNEKNNNNYSGYVGVCKTKSKKLVINNTVNQEDFYKFVKTILLAKSEIKEVNDILTEIETGNFLPKQISKSNAEIPYQLRKMELEKILSNAEKDFSFLKQKDEKGLSHSEKIIMLLTFKIPYYIGPINDNHKKSFPDRCWVIKKEKSPSGKTTPWNFFDHIDKDKTAEAFITSRTNFCTYLIGESVLPKNSLLYSEYTVLNEINNLQIIIDGKNICDIKLKQKIYEDLFKKYKKITQKQISTFIKHEGICNKTDEVIILGIDKECTSSLKSYIELKNIFGKQADEISTKNMLEEIIRWAAIYDEGEGKTILKTKIKAEYGKYCSDEQIKKILNLKFSGWGRLSRKFLETVTSEMPGFSEPINIITAMRETQNNLMELLSSEFKFTENIKKINSGFEDAEKQFSYNGLVKPLFLSPSVKKMLWQTLKLVKEISHITQKPPKKIFIEMAKGAELEPARTKTRLKILQDLYNSCKNDADAFSSEIQYLSGKIENEDNLRLRSDKLYLYYTQLGKCMYCGKPIEIGHVFDTSNYDIDHIYPQSKIKDDSISNRVLVCSSCNKNKEDKYPLKSEIQSKQRGFWNFLQRNNFISLEKFNRLTRATPISDDETAKFIARQLVETRQATKVAAKVLEKMFPETKIVYSKAETVSMFRNKFDIVKCREINDFHHAHDAYLNIVVGNVYNTKFTNNPWNFIKEKRDNPKIADTYNYYKVFDYDVKRNNITAWEKGKTIITVKDMLKRNTPIYTRQAACKKGGLFDQTIMKKGLGQHPLKKEGPFSNISKYGGYNKVSAAYYTLIEYEEKENKIRSLETIPLYLVKDIQKSQEKLKSYLTDQLGKKEIKILIPKIKINSLLKINGFPCHITGKMGEAFVLRPAVQFCCSNDEALYFKKIIRFNEIRSQREKMGKTISPYEDLSFRSYIKENLCKKTKNDEIGEKEFYDLLQKKNLEIYDMLLTKHKDTIYKKRPNSATIDILVKGKEKFKSLIIENQFEVILEILKLFSATRNVSDLQHIGGSKYSGVAKIGNKISSLDNCILIYQSITGIFEKRIDLLKI

SEQ ID NO: 8661 - protein, 1360 aa, unidentified
  REGION 1..1360: note = Description of Unknown: Cas Enzyme sequence
MLRIVKYAGVYMDKELDKKEPYSIGLDIGTSSIGWAVIGDDCKLRRYKHQNMWGAHLFKEADKAATRRSFRSSRRRLARRKRRITLLQQIFDDEIQKIDPHFYLRLSESMLHLGDKNSALELDANILFADHSFTDKSYREKYPTIYHLRSDLFHNTDRQDIRLVYLALHHIIKYRGNFLVEGGVDSVISSFDNQNLQKFMDFIGADERAAKEIKNILLDRSKSRSARKSDIDKQTQLTPSTKEAIKAVVGLKWDAGKLFEDSSLDAKGEFSSKDYEEQRDAIATAIGDENYELVATLESVYQWTVFSQFIRKDSCLSDIMIERYNNYRQDLSDLKALFHKFLSKDDYKSFFHGDTAEFELYNSHKSKNSIDDLYKSIKKRLGNIAKDDLRYQRFEKRAELGEFLARQRIRDNGAIPHQIHQYELEKIIDNQAQYYPFLAQNRDKIISIFTFKLPYYIGPLKTGGNFAWSVKKKDGVIYPWNYDEMIDDEASAEKFIDRMRNHCTYLPDEEVLPKNSLLYQEYEVRNELKNITVNGERLGANVQNDIVDKLFTVESSVTRKKLVDYLYKNQIYDTDSLAIEGFSNEKGFNSSRKSYIDFTQKIGIEITLDNQQAIEEVIKWITLFEDKKILAKKLRNKYSDMFSKEQISKILQLNYSGWGRFSRKLLDGITIQNRDGKLTVIGAMRQYKDNFMQIVQSERYGFKEIIDDILSANQCAEITYDDIKNLAGSPGIKRALWRSVRIIDEIVDTIGYEPKLISIEMARNEGEKVSTNSRKNQLEKMYKELIGDDADYNKSVIKPQLAKYKEKLNKKKYYLYFLQNGKCAYTGKPLDIENDLRECEIDHIIPRSLTKDDSLDNTVLVIRNENQRKEDDYPVSSDIQKHMAVIWSLLKRAKLMSPTKFQRLTSKKQLSESRIAGFVNRQLVETRQITKHLARMLHEKYVDSSTDIFTIRAGMGSEYRDCHDLPKSRDINDFHHAKDAYLAVVIAQFIRHRYPKLEEKFIYGEYMKFKSKLLNSHDKHSFIIRAMGRDFTDESTGEVVWQRKTAYDIINRTMRYNDCLITKKTEIGDNQFYDQTIYGKDSGKTMIARKSDLPVAKYGGYSGEKDAYCTAIHYINRGNPVYKIIGIPVQVYMQDKIKPGSISNYIQNKYKQATVLIPKIPLNQKIEHDGNEQFIVSSSEVTNAKQLKLPYDIEYAVAVALKLGDIPQVRVTEEQASSDDYLRYKRDRQIERKQKVIDGIEKFWDIYVDKLSDQYQQFGSIIERARLVCDKYRNLSTVDKIKLIRLALAATHANSSNANMKKDFPGLNLPSDFGRMRGKNLDPTRFTFVYESITGLHCRKLDGSTLKPDQDSRVCLGAQS

SEQ ID NO: 8662 - protein, 1515 aa, unidentified
  REGION 1..1515: note = Description of Unknown: Cas Enzyme sequence
MRNILGLDLGTNSIGWAVVGSEASENGEERLTGIKGAGSRIIPMDASILGDFAKGNTVSQTADRRIKRTARRMNERFILRRERLHRVLNLMGFLPEHYAASIDRYGKFIDDKDHKIAWRTNSDGRQEFVYQKAFNEMYEEFKAHNPEFLKNGGKIPYDWTIYYLRKKALTSPVSKEELSWILLNANQKRGYNQLMGMDEQDEQEDKSTRVEYLSSVIVEVTDSGDKRGKATWWNCKLDNGMVYKRPSEVKPDWEGKTKEFIITTDLDKDGNPKLNKFGEIQRSFRMPGENDWTLIKTRTEDQVNKSGEYVGEYIFNALLKEPTQKIRGKLVRTIDRDFYRAELKAILIKQAGFIKELTDRDLYLQCIEELYPNNDSYRNSIASKDFTYLLADDIILYQRPLKTKKNLIDNCPYESHTYSDKETGEVKTAPVKCIAKSQPLYQEFRLWQFVQNLKIYDNLSGEDETSFFIPTEAKRVAVFKYLNDIASTDQESFLKEFFGIKRPKCKDSNLPYTWNYVQDKKYPCNETRGPILSRLKKSGIPSSFLTNEIENELWLILYSSESRKELEEALRKFAGRHGLDETFVDNFKKFPAFEKDYGAYSAKAIKKLLPLMRMGEYWSEAAIPDEVKANIEDIIKGKFADSIPQKVREQLSTYKEISSFKGLPLYLACYVVYGRHSEVSDSQLWTRPEDIDVYLNNFKQHSLHNPIVEQVVTETLRTVRDIWRSFGKIDEIHIEMGRDLKNPAEKRKKDLMRSIENENTNMRIRALLMEFTNPDFKIDSVRPYSPSQQDIFRIYEETALRGENNLPDYVLDVLQNFGRGKTEQPSHAEVLKYKLWLDQKYRSPYTGQPIPLGKLFTTAYEIEHVIPQARYFDDSFNNKVICESEVNKLKSNMLGHEFIEKHGGEIVPLNMGGSVRILTKTEYEDLVKRFYANDRMKAKRKNLMLDDIPEAFINRQLNDSRYISRLMLGLMSNIVRKEGESEATSRNVITTNGSITDRLKVDWGIKDTWNRLILPRFRRMNQITGTSDYTRINRNGHEIPNVPEAVSKGFVIKRIDHRHHAMDAIVIACASRNIVNYLNNSSACKGAKISRYDLQHLLCNKLLQGDGSYSWVIKTPWPGFQNDVFNALNNIIVSFKQNLRVINKTTNYYQHYKDGKKVIVRQVNGDSWAVRKSMHKDTVFREVNLRMIRQENLKSVVEHPDDVVNRDLREKLKEFVLKGTSLSNIKDYFAQERDAWSDVDLKKIDVFYFSKDDKDPKTGLPKHRFFSTRKPIDTSFTEEKIKTQITDTAIQKIMLAHLAENGNDPKVAFNPDGIERMNDSIARLNGGHMHQPIFKVPYFEEGNKFSVGSEGAKAKKFVEADKGTNLFFAIYENEVEDKKTGEIKKVRYFSDIPLNVAIDREKQGLTPASEDENGKKPIMVLSPGDLVYVPTEEEIKAGKLEPSIDRGRIYKMVSAGQGKCYFVPQSVASVIKDKVEFESHNKSMKTIEGNTYIQKVCIPVKVDRLGHIISINDMI

SEQ ID NO: 8663 - protein, 1027 aa, unidentified
  REGION 1..1027: note = Description of Unknown: Cas Enzyme sequence
MGQQNQEMANARHYLVLGLDPGIASCGFCLLDMTDHKILEMGSHLFDAPQNPKSKQNLSVERRNARSARRNLKRTRDRQKKCLELLKQCGLSPSDADKQWLQSRKGDKPVIKLRASALDRTLTDRELAQVLYSLTGRRGYIPHGEGHLDDVDDAEAGKVLAAVRENQNQMAKKGYRTVGQMLYKEGRSRNRGGDYTLCVLNSQIIDEAKIILDEQRSHGNAILTKMSNGEFEQFTNSYIDCLTWEKKSTKHDERVYSLVGACTYFPEEKRAAEADLSSELCRAYERFGHLVMVDADGTEHRLSAKDRARYLQILFSPVPIRGNKDCKVTYATIRKDLDLSAHVSFKGIEAERENKEEPFSPRRWRKLRACGVPEGLLARMLEDRDLADSIGEALAYASTEESLRDKLSSLDLSDDEINQLAVNVPFAGKLFSGYGSRSLKALHMLLDMFEDESILTLDDAERESGLQALRLADKGHRSLNLPPYDIYDPTCNNPTVLRALGRMRRIVNAIIRIYGVPDEIHIELGKELKQSSKEKKSIAKSNLQNKKDNERIAKTIAELLGCSPDDVRGKQIRRFALREEQGCKDAYTGDSIDLMRMLTEDRYTEIDHILPYSRTCDDSRANKVLVLQKSNQDKKERTPWEWMSDDASKGAPDWEEFKARTLTNHRLSYKKRDHLLNQNLNGQEQSFIDRNLNDTRYMSVAVKDYLEKSLLFPDDGRKSHVIAVAGGATSALRHVWGLNFGADNTKDRSDDRHHAVDAAVIAACSQATVKKVADTSKLGHSEFKRKRESRLADTQPWPTFADEVIARREFVIPTRMANHGVTGSAFEDTIYRYEGIREGKDSLAVLSKSQGKDKPRAVKPSGNYRLDADGGAHLYDGIAFLRFWLDAEARPKGKVKGKWLIEPVYYADIPLIQCGRYIPKYIPAAHLARDQWVEIPESVLATDPVTVFFGDVLYVDGHIGRYSGFNINGLKLTMHSVISGESIAFPPVSSTWSKDSEVRIIEEDVLGRCWTPNIAKLVRLQEAASSS

SEQ ID NO: 8664 - protein, 1399 aa, unidentified
  REGION 1..1399: note = Description of Unknown: Cas Enzyme sequence
MSQKILGIDLGTNSIGLSLRNVDNGNQLKDQLEYFSSSIFQSGVGKNEKDKKNPEYSFAAERTTYRMTRRRLRSRHRRLWATLQLLIDNDCCPLSKESLEEWKEYKKGGEGHRYPIDDIPFNNWIKLDFDADGKPDYTSPYQLRKSLAEEQLDFKQKQNRYKLGRALYHIAQRRGFKSSKGESLDNIDSEDDSIDVISLMKESESKKSSKLSAYMKEHGLATPGQAFANLEREGVRVRGSEFQAVQSQLKEEITYIFKFQHQLSTNSDFYQHLVSEKKGEGTIFYRCPLRSQKRLVGKCTLEPRKYRCSLSHPEYETFKAWSLINNIKIRRSQGDDLEQLDLSLRQEIYNKLFISKVRDYFPFKEIRTEIQSKLGGITLKYDQDKKQQTINYADDYSVDGCPVTRRLIILLGDDWRHATLKSDKMRKGHHSSMHQVFYSASDLWNVCLSADEESEIIAFAKERLGWCEEDKQTKKLVSLYSSVSKHSQYGMLSLKAIMNINSMLVRGLKYSDAVMMAKIPNIMPVSEKQIGELAYYFEHHLSPQVKYQRMVARLANKLIADYKSLNVEYRFADHNTDYQLQDSDMKDIVNVIKDYMGTYEYDALNMEERDRIKNDVARLYQFFFHSSNRDYIKVPIVKELWAKYLHELYPSVPEERWGELYHPSQINYFHQKDGRLGSPNLGAIKNPVALRTLNILRSKINSLLEDGIISPDDTRIVVETAREMNDANMRWAIRTWNKQRELENKEIEKLLSEFHKRADDINKDKLRFALEQSDFDKYDAKDKEYKINVAKYKLWREQECRCIYTGKVISLSKLFDGHSFNIEHTLPQSLSLDNSDCNRTICDAYYNQHIKGTLLPSALPNYEKNQVIDGKEYSAIKPRIEKWEEKLKHLEDRVNYWRWRARHAQTKDNKDFCIRQMHLWNFDAEYWRKKVETFKVTEIKEGFRHSQLVDTRIITRYAALYLRSLFSNVDVQKGEVTSVFRKILGIQDENQQKDRSNNAHHAIDATMLTLMPVPAKRERMLQLFYQKQEKRKVGLDTQYEDNELKEEIKGLNIGKDAHNIATYIKNHILVEHPKHRDALAPSSHIVIEKKNGKKYRKVATEKNVIREQLHEQTYLGVITQWKKGKNGAIIKDSQGKPLVDLNNKLLVYRMPLRFKSNANEKGFKNWDDLYNNIVNKDLIPMMRKQFKEGTLFKEACERGIYMLNKKGEKVNRIRTVRINRKISLNGAPIIKTQTYKSAKDYKNYFRARVGKLYAGSEYSNGKETEFRVYSLMDVANNRRKHQEDIPKSIIGKHGDVLELKRVLKVGDTVLLYQKSANELWRLGNKELGKRLYVISAFEGDDRIHFKRSSYDGKPGKGLAIKDFNYLQDLIRTSYSKVKYLIEGYEFTLKNGKINFNKDV

SEQ ID NO: 8665 - protein, 1097 aa, unidentified
  REGION 1..1097: note = Description of Unknown: Cas Enzyme sequence
MKYRWAFDTGTNSLAYVILELDDNNHVVRIVDMGVRIFSDGRNPKDNQPLAMARRMARSIRRQRDRRIQRKNVLVHILTSNGLFPDEASLRQTLKKQDPYRLRKKALDEKLEAYELGRILFQIGSRRGFQSNRLTDQEEKEAGEKLTQAQKITQLDNAIKESGARTLGEYLYQRIVNKQGVRFRADTYECYPSREQYLTEFQAIKEVQQQYYPDLPWDLIEKAIFYQRPLKKPERGKCQFYTSETRAYSDCPSAQQFRIVSTVNNLKYVDQTGVQRPLDADEKDLLIRMLDNCKTLSFNKIRSKLKIDGKFNFEDVRMDKLPGNTIACEMRKPDNFGPVWDQLSAETQDAVVEKLLDAETDEEVLEYLELFNLSPEQNEHILKIKIGKKMGRLSAHFMRDCTKIMKEKHIRYDEAVKEMGLNHSQFDKGAQLDRLPYYGAVLRTTVIGAHPEADDSNPEYKYGKIANPTVHIALNQLRKVVNALIDRYGKPDQVVIELSRDISDSAEKRAEHYRQQSQRERENATYRDVLKKDFGLLRPTAIDLKKYRLWLELGTNNTVRKCPYCGKPISAAELFTNQIDIEHILPYSRTLLDSMTNLTLAHHNCNHYKGSRSPYEAFATSPDRYDWGTIMANIENLPRSKRELFAADAMQAFEENEGFITRQLNDNRYLSTAVREYLSCICPPNQVWTNKGNNTSKLRDNWGFNTILSSSRDPHFKNRSDHRHHALDALVIGLTDRSMLQTMARLNKDDENPMKKVPACPIPRAVITDKLNDIIISYKQDHGHEGRIFKETATGLRKLAVSIKLSELSESDVVSNEKLKAFFEQKRANGISFTKAKNTLMKQFEQHGDKNPEIWILKDIYVTTIPFTSIEKDDLDNERILNKTLRERIGKKVKDVLADKKELKAKLELLSKQWNIKRVRYIPKGQVFTRVASVPNKHYENDGMCCAIIWKIPGKNATSKFQGTFVSYKDIYDHDAGRLKEFPRPKSTDGREIPTAKKIMTLYKGDMIRLIRKDGISYTIVVAGFSTTNNKIDVQPMYCASNIKEWMESTNTNLIQDQVCWNSNVEGHNYMSINVLFNDNQVELLRITPDGRNVHGR

SEQ ID NO: 8666 - protein, 976 aa, unidentified
  REGION 1..976: note = Description of Unknown: Cas Enzyme sequence
KAAQDFDRDFAASGCRTISEYLWKNCRNAAGQVDFRNRQHRADLRLIRRCHVEDETKKILAQQGRFYQELSASVRENIPSIIFAQRFFEDGPGNKNDPTRRYTGFLDKLGMCPFYPTERRGFRNTVLADIYAVTNALSQYRYQSKSGVPGLPALVAREIVETTLRDGNMNLTMAKAILKKHQVYLFKSAYLDETALGKAIKFLRPMKRIAEKAGIAWTSLLGDDPLSMEDPPLLHQIGEVLAKYKTPRYRDDELKKLFTGTTIEGNQGFRKELAGTSFSGASACSYHYMHDAIEAFMAGEIYGDFQARRIKEENEASAPQRERYAQLPARLLAEDEDIRDNPVVYRAINEARRVVNAIVRLYGAPEYINVEVGRDLGRSFTDRERWKKQNDDNQKKRDKAVEAIAGHLHCAADKVKPIQVERYWLYQEQDGKCLYSGEAIDLKDALNPNGTYEIDHIIPYSLILDNTLNNKVLVKWGENQRKGQRTPLMYMAEPQKAAFLERVNGIFNKKSSPWSKRKYEYLLQEALDTPEARQLVDAWKSRNINDMRYITKYVFNLFQRYLQFSEDGKGENAIHVHAIRGAITAKFRKTWLNPKTWGGKKERKSNLHHAVDAVVLANLTPAYIEIASDNMRLQQIFRRYYKKESAEYLEYMDRAVQKMKTYYGFSEEYTRSLLRYHDRVPSFVRRLREEVDIRFNDEDAERFAIQMKEFYGDSANFLVPPHMPLTSHKAERRYRGAIADANPIKVREIDGVPHKISRQSIFAIRKKDLNTLYSYDRLLKDTLHQILDGEKENYTIEKYLKEQGRTVFTLPNGTVVHKVSVVKEAVSNFHKKQISAENYTILGKLKYYCVEIYQDIKGTNRCRGIRYIDLVKRDKKLYLKEQEPPTGYQRHIMYLFAGDYIEAFDKDGVCYLRGTYRSVDTIQKQCFNFKCGNAVDPIRIAVKTKGVIKKYSVDLLGHKGGEIKCSVPLSSIPAND

SEQ ID NO: 8667 - protein, 1081 aa, unidentified
  REGION 1..1081: note = Description of Unknown: Cas Enzyme sequence
MNYVLGLDVGIASVGWAVLELNEEDNPIRIEGLGARIFDKAEVPKTGASLAAPRRMSRGIRRVIRRRRFRLQRVRSYLKRHNILPAEKVDHLYDVPSAIDIYELRKRALTEKVTAEEWARLLIFFAKHRGFKSNRKKASGDADEGEMLKAIAANAELLKNYRTVGEMLCDNEKFRKRKRNRDGAYNFTVSRAMLIEEIHTLFEIQRNLGQKFADEKLEEEYVILFVAQRKFDEGPGENSPYAGNQIEKMIGSCTLEGKKEKRAPKASYAFMAFNLWQKINHLKINRRGSERFLTEEERRRIADLAWKKEKLTYGSLREVLFLDPEDRFVGLRYDLKKEKEEDLEEPVSEAEKMSFSWVKDYHSIRKALDKVEKNRILKLSHEQLDTIATAFSVYKNEETIEKYLEEGGIEKADREALLERLSSFSKFGHLSLKACYKILPFLEKGEVYSRACERAGYDFRKSSLENINDIPNPVVKRSISQTLKVINAIILRYGNPVEVHIELARELAKNFRDRKKMEKGMQENQAKNEKIRQRLMSEFGVLRPKGMDIVKFKLCEEQNGECAYSQKHFDMEKLLRDPSYAEVDHIIPYSRSFDDSYNNKVLVLTKENREKRNRIPMEYLADATERKNRFIHWVKSTIRNSRKRENLLRTDYTETTENEWKRRNLQDTQYISKYLYNYLRHHLVLAKGYTERKRRIIPVNGAVTAYIRKRLGINKIRENGDLHHAVDAVIIACATQGIVNKVSRYSKSRELWDYEVDMETGEVLQKKNENRKDIFPEPWLNFRYELEQKVRVRPLDIPETADITEMEEPFVSHMPNRKIHGPAHKETIRSGRLKEEGYTISKTALTDLKLTEDKEEIKGYYNKESDRLLYEALKKQLQRYSGKAKEAFKEPFHKPKADGTPGPIVNKVKIMEKSTMPVPVNGGKGLASNGNMVRIDVFRVEEKGKKKYYFIPVYVADTVKEELPNRAVLAHKPYEAWKIMKEEDFIFSLYPNDLIFVDAGKEIPFKAALKGSTLDPEKKASRFLMYYKGADIAGGTINGVNHDSTYGIRIGLQRLKGIRKCRIDVLGNISLVGKEKRKTFR

SEQ ID NO: 8668 - protein, 1176 aa, unidentified
  REGION 1..1176: note = Description of Unknown: Cas Enzyme sequence
KGKDMWGIREFEEADSAADRRTHRVDRRRRQRQVTRLGLLKSYFGDAIDKIDPNFFIRMENSKYFLEDKDQKLNSKNGIFDDENYNDADYYAEYPTIFHLRKALLDLENTGAKFDVRLVYLALTNMFKHRGHFLLNTEGDTLSTEQVDAVYQEVLDKLENDYELRIERKPVQQVIDIISNSDIGRKKKHEELQELFGVVKNAKRVNELLKCLCGLSVNAKLIFDEKTEEKVPLCFHDFSYTDKIAELMEQLTEEEYAIIEQLKSIYDYAVLAGTLKGYDYISCARVELYEKHCKDLKLLKMLFRKYKTKEEYDRMFRSNVDGTYSAYVNSLNSTDAIAESNKYRRNMKGRKADDIYSTIKKAFKDITDDEDIKYVMEKIEKEQFLPKQLTGANGVIPNQVHKKEMERMLKNAENYLPFLKDKDESGLTVSERIIQLFTFQIPYYVGPLGGNSKNGWIVRKEEGAVLPWNINEKIDMTATSEAFIGNLIRTCTYIQDEKVMPKASLAYERYCVLNEINNLCIDGERLDTKLKQQIYKDCFMKGKRITKKQLCSYLVAQNAIQSEDQVTGIDKTINNSLSSYGKMYVIFGERLREDAVLAVAEDIIYWGTVFGDSKKMLKERLAKYVEQGIIDENQLKRILGYKFKDWGRFSKTLLTLSGCDKSTGEIMSLGQAMWEYSLNFMELINSDDFTFKEELAKQSTAAMKSLSEFTYEDLQDSYFSIPVKRMIWQTLLVVREIEQVMGYAPKRIFVEMTRTEEEKGDKGRKDSRGNQLLELYKSIKNTENHNWKQELTEANESGKLRSKKLFLYYMQMGRDMYTGEEIDLDRLYDDNLYDIDHIYPRHYVKDDSIMNNLVLVNRQANQHIKKDLYPIPEQIKANLKVQELWSALHKQKLITDEKYARLISNTPFTEKQLGDFIARQLVETGQGTKGVADLLEQLFTDTDIVCAKASNVSDFRRDNGFLKSRLVNDFHHAQDAYLNIVVGNVYYTKFTRNPWNFIRKDYEKDKEKNRYNLAKMFEWNVIRGSETAWIAERKDEKGTIVTVRKMMQKNTPLMTRMNFEQHGGIANATLYSAKKAKPENYLPLKTSDTRMKDVTKYGGFTSATIAYYFIVHHKEGKKENVTIEGLPLYCKDKVEREANGLERYCEEVLGYGEVNILRRKLKIQSLIELNGYRFHL

SEQ ID NO: 8669 - protein, 1064 aa, unidentified
  REGION 1..1064: note = Description of Unknown: Cas Enzyme sequence
MGYILGLDIGVASVGYAIIDENYNVLISGVRLFREGTAEENVARRGFRSSRRGVRRSHHRLERLKELLSNVLGVSGDQSYTNLYEIRVRGLANKLSPDELIAAIIQLAKHRGIFYLSPEDLAAEDGSNRSPADIIRNNENKLKDGIYPCHVQLEKLKTTGKVRGIENKFTHESYRNELIKLLEVQSVFYPELKEITDEILCIYDSKREYYEGPGSYKSPTPYGSYQLDENGNVIKINLIDKMRGTCTYFPNELRAPKWSYSACLFNLLNDLNNLTIQGVKIAEAQKQELISEYVNKGKSVTIPAIAKVCGVKKEDIFGFRIDKSEKPIFTKFEGYNELLKIAKFVNEEATIEGNKQLVDDISEILTKEKSIEVRERKLVDDLKLSTSLAKEIAKSGGFTTYHSLSFKAINLILDDLLRTSKNQMELYTEVGIKPYNHNFSQNNQLCANLSDWIVSPVVKRSINETIKVFNALRKYLKTQNGDDAEFSDVVVELAREKNSQEKKDLIKKIQKANEEKRYKIMELVENRTLTRAEFERISLLLEQDFKCVYSLEPIELADVFKPGLLEVDHIIPLSISLSDAQSNKVLVYHVENQAKGQRSPFQYFSSGKAKIVFERFKEYVTRNSNFSNAKKRNLLYLGNPVEDMKGFIDRNLVDTRYASRETYNLLKSFFDYHNINTKVKVINGSATSYFRKKAYLSKNREETYAHHAQDAMIIAGFANTKLMKFFSKIGAFSESLNNKESIVEIDGNIINSETGEVLEQELFDKSENVSNYIQFLKRIERIEPLYSHKVDRKPNRALYDQQIKATRSFVEDNKEVTYIITKYSDIYNTGIGNAGSKLKKMILESPDKLLMYHHDPKTFEIFLKIVEQYGEESNPFAAYKEDHEPIRKYSKKGNGPIIESVKFREKQLGAHRVNVKQDGHNKSVFLKIKSLRTDVYQDGENYLVLNVPYDMVSFVNGRYIIDQDKYYKSKQVQKIPESATFVTSLYRGDYITYEENGETVECIFKCINNEKTHRIEISYVNRPTDKQVMKAIKTSIKNLTKYNVDVLGNKYKVTDEKLEFDVTI

SEQ ID NO: 8670 - protein, 1380 aa, unidentified
  REGION 1..1380: note = Description of Unknown: Cas Enzyme sequence
MKRILGLDLGTTSIGWALVNEAENNNETSSIVRLGVRVNPLTADEKSNFEKGKAITTNADRQKGHTARINLQRYKLRRQNLYNCLKEYGWFGNNALFEEGKASTFETYKLRAKAAEEEISLHELARVLFMLNKKRGYKSNRKANNKEDGQLFDGMTIAKKLYEEHLTPAEYSLQLLNKGKRFTQGYYWSDLNVELERIWNEQKKYYPEILTDEFKQQLKGKTKVNTNKIFLAKHHIYSADLKGSDKKMQSLKWRVEALRQQVDKEILVYVISDLNGQIANTSGLLGAISDRSKELYFKKQTVGQYLWTSLKENPHISIKNKPFYRQDYLDEFEKIWETQAAFHKQLTPELKQKIRDIIIFYQRPLKSKKGLISVCELEQRKVKTVIDGKEKEITIGPKVAPKSSPVFQEFRIWQNINNLLLINNDTNEKRSLNEEERNLLYQELSIKAKLSKTDALKVLNKNGKQWELNYKEIEGNRTQAILFDCYNRIITLTGHEECNFKKLKASEIRHYVTTIFKSLGFNTDILDFNPLLEKHDLEKQPMYMLWHLLYSYESDNSRTGNEALLRKLETTFGFPEEYATVLCDVVFEDDYSNLSVKAMRNILPYLQAGNDYSQACADAGYNHSRRSLTKDELEEKVYKDKLELLPKNSLRNPVVEKILNQMINVINTIVAEYGKLDEIRIEMARELKSSAAEREKTTRAISQANTENQCIRDILEKDFALSYISRNDIIKYKLYEELEANGFKTLYSGTYIPKEKLFSKDIDVEHIIPKARLFDDSFSNKTLEARNINIAKSNKTAFDFVKGEYGDEGAEVYKKKLDMLLSKDVISKAKYNKLLMSEADIPSEFIARDLRNTQYIAKKAYEILSELVRTVTPTTGEITNRLREDWQLVDVMKELNFEKYQKLGLAEVVEDRDGRKIKRIKDWTKRNDHRHHAMDALTIAFTKPAFIQYLNNLNARSNKSSSIYAIENKELHRDDNKLKFNAPIPINEFRVAAKQHLSSILISIKAKNKVMTQNVNKIKTKQGVVRKIQLTPRGQLHNDNIYGTKKRPIIKKVKIGAALDELTINKISSQAIREALLKRLSEYSGDAKKAFTGKNSLEKNPIYLNIEKTKVVPTSVKTVEWGTYHPIRKAITSDLKLDKVIDKGARDILKARLDTFNGDAKKAFSNLDENPIYLDEAKKITLKTVSVEGVLSAIPLHTLKNQAGEPIIGKDGKPVLGNYVQTSNNHHIAFYYDEDGNLQDKAVSFFEAAERKSQGLPIVDKNYNHDKGWRFLFTMKQNEYFVFPNEATGFIPSEVDLMDEANYSIISPNLYRVQKVSRIEKGTSASRDYWFRHHLETILNDDVRLKNSAFKRIRSLSELKGIVKVRINAIGKIVAIGEYD

SEQ ID NO: 8671 - protein, 1138 aa, unidentified
  REGION 1..1138: note = Description of Unknown: Cas Enzyme sequence
MVASSENVPGIRYRVGIDVGLKSIGFCAVEVDRSDQPVRLLNSMVFIHDAGVDPNENKAAKSRKLTAGVARRTRRLYRTRHQRLVNLDRVLSKEFGWPLPDLTSFKDPREPWHVRAGLLEGYIADDAERKEALSIALRHMARHRGWRNPYAKVETLLQPSEPSDFLEGLNDRISKALRRAFPADATPGQLVDAYLAHPDYVKEPGTPKVRGPEGILAGKLHQSDNAEEIRRICDVQKIPPSERDRLIRVVFEAKSPKGSAKERGLVGYDELPGQGKHVRAEKAHPAFQKFRIVSVLANLRIREGREERALTPDELEGLVDFINQVSLKQEVTWQDLADNLGIERSDLRGTAKASFDGSPVLRNPPTDVTTEKIMACKVKWLKEWWKAANDEQRGYFVDAFSNSGGSEDGTDVNDEVAELLEQATEEDQLEFEKISLPQGRAAYSLDSLRRLTDRMLRDGVDLHTARRLEFNVGDDWKPAVEPIGAPTGNPAVDRVLKQVSRWLHAATERWGEPTAINIEHARDGLGSERVARELMRENEKRRKANASAVADMAQKLNLSGKVRRSDQIRYFALQRQNCQCLYCGAPITFTTAEMDHIVPRADGSSTNDRSNLAAVCRTCNHMKGKIPFAAWASSDKANEGVSLEGALERVKMWERDNGMSPKQFKQLQREVSARLKSRKPDEEFDGRSMESVAWMAVELRTRIEGFYRSRNEEFVPSVGVYRGQLTAEARKASGFESRVNLIGGRGKTRFDRRHHAMDALVIALMNPSVSRTLALRVNMRDAQRLAGVEETWKNFYGKPGEASQRFESWRESMLRGVVLFNIALSENAIPFVENIRLRVGSSVIHDATVHSFCPPKTPDGEQIMTKGFGEQHSLGSALPVELIDRAETPALWTALTRCPDFNPKRGLPENPSRRISVNGTRVGPEDLMNFFGSSAACLKVRGGYVELGSSIHHARIYRIDGKKLAYAMVRVFQVDLMRMKHQDVFTTPLKPSAISMRTAEPKIRQALANGTATQIGWLVEGDELRIDTSKYRGGFIGEVLERYPEATSWRVAGFPMPAKLRIKPLLLSKEGFVDEKQAVQLGIEATSDGDQKIIDSPGWLPAVNVLFGAGAVRVVRRNCLGEERWYPSNSLPVSMMVE

SEQ ID NO: 8672 - protein, 1420 aa, unidentified
  REGION 1..1420: note = Description of Unknown: Cas Enzyme sequence
MANFNKNYSIGLDIGVSSVGYAVVTEDYRVPAFRFKVLGNTEKEKIKKNLIGSTTFVPAQSAQGTRVFRINRRRIERRNNRIMYLRDIFRNEIEKVDKNFYRRLDESFRVLGDKSEDIQIKQPFFGNKELETAYHKKYPTIYHLRKHLADADVNSVVADIREIYLALSHILKYRGHFLTLGDIDPNNINMQNSWIDFIESCQDVFDLEVSDESKTIADIFKSSDNRQEKIKTILYYFPKEFEKKDKSVFKQLLQLLFGLKTKFKDCFELEEEPDLNFSKENYDENLENLLGALEEDFSDVFAKLKILRDTILLSSMLTYTGATHARFSATMVERYEEHRKDLQRFKSFVKQNLSEQDYLDIFGRKTPTGFDVDKETKGYVGYISNKMVLTNPQKQKTIQQNFYDYISGKITGIEGAECFLNKISDGTFLRKLRTTDNGAIPNQIHAYELEKIIERQGRDYPFLLENKDKLLSILTFKIPYYVGPLAKGNNSRFAWIKRTTSQDVLDDNDEDTRNGKIRPWNYHKLINMDETRDAFIINLIGNDIILLNEKVLPKRSLIYEEVMLQNELTRVKYKDKYGKIHFFNSELRQEIINNLFKTNSKRVSSAMLLSYLENFTNLQAVEIVSGIEKGKSLNSTLKTYNDLKTIFSEELLDSEIYQKELEEIIKVITVFDDKKSIKNYLTKYFGHLEFLNEEKINQLSKLRYTGWGRYSGKLLLGIRDEDTGFNLMQFLRNDDENRNLTQLISDTTLSFDSAIKAIQSKSTVEDDVFEEIKNLAGSPAIKRGILNSIKIVDELVQIIGYPPQNIIIEMARENMTTEEGQKKAKTRKSKLESALKNIEDSVLESGKVPHSDEQLQSEKLYLYYLQNGKDMYSLDKTGSPTPLYRDQLDQYEVDHIIPYSFLPIDSIDNKVLTHRENNQRKLNNIPDKETVANMKPFWEKLYNAKLISQTKYQRLTTSERTPDGVLTESMKAGFIERQLVETRQIIKHVARILDNRFSDTKIITLKSQLVTNFRNTFHIAKIRELNDYHHAHDAYLAVVVGQTLLKAYPKLAPELIYGHHAHFNRHEENKATLRKHLYSNIMRFFNNPDSKVSKDIWDCNRDLPIVKDVIYNSQINFVKRTMIKKGAFYNQNPVGKLNKQIAANNRYPLKTKVSSLDTSIYGGYGPMNSALSIIIIAERFNEKKGKIETVKEFHDIFIIDYEKFNNNPFQFLNNVSEEGFLKKNDLNRVLAFYRISKYSLMQKIDGTRMLFESKSNLHKVTQFKLTKTQNELFFHMKRLLTKSNLMDLKSESAIKESQNFIQTHQNEFDNIADRLSNYSQKMLGETKSLQTLINGYNERPIKQIDNNEETIRCYYDNFIKMFSFVKSGAPKDIINFFNDKYTVPRMRPKPDRKMLDATLIHQSITGLYETRIDLSKLGED

SEQ ID NO: 8673 - protein, 1019 aa, unidentified
  REGION 1..1019: note = Description of Unknown: Cas Enzyme sequence
LASADELNEHLVRAVRHMARHRGWVNPWWSLDQLERASQEPSETFEIILARARELFGERVPANPTLGMLGALAANNEVLLRPRAEKKKKTGYVRGAPLLAAQVRQIDQVAELRRICEVQGIEEQYETLRNAIFAHKVAYVPTERVGKDPLAPSKNRTIRASLEFQEFRILDSVANLRVRTDSRAKRELTEGEYDAAVEFLMGYTAKEQPSWADVAEEIGVPGNRLIAPVLEDVQQKTAPFDRSSAAFEKAMSKRTEARQWWESTDDDQLRSLFIAFLVDATNDTEEAAAEAGLPELFMSWPAEEREALSNIEFEKGRVAYSHETLSKLSEYMHEYRVGLHEARKAVFGVDDTWRPPLAKLEEPTGQPTVDRVLTILRRFVLDCERQWGRPRAITVEHARIGLVGPAQRQKILNEQEDNRKNNERIRGKLRKSGVENPSRTEVRRHLVVQDQESQCLYCGAVIRTDTSELDHIVPRAGGGSSRRENLAAVCRYCNAKKNRKLFYEWAGPVKMQETIDRVRQLKAFKDPKKAKMFKNQIRRLKQTEADEPIDERSLASTSYAAVAVRERLEQHFNEGLAPDDKSRVVLDVYAGSVTRESRRAGDIDERILLRGERDKNRFDVRHHAIDAAVMTLLNRSVALTLEQRSQLRRAFYEQGLDKLDRDQLKPEEDWRDFIGLYPASQEKFLEWRKAATVLGDLLAEAIEDDSIAVVSPLRLRPQNGAVHKDTIAAVKKQTLGSAWSADAVKRIVDPEIYLAMKDALGKLKKLPEDSARTLELPDGRCIEADDEVLFFPENAASILTPRGVAEIGGSIHHARLYGWLTKKGELKVGMLRVYGAEFPWLMRESGSRDVLSMPIHPGSQSFRGMQDAVRKVVESGEAVEFAWITQNDELEFDPDDYIAHGGKDELRQFLEFMPECRWRVDGFYDARRLRIRPALLSREQLPSEIQARLDAKNLSTEESVLIKALDNGLFISTSGLLPLGSLKVIRRNNLGFPRWRGNGSLPTSFEVRSSALRALGAEG

SEQ ID NO: 8674 - protein, 1239 aa, unidentified
  REGION 1..1239: note = Description of Unknown: Cas Enzyme sequence
MPNFWSIFTENLQTYLMKTRILGLDTGTNSLGWAVVDRDENNQYTPICRGDLIFTEGVKQEKGIEFSLAAERTSYRASRRHYFRRRLRKVEVLKVLVKHKLCPPLSDEALNRWHTKKEYPLDEDFILWQRTSEADNKNPYHDRHICLHRKLNLKDSQTDRYTLGRALYHLTQRRGFLSNRLDQNEEAEETGKVKSAISELSKEMKEAGCEFLGDYFYLLYRTEGNRVRIRSRYTDREKHYLQEFKEICRVQELDEDLAKALEKTIFFQRPLKSQRQGVGKCTMEKGYLRCAVSHPLYEEYRLLCYLNNIRIKTSSDDRLRPLNAEEREKITPLFYQKSNFDFKKIAKKLAGKTPFGWIRDEEDWPYQFNYRMTQEAPACPTTAQLIKVFGEDWKAALAETYTMNAKQDGTLKTEDEICTDIWNVLYSFSSKEKLKEFGLKKLQLDEAQAKAFSEIRLTRDFASLSLKAIRKILFFLRTGEDYSKAVFLANIPTIVGEEIWNDIERRSRLLYKVEVALRPQEERDAEEHRTIAERIKAAVAAEVPDAPIDLLYHPSMIEAYPDAKRNERFDCYQLGSPKTNAVRNPMAMRSLHMVRKAINHLLRKHIIDEKTEIHIEYARELNDANKRQAIADWQRELSKRHTAYAQNIRQLYKAETGLEIEPTKADILKYQLWEEQQHVCLYTGKKIGIADFLGANPKFDIEHTIPRSRGGDSTQENLTLCESKFNRDIKRDKLPTELANYEEILARIEHWKKQCYALKLKRDGIRTHSGLEKSIKDSRIRRRHLVGLEYGYLKGKYDRFTMKEVPEGFSRRQGAGIGLISKYAGLFLKSLFKDPKNPNRSNVYVVKGAITAEFRKLWGLQQADEAKSRENHTHHCIDAYTIACIGPCEYAALAAYYRSDEEFKYGRRREKPQFEKPWPTFTEDLLKLQEELLIVHQTTDKLGKRDRRKVKTPRGKFLTGGDSARGRLHQETYYGAINYDGNIKYVVRKPLDSLTEKDLDKIVDETVMGIVKGAVEAKGSLKEALADGIYMNKEKGILIKRVRIFTPLAEPLALRSLRDQSRKEHKRQVYVTNKGNYMMGIYEGLVKGKQKREIELVNNIEAAEFFRKRNNQSQGLPLMPEKSAKDFPLKQTLKIGTLVLLYETSPSEIDFSDPKDVAKRLYKVVGMNYHDGKGSAGLISLRYHQEARPAKELCFKKGAYKNGEVFRPAIILRHTQFNALVEGQDFDLDIAGKITLKRP

SEQ ID NO: 8675 - protein, 1249 aa, unidentified
  REGION 1..1249: note = Description of Unknown: Cas Enzyme sequence
FADEINKIDSSFFIRLEESKFFLDDRSENNRQRYTLFNDATFTDKDYYEKYKTIFHLRSDLINSGEKFDVRLVFLAILNLFSHRGHFLNASLKGDGEIQGMDVFYNDLYEACEEFEIDLPQISNIDNFEKILSQKGKSRTKILEELSEELSISKKDKSKYNIIKLISGLEASVVELYNIEDIGDEIKKIKIGFRESDYEKNSLEVKEIIGDNYFELIERAKAVHDMGLLSNIIGNSKYLCEARVEAYENHHKDLLKIKELLKKYDKKAYNDMFRKMTDKNYSAYVGSVNSNIAKERRSVDKRKIEDLYKYIEDTALKNIPDDNKDKIEILEKIKLGEFLKKQLTASNGVIPNQLQSRELRAILKKAESYLPFLKEKGEKNLTISERIIQLFEFQITYYVGPLDKNPKKDKNANSWAVIPSGGRILPWNFEDKVDVKGSRKEFIEKMVRKCTYLSEEHTLPKQSLLYEKFMVLNEINNIKVDGEKISVEAKQKIYNDLFMKGKKVSKKDIKKELISLNIMDKDSVLSGTDTVCNAYLSSIGKFTGVFKEEINKQSIVDMIEDIIFLKTVYSDEKRFVKEEIVEKYGDRLDDVRLKRILGFKFSNWGNLSKSFLELEGADVGTGEVRSIIQSLWETNFNLMELLSSRFTYMDELEKRVKKLEKPLSEWTIEDLDDMYLSSPVKRMICQSMKIVYEIQTVIGYAPKRIFVEMTRSEGEKVRTKSRKDRLKELYNNIKEDSKQWVKELDAKDESYFRSKKMYLYYLQKGRCMYSGEVIELDKLMDDNLYDIDHIYPRSFVKDDSLDNLVLVKKEINNRKQNDPITPQIQASCQGFWKILHEQGFISNEKYSRLTRKTQEFSDEEKLSFINRQIVETGQATKCMAQILQKSMGEDVDVVFSKARLVSEFRHKFDLFKSRLINDFHHANDAYLNIVVGNSYFVKFTRNPANFIKDARKNPDNPAYKYHMDRFFERDVKSKSEVAWIGQSEGNAGTIAIVKKTMSKNSPLITKKVEEGHGPITNETIVGVKEIIFGRKKVEKVDKTPKKPNVEAYRPIKTNDERLCNILRYGGRGSISSSGYCLVEYTKKKKIIRSLEAIPVYLGRKDILREEKLLEYLKNILNNEGKDTVTDIRICLPFIPMKSLVKIEGYLYYLGGKSNDQIQLYNAFQLKMKKEEVEYIRKIEKAVSMSKFDEIDREKNPVLTKEKNINLYEKVQEKIENTVYSKRFSSFEKFLKEAKSKFVEIDLEKQCKVL

SEQ ID NO: 8676 - protein, 1030 aa, unidentified
  REGION 1..1030: note = Description of Unknown: Cas Enzyme sequence
MNVKNQNYILALDLGVASVGWGLVGLDEQEKPSSIIDLGVRLFDKSEDPKTGESLNSARRAYRLQRNAYKSKKMLVKQVKALLVKHNLLQDTILSKNTLSHKTWELRVKALDNKLSNKELASILIHIAKNRGFQTKTTNDDKKAGLVLSSISNNHQLLNAYRSVAELAVKHFQLNDSHIRNKAGNYTHSFARQDIVNEIKLIFKNQRQFGNKNATIELEQAYIELINYQKPSLTGESLLKMVGKCTFEKEQYRAPKASYSAERFILLSSLTGLKILENGEQRTLTQSERELLTQKAYELNKITYAQIRKWLGLSDGAIFNFLRYQKLDKENAETKVFVELKHYHQLRKGFENAGLEKEWAVIANNGQLLDEIAFTLTICKEESEIRQKLAKLNELNDKVIDVLANIRFTQFINLSLVCLNKINPLMEMGKTYSEATSEIYGTYNRKTGTKLNSLLPVIPVSDISNPVVLRTVTQARKVINAVIRKYGQPAYIHIESGRDLGKSYQERQAITRQQAKTAKENEKLKVRLAKEFNVRDTNSNVLKLKLFEQQNGKCLYSGKNIDRNKLFSNGYVEVDHALPYSRTYDDSSNNKVLVLASENQTKRNRTPYEWLNGADNSTQWENFKSLVETSNFSYQKKQILLTKQLSDNEFKARNLSDTRYINAYLSKFIADNLLLVGKDKQKVFTPNGRITSFLRYNWGLTKNRQENARHHALDAIVIACANEYMQKEITQFAKKRECNELAINEYVDIKTGEIKQLNFPEPWAGFSKELMARVYSDDPKAELGDMENIDLNNVKPLFISRMPTRGASGQGHKETIKSVKNAGENRSVKRVDLKSLNLDMLERFVAKDTEKALYKSLKKRLEESKNDPLKAFAEPLKQRGKIVRAIKVWDTQKSGLQVRNGITDNGDTVRIDIYTKDGKNYIIPVYAHHIAKKVTPNAMITNGKTEDEWDKLDDTYQFKFSLFPNDLIKISNKKESFTGYYKGADRSNGGLTLLSHDCVDANKIKRFGPKTAIIEKLEVDVLGNVTGLKA

SEQ ID NO: 8677 - protein, 388 aa, unidentified
  REGION 1..388: note = Description of Unknown: Cas Enzyme sequence
MLRRQAFKFEIMPNGEQTRRINQFCGCSRFVFNRGLDWQNAQDNSVTFSYTKISKLLPQWKKAFPWLEDCHSQVLQQSLKDLDRAFKNFFQKRSNFPKFKKKGVKERIRFPQGCKLEQHNNRLYLPKIGWVRYRNSRNVVGEIKNVTVSKKCGRFYVSIQTEYEVEISQHQGGEIGIDMGIVRFATLSNGEYFEPLNAFKTYKGKLAKLQRQLKNKIKFSKNWQKLQAKIAKLHHKIANCRKDFLHKISTTISKNHAMIYIEDLQVSNMSKSAQGTVEAPGQNVKQKSGLNRAILDQGWAEFRRQLDYKSQWQGGVLVAVPPQNTSRTCPCCGHTDKENRPTQAKFECVECGYRNNADVVGAINILERGWATVQRNPTGGDTAGALVK

SEQ ID NO: 8678 - protein, 1378 aa, unidentified
  REGION 1..1378: note = Description of Unknown: Cas Enzyme sequence
MKRKEWYLGLDISSSSIGWAATDSNYKLLRKNKKRLWGVRLFEEAKSSFERRTFRSERRRLARRKWRINLLEELFIKEVSKKDPNFFLRLKESKYRFEDKSLMNDYILFNDKDYTDKDYYKEYPTIYHLRSSLMTEKNPDIRKIYLAIHSILKNRGHFLLQGQSFSDSNIDSVIKELLELNIVNIEFEVTDEVIYSLKEIALQKKNLSDKNNDVKKLYPKEKQLQEIFKLIFGGKTSLDKIYEMEEYKELDASVKSISFKEKVYEEVRPDYEQILSNYIELLDLAKLVYDNIVLAEIKKEGKTISESKVELYNKHKKDLENLKNLVKADNKLSEDKKKEVYNEIFKVDIDKGTNYVNYAHKSKNGKSCSYEDFKKFLKKELEKLQDSEIKNKILEELDLETFLPLQRTKDNSVVPYQIHKEELVKILDNAAKYHSFLNEKDNSGYSIREKVIQLLEFRIPYYIGPLNTHHNIENGGYSWAIRKEGMKGVAVTPWNFRDIIDESASAEAFINNLTNKCTYLAGEDVLPKNSLLYSEYALLNELNALKYEGDRISVEARDIIVRKLFKEQGKKVTKKTIKELLKTEGFIDGKGEIAGIDNIVKNDLKSYRDFKKILGDKFDKERVENIILWITLYGESRKLIKEKITKVYGDFYTVDEIEKMSRLTYKDWGTLSRKLLTELVSEKLYNEETGECLNIIGAMRQGTILFMELLADKFDYMNQIKSYNKENKDEIMEITPDILENLYASPAVKRSIWQTVRIVEELKSIIGCAPIKIFVETTRRNNAPNKVPILNRNDLVIKYKTIKDQEILELEKELNSTLDFSINKDKLINEEPSKLKATKLYLYYTQLGRCMYTNKKIDLGELFDNNKYDIDHIYPQRKVKDGSFSNIVLVTKASNEVKADVFPLKRKFQTEENKIFWRFLKEKKLITEEKYNRLVRTEEFSDDELTGFIARQLVETSQAIKVSSYILGELNPETTICYSKAENVNSFRQSFGKIKDGDRKSTNIKKLIRVQEINDYHRAKDAYLNIVVGNVYDVKFTRNVCNFIKNKKDARKYSLNTLFYTDVKNANTVAWEVDKTIHIVEKTMNNNNILVTRRTAEQKGALYDATVYKAKIAEKAKEGAYYPLKTTDDKIKNVNKYGGFTKVKIAYYSIFEYTLNDKKGEKKITRILPVPIYIAQNIKDDRTLLEYAQTQLPGRNLELKYRKLCIGNQIKINNFNYYMGGKTNDNFFYDSAVQVVLDKESELYIKELAKYLNWKKENKEGVLWESIIKDKNIQLYNTLVEKMNTGLFIRKTPNKYNELSTVEVREKFNSITEDEQAKVLLEVLNLLTNKKSTSNLNIIGIIASRGVCNFNLSNQSQFSIIEKSVTGVFEKEIEIISE

SEQ ID NO: 8679 - protein, 939 aa, unidentified
  REGION 1..939: note = Description of Unknown: Cas Enzyme sequence
MKYIIGLDCGIASVGWSVVSLENNQIVDFGIRTFSAPEDPKTGELYSKTRQEQLGKMRNIRRKNHRIIRLKRLLKSNELPHNPTHNNVWQIRYKALDNLMTESEFSAILLHMIKNRGPILQRIGEEGAILSSVSNNHELISSGKYRTPAELACLTFKNNIRNRDGNYNHTFSRYDIQDELHLIFQKQREFGNKFATIELEDKVDKLLMQQRKSLSGDDILKMVGFCSLEENEYRSPKHTYSFEKFSLLTTLMNVRILNNKLEQKSLTNEQINKLILLAHKKAITYKTIRKELNLSDKDKFKGLLYSSKNYVENKKLPELQIYRDVAKILDEHYLLPNILDAIGIAFTLYKNEDEITQYLENSVMLSYQTIKELLPKLNYTGFANLSLKAVKKLLPHLENGTNYSTAVKTEYKDINKQNENVKKEFMSSNDILIDTKSKTKIKNQTVIRSLSQIRKVINAIIKKYGTPEMIAIETATELGKSAKQRKEIYKKQEQNRLNNEKAFEELKEQFPKQKSFNQKDILKLKLFKQQNGICLYSGKYIDKSKLLDNNYVEVEHVVPYSRSFDDSQNNKILVLASENQNKKEKTPFEWFGHSEKWNNYVERVSKCYFSLNKKEFLTKQEIDEKEFISRNLNDTRYITSHLVNVIKQHLICNQVVSVKGGFTANLRHKLEIEKTRENKRHHAVDAILVALSGMIFHNKEKYNLLMKNKKEIAKEIQTRVFSNNWIISQMNNHKVTGQAHDETIRSSKFLQDEYSTVRTPLTKIKIKDIERILGYPDREPRFYKQLEEQLIKHNDNPERAFANGFVKGNTVVKKVKLKSVQKSGVIVRKDKNGNKHGIAKNASLIKIKIYRKNDKNYAIPVYAWQINKNIEPNSNDEFLFELFPNDMVSIDGEIMLYKSFNRSNGACNFSKIDDASGINKTMPISKANLKLVKFDVLGI

SEQ ID NO: 8680 - protein, 1378 aa, unidentified
  REGION 1..1378: note = Description of Unknown: Cas Enzyme sequence
MKKTEGTKTSKDTEKARDIKMVKDTKKVKDIRKATEYFIGLDIGTSSVGWAVTDTKYKLIKFNGKKMWGSRLFTEAATAEERRNHRTNRRRLQRRVDRINLLEEIFSEEISKVDPEFFIRLKESKFHLEDKVIDEKNIIFKEKEDGDKKYYEKYPTIYHLRHALIQGCNDIDIRELYMAVHHIIKYRGHFLFKGDISDSGASINDNIIEIIDLMSSVAGMKKLEYNDKLIEEIRNIICNVDKTINDKKKDINKVFSGSNNDYKAYKSIFALAIGAKVKPYDIFLEEEYKDLDDIKGIVFKNTEYEEVCDTYEQVFEDRIRLIDAAKSLYDLIILLSIKPEGKGLSENKVDIYNKHHEDLTLLKEVLKEDMTIYNMVLREDKKDGTNYINYIKKSKYGKGCSREDFYKSLKKALEKLEVNEKIEHILSEIDLERFLPLQRVKENSVIPYQIHRDELKKILANASLKFNFLNHASEGYSNIEKIIKLLEFRIPYYVGPLNNHHPVDNKETKGFSWIVRKEAGRVKPWNFDQLVDKKASAEKFIKNLTNKCTYLVGEDVLPKESLLYSEFCLLNELNNIMYDGKKLSLDAKNDLIEKVYKKEKKKLTKKGIKDFLKQNNYADGKGEVTGIDIDIKSDLKSYRDMVKIFGPDFSHKMAEDIIKWVTIFGESKDILESKIRESYGNMVDDKQLKMVKKLSYKDWGRLSKTFLTEIRSDILIDECTGQGQSIIESMRTRDQILMQLLRNEYDYTKKIEEFNREKQTDTREISYDLLKDLYCSPPVKRSLWQTIGIVEEIKKIMGHEPKKIFVEVTRTNKAEKKRANSRKKRLLELYKDIKDGARNWIDEIEKTEDSKFNSKKLYLYYTQMGKCMYTDNIIDIETLFTDMYDIDHIFPRSKTKDNSFDNLVLVTKESNGRKGDKYPIDPAIQKKKIDLWRCLHEKKLIGDIKFERLTRTFGFTDDELSGFIARQLVETSQSSKAAAEMLNMINKNSEVVYVKAENVSDFRHDNEFIKVREVNDHHHAKDAYLNIVVGNVYNEKFTKNPLNFIKDGGRKYSLNEIFKHPFPKNSGIIWDPKVSMETVKRMMKSNDVRVTKKIIEQKGALYDATIYKASIAKEESYFPLKKGDDRLKDVTKYGGYKSIKPAYFTIVSYDEVGSKKSKHIIRMVPIPIYVSISDNGLLDIEKYTYEYVTSRSKKSIENFKVIYNKLCKNALIEINGFKYYVGGKTDGGFYIYSGSSLILDEENNMLFGKVAKFCNADFKRGSEKFINFENNMKLYNCLIIKRNLPYYKNSKLYKLDKLRKQTTIDNFKNLSLEEQCGVLLKVLNILTNKRYIDNKDLEKIKEKVSHPKTSMILSSYESFKVINQSITGLFENEIDILG

SEQ ID NO: 8681 - protein, 1393 aa, unidentified
  REGION 1..1393: note = Description of Unknown: Cas Enzyme sequence
MKRILGLDLGTTSIGWGLVNEGESVEEESGIIKLGVRNNPLTVDEKSNFEKGKAITTNAERTLKHGMRINLQRYKQRRDNLVACLKEHGIINDDTPLFELGNNTTFQTYRARAKAVSEKISLEDFARVLLMINKKRGYKSNRKAKDAEEGELIDGMDVAKELYNKNLTPGQYLMMLKESGKSYRPAFYRSDLQNELNRIWDKQKEFHPEILTDEMRKEINGLSSTQCSAAFYNKKNITTAKNSGKDSYSTKLKWRNDCLKKEMDIEQVAYVVCSLCGEINGSSQRLAMISDRSKELYFSGKTIGQYLMALLYENPNTSLTNRIFYRQDYIDEFNVIWESQAWYHKELTPELRKKIADNIIFFQRDLKSCKSLISYCEFEHSEKEVDVEGKKKKVTVGLHVCPRSSPLFQTFKIWQVLNNIQVSVVGKKRKAAPKDSSLYLFSEREMGATQRFLEQDEKELLFKELSIKSKLTKTEILKILFDNPERFDLNYKEVEGDCTMSALYSACAEIISQTGNGEYDFNKMRADKVKSLVKEIFSGLGYNTDFLSFNPLLEGKELEQQTSYRLWHLLYSYTGDKSVTGNDALLKKIGELCGLEREYARILANVSFVDDYGSLSAKAMRKILPYMMERAEYSMACQYAGYKHSARSMTKEELEAKQYADHLEIIKRNSLRNPVVEKILNQMVNVVNSLIDAYGKPDEIRIELAREMKQSREERAEQDKNIRKATAEQEKIKKILETEFGIKNVTKNDILRYRLYEELKMNGYKTLYSNTYIPREDLFTNKFDIEHIIPKAKLFDDSFSNKTLEARDVNIEKSNKTAYDFVAEKYDEKWLADYETRVEELLKQKVISKTKRNKLLMREADIPKDFLNRDLTDSQYIAKKAREMLESIVPNVVTTTGAITKRLREDWKLVDVMKELNWEKYNSLGLTETIYDHDNKPIKRIKDWTKRNDNRHHAMDALTIAFTRPAIIQYLNNLNARSDKGGSIYGIEKKYMKRDEHGKLLFIPPIPIEKFREEAKRQLEAILVSTKAKNKVVTKNINKIKTRNGEKKKVQLTPRDQLHNETIYGKIEQYHTEIKKVGGKFTEEVVPRVANKRIREALYARLAEFDYDPKKAFTGKNSLEKNPVWIDEKQSYCVPEDVKLVAMKQVFTIKKAVDSNLKIDKVIDARVRGILKQRLEEYGDDAAKAFSNLEENPIWFNKEKGIAIKRVKISGISNGTAIRVKHDVSGQVILDETGKALENDYVSTSNNHHIAFFTDAEGNLQEHVVSFYEATARAILGYPVIDHYYNKELGWKYSFSIKQNEFFVFPNEAEGFNPCDIDLMDEANAPIISRNLYRVQKFSNRDYYFRHHLETNVEENKALKDVAWKRITCVNNLKGAVKVRINHIGKIVFVGEY

SEQ ID NO: 8682 - protein, 1173 aa, unidentified
  REGION 1..1173: note = Description of Unknown: Cas Enzyme sequence
LARRKRRITLLQQIFDNEMQKVDPHFYLRLSESMLHSCDKNSALELNANILFADRSFTDKSYREKYPTIYHLRSDLFHSSAKQDIRLVYLALHHLIKYRGNFLVEGGVDNVISSFDNQNLEKFIDFIGADESMAKKVKAILLDRSLSRSARKSDIINLLQPSPDNKRAVSEAVGAAIGLKWNANKLFEDDSLEVKEEFSNKNYEEQRDEIAAAIGDDRYELVETLESVYQWTIFSQFIRKDSCLSDIMVEKYDDYRQDLSDLKALFHEFLPQKYKTFFHGDAAEFELYNNHKRNLDDLYKSIKKQLGEVAKDDPRYQRFEKRAELEEFLSRQRIRDNGAIPHQIHQYELEKIIDNQAQYYPFLAQNRDKIISIFTFKLPYYIGPLKTGGNFAWSVKKKDGVIYPWNFDEMIDDEASAEQFINRMRNHCTYLPDEEVLPKNSLLYQEYEVRNELKSVTVNGERLSPDIQNRIVDELFTKELSVTYKKFIKYLYDNQIYNTDSLIISGTAKEKSFASSRKSYIDFMQKVGVSITPKNQQAIEEVIKWITLFEDKKILAKKLQKHSDIFNENQLRTILKLNYSGWGRLSRKLLDGITAHTPYGELTVIETMRSSKDNFMQIIQSNRYEFKKIIDDILSADQRTDIAYDDIKKLAGSPGIKRALWRSVRIIDEIVDTIGYEPKLISIEMARNEDEKVRTKSRYSQLEKMYKELYGKEYTKSDIKSQLADYKDKLDRKKYYLYFLQNGKCAYTGEPLDIENGLRDSEIDHILPRSLTKDDSLDNTVLVLRKENQRKLDDYPISPDIQNHMRPIWISLKNAKLMSQIKLQRLASQKQLSEDRVAGFVNRQLVETRQITKHLARMLTEKYHNSSTEVFTIRAGMSSEYRRIHDLPKCREVNDLHHAKDAYLAAVLAQYVKIRYPKLDKTFIYGEYNKFKSSKQNTTDRGSFILSSMKYDFTNTETGEIIWQSKTARDVIDRTMKYNDCLITKKTEIGDNQFYDQTIYGKNSGATMITRKVNLPVDKYGGYSGRKAAYFMAIRHLKQVRNKDVFVNEIISVPTQIYTLEKTKPGSINEYLRNNYRQAAILLPKIPINQKIEYEGNEQFIVGSKEVANAKQLKLPYDIEYAVAIALKQGIPRITISEEQAKEDDNLRDKRAKQIEKRDKVISGIERFWEVYT

SEQ ID NO: 8683 - protein, 963 aa, unidentified
  REGION 1..963: note = Description of Unknown: Cas Enzyme sequence
GCRTISEYLLKNCRNAAGQVDFRNRSHRGLLRLIRRRYVEEETNKILAQQGRFYQALSAAVQEIIPSIIFAQRFFEDGPGNQNDPTRRYTGFLDKLGMCPFYPTERRGFRNTVLADIYAVTNALSQYRYQGKDGRSGLPSPAAREIVESTLRDGNMNLTMVKAILKKHQVCLFKSATLDETALRNAIKFLRPMKRIAEKAGIAWTSLLGEDPLRMEDPPLLHQIGEVLAKYKTPRYRADELKKLFAGTTVEGNRVFREELAATSFSGASACSYHYMHDAIEAFMAGEIYGDFQARRIKEGNETSAPQRERYAQLPARLLEEDEDIRDNPVVYRAINEARRVVNAIVRRYGAPEYINVEVGRDLGRSFADRERWKKQNDDNQKKRDKAVEAIAGHLHCEADKVKPIQVERYRLYQEQDGKCLYSGEAIDLQEALNPSGAYEIDHIIPYSLILDNTLHNKVLVKWGENQRKGQRTPLMYMAEPQKAAFLERVNGIFNKKSSPWSKRKYEYLLQEALDTPEARQLVDAWKSRNINDMRYITKYVFHLFQRYLQFSEDGKGENAIHVHAIRGAITAKFRKTWLNPKTWGGQKDRKSHLHHAVDAVVLANLTPAYIEIASDNMRLQQIFRRYHQSESAEYTDYMERSVRKMKTYYGFSEEYTRSLLRYHDRVPSFVRRLREEVDIRFNDEDAERFAIQMKEFYGDSANFLVPPHMPLTSHKAERRYRGAIADANPIKVREIDGVPHKISRQSIFAIRKKDLNTLYSYDRLLKDTLHQILDGEKENYTIEKYLKEQGRTVFTLPNGTVVHKVSVVKEAVSNFHKKQISAENYTVLVDLKYYCVEIYQDIKGTNRCRGIRYIDLVKKGKKLYLKEKEPPAGYEKHIMYLFAGDYIEAFDAKGLCYLQGTYCSVAGIQDQRFYFKCGNAVDSIKIVVKTKGVIKKYSVDLLGHKGGEIRCSVPLSFIPAND

SEQ ID NO: 8684 - protein, 1516 aa, unidentified
  REGION 1..1516: note = Description of Unknown: Cas Enzyme sequence
MKNILGLDLGTNSIGWAVVGSVTDAAEKEILAGIKGCGSRIIPMDASQLSDFAKGNTVSQTADRRSKRTARRMNERFILRRERLHRVLNLMGFLPEHYAASLDRYGKFIDADDHKIAWRTNSDGRQEFVYRQAFNEMYEEFKSRNPEFLKNGGKIPYDWTIYYLRKKALYSPITKEELSWILLNANQKRGYNQLMGMDEQQEQEDRSKSVEYLSSTIVEVTDSGDKKGKATWWNCKLDNGMVYKRPSEVKPDWEGKTKEFIITTDLDKDGKPKLNKYGEIQRSFRMPGENDWTLIKTRTEDQVNKSGEFVGEYIFNALLKEPTQKIRGKLVRTIDREFYRAELKAILGKQVGFIKELTDRDLYRQCIEELYPSNDGYRNSIASRDFIYLLADDIILYQRPLKTKKSLIDNCPYESHIYTDKETGEVKTAPVKCIAKSQPLYQEFRLWQFVQNLRIYDNFSGEDETSFVIPTEAKRVEVFKYLNDISSTNQESFFKEFLGVKKPKGKDSKLPYVWNYVEGKDYPCNETRGPILSRLKKSGIPSSFLTRDIENDLWLILYSSESRKELEEALRKFAGKHDLAETFVENFKKFPAFEKDYGAYSAKAIKKLLPLMRMGEFWSETAISDDVKANIENIINGNVSASIPQKVRDQLSSYKSISDFKGLPLYLACYVVYGRHSEASDSQLWTSPEDIDAYLNNFKQHSLHNPIVEQVVTETLRTVRDIWRCFGKIDEIHIEMGRDLKSPADKRRQYQMRALENENTNMRIRALLMEFTNPDFKIDYVRPYSPSQQDLLRIYEETVLNSGEELPDYVVDVLRNLGNGKTEQPTHAEILKYKLWLDQKYRSPYTGQPIPLAKLFTPAYEIEHVIPQARYFDDSYNNKVICESEVNKLKSNMLGHEFIDKHGGEAVSLNMGGTVRILTKDKYEDLVKKIYGNERMRIKFKNLMLDDIPEDFINRQLNDSRYISRLMLGLLSNIVRKEGETEATSRNVIATNGSITDRLKVDWGIKDTWNKILLPRFRRMNEITGTNEYTTINRNGHEIPNVPDYMSKGFIIKRIDHRHHAMDAIVIACASRNIVNYLNNSSACKGAKISRYDLQHLLCNKVLQGDGNYSWVIKTPWTGFQNDVYNALNNIIVSFKQNLRVINKTTNYYQHYEEGKKIIAKQMKGDSWAVRKSMHRDTVFREVNLRMIRQENLKSAIEHLDYIVNRDLKEKLKEFLREGISLAKIKNYFEQEKDTWSEVNLKKIDVYYFTQEDKNPETGLPKHRFFSTRKPIDMSYTEEKIKTQITDTAIQKILLAHLAENGNDPKVAFSPDGIDRMNDNIVRLNNGRMHQPIFKVPYFEEGQKFSVGKVGAKAKKFVEADKGTNIFFAIYENEAEDEETGEIKKVRSFADIPLNVAIDREKQGLAPAPENGDGMKPIMVLSPGDLVYVPTEEEIKDGKLGPSLDKNRIYKMVSSGQGKCYFIPQSVASVIKDKVEFESGNKSQKTIDGKTSIKEVCYPVKVDRLGHIISINGDMI

SEQ ID NO: 8685 - protein, 1335 aa, unidentified
  REGION 1..1335: note = Description of Unknown: Cas Enzyme sequence
MKKVKYSQVDAYDFSADIGTSSIGWCVTDEQGNLLSYKNRHMWGSRLFETGNTAETRRAFRSTRRRLARRVQRIQWLQSLLSPLVLKDDPDFFVRMKYSYWTKADTEAKVKKSSLLVRDLFDDHTYCAQLYQKRFPTIYHLRKALVTENKAFDPKLIYLALHNIIKHRGNFLYDTQHISIKNGLDLVEPVNNFFAIYPNEEGEIIEPGKKFAEILESKNYRADIVKQLAQETKEFFGDEDKDAGKIIANAMVGYKADFGKLFHLGQSEKFSLDNDDAIEKLLDGLTEEQQSQLMALEKVYSAYTLKQILRGDSVTTISDAYINRYEAHKQDLKDLKYLYRSYLDEATYHKMFYDASRKLATYAAYRINDSGKSNRENLYKQVKEDLGKIQATSEDQQLINNCLRRIDEGVFLLKPCNNENGVIPNQLHVEELQAILENQSPFYPELKEVADKIVSIATYRIPYYVGPLSSAARKGDFGWAVRKEEGPVTPWNFDQKIDKEQSAEQFIARMRNTCQYLYGQETLPKHSMLYEYYCVLNELNAITVDGDKLSKQEKEDALHTLFSSGKSVTQKRFRDWLVKEEGRQIDITVPVQGFQSDSGFASTLSSFHAFENILGKSVNKFAEQIEEIIKWITLFQDKTILKKKITDAYGTLFSCTQIEQMCRLNYSGWGKLSAKLLNGITNADGHTVMQELLDKPYPFMKVLYDPAIGFISQINDFNKKQIGAIDPNSYESIFSEITASPSVKKSVWQCLLLLKEITKIMGKAPSHVYLETTKEEGEKKRKDSRFSKLQKLYSDLKQDSSFQEVIQQLNKNKDTYKKDMPLRVFLYFTQNGKCMYSGKPLDIEKLDTYQVDHILPQAYIKNNSISNLALVYPEQNQRKRDDMLLDPEIVHRQRPFWDMLKNKKLISLEKYRALTREYVDETEEKGFIQRQIVETSQAVSIMLSIVPKVYPNCNVLGVRAGLSSDIRKDLQLFKIRAVNDYHHAQDAYLACMVGRFLGGPLHQAERDGSLWYAFRKEISEQSRILEGESSADRRKHEDKQGFIVSMFQKSSLKGWEGQLACQMIRAAFKLQDYYVTRKTEPQTGAFYNQMLGKKGLASANIKHDRPQEFYGGYTGEQAAYFMVISFQKGKKRILRLVNMPIRIAELEKTQPGAKQKYLRSQYKDPVILRDNICKYQLVKYQEDNGKTSEYYIVSDKEVINARQLRLPQEDIFTLAYWKTKSEIDKENLYLHLVQKMHLYPAFENIASKLEGHIKDFAKLHDEEKRKCIEHMFVIMQANSNRIENFNDLTSDEAKTWGDIPGSRIHKILMIPSTLFVDQSVSGLFETHQRIRGEDK

SEQ ID NO: 8686 - protein, 1261 aa, unidentified
  REGION 1..1261: note = Description of Unknown: Cas Enzyme sequence
MKTLGLDIGTNSIGWGIVDEAACKIEDCGVYIFPEGVKKEKGNESSKAAERTGFRLARRLKFRRKLRKYKTLKVLIENKMCPLTTEELEKWRRQKIYPTSRDFLNWYRTDEVKNWEPYFLRKKCVEQKAEPYEIGRALYHLAQRRGFLSNRKETTKASEGEVSKSIGELSSLIGDRTLGQYFYELKQSGEKVRGKYTSRKEHYEKEFNRICEVQSFSEELKNDLYRAIFFQRKLKSQKFLVGKCTFERNKPRSPISHFEFEEFRMLSFINSIKIAKNPSEDEKNDFEPLTEEEKELIKPLFFRISKPSFQFADIEKKLKGKNEFWKFNYRKETNVSGCPVSAGLKNIFGDDSSNESWKVKKIGQYDMCDIWHVLFDFDDDEKLLEFAKEKLFLSDEMAKKFCAIKIQQGYANLSLKAIRKINPFLRKGYIYSTAVFLANIPTMIGKNAFLQNEEEIENSVKNIIGTLKDKNNIIVLANRCLESAFKDKDNDFRFEEWDKSVVENSAQDLFGKKKWNEYDEAERKNIISQVSEKAEDNLKIAVGKNPNDYKYQLLRTDDLILDYLLQKGFAVKGKLYHPSDTDYNFETPVQADDGKTYLASPRSQSVKNPVVMRALHQLRKLVNYLIKTGKIDCSTKINVELANEVNDKNQRKALEEFARANEKNNADAKRKIEELCVEAGFNIVPTDSDIKKFRLWQEQNETCPYTGKHISFTDLFGPLPKFDFEHTIPRSLSYDDSLENLTLCDSEFNRNIKKQKLPSELPNFEEINKRFQKFYEDKIDNCLRIIELNTKRGGSYEDPAAKDSRIVKKHKAEYGLDYYKGKLRRFSATEVTSGFKHSQLNDTKIITKFSLSYLKGVFGYVQPVKGSMTDTFKRQWGLMERDEVKDRSSHIHHTVDALTIACINRGKFNLLSEAIKNSSDGKHLKFPKPWETFDTDVLNAVQYMIPKYFEDENSLRQSKKIMRNRDGKPVLKNGKPVFVQGATARGSLHKDTFYGCIKTDSEKNGKSEMIFVQRIPVSTLDEKSAEKIIDKGIKETFKKNLSDGIQTLQDIQTSGILLPFKKDGRDVFVKRVRIKAQPTSPIILKEHHNVISKNPKDYKQNYYVVNDENYLLAIYRGKDEKGKDVSAHELRNLLNAVKSRQNKTELYPDFKEKKGINLKLYKILKIGKIVILQNDIQEDVFALPKEKLWKRLYRIAGLATSGDSVRIKLVHIISAKPWEYMKGEKDLNAGLECLRYESSNFKGLIEGQDFDVSPIGEIIRK

SEQ ID NO: 8687 - protein, 1090 aa, unidentified
  REGION 1..1090: note = Description of Unknown: Cas Enzyme sequence
MGYKFAFDLGTTSIGWAVVEIDDNKNVKNLIDMGVRIFSDGREPDSSKTFCADRREKRSARRRHDRILQRKHKLLSILKDNGMDFEIDNRSPYKLRANSVNEKIDKSDLGRILFHICQRRGFKSNRKDLKKDSGGKLKSAITRLSDKLNGNTLGQYLYERLNNKGKARFTSDEEIKKSSKDSDFTYPTREMYEYEFNKIWDVQSKYYPELNNVLKDKIYKAIFDQRPLAPQERGKCAFEKDEYRIFKGSPLFQEFRVLQTVNNIRSYIDEKHQKVEISKAQRDKLKNVLLTTFEGVNKDGKLTSSKIKSIMGLDKNSIIDLKTRVKKSKKEDLAIYSNTTAFLMSKPERFGQIWFELQEKQQTEIIDKLLSNDTDEEIKNFLYKNYNLPDDQIDSILMAPIEESVGSLSAKAIEKIIPYLRDDLIYSEACERAGYNHYDITDGRVLSKLPYYGEVLPESCIKNKKDNKNTSTIEEEQKYGHISNISVHIALNQLRLVVNSLIDKYGKPDMVAIETARELAAGEKERRRIEREQKDNYNKNEEIKEKLKTDFNIISPSKDDIQKYKLWEELSDNPLKRRCPYTLRMIGENELFSNQIEIEHILPFSKTGDDSMANKTLSYRSANQYKGNRSPYEAFHDQDNWDQIFENSLTLPKNKQWRFREDAMGKCKTLENRALNDTRHMTRISVRYLQILFEKDKKKGCVYGIPGKLTSIMREIWNLNYFKNKDDESTYRGNHIHHAIDAFVIACIGRFNLQLLADNADFIEKESSGYKDREEWIRKLILCRGRNFKPYADFNIKEFKDRTENVTISYKPNIKDPKTLNSTIGSLHEDSAYNLLDFEKDDKGNYTNNTKAIFVKCKNKKSIDFLRYIPIFKNKSDKKAYYKSYENWYINKDRYKGNERKQLLNILREKAKQAYKWFVGGANFCFDIYQINPNDKNKKEAGKWKSEVMSNYIATLNKGVPMWKKKYPTARRVMRLRQNDMVKAEFNINDIHDNLKSSYLKTDENGNFMNKFKNNQDTIEVILKVKKMTQSNNRIYFRPDFITRDENGTKSWEVKSLDNFIKHKIRKVYVSPIGEVFDNGFDYKWMKIDK

SEQ ID NO: 8688 - protein, 1037 aa, unidentified
  REGION 1..1037: note = Description of Unknown: Cas Enzyme sequence
MCKTNDKKAVIEETASQEEFYKYLKKVLSDKTAAESDPEYKTVLTEVELGTFLPKQTDKKNSNIPYQLRRAELEKLLETACKHFPFLNKEDERGLSVKEKIVLLLTFKVPYYIGPINDTHKKRFPDRCWVVKKENTKKEKITPWNFYDHIDKEKTAEAFITVRTNKCTYLIGEDVLPRYSLLYSEYAVLNELNNLKISVNGTEIFTPELKRHIYEGVFKKKKKVSQAAIRNFLITEGICKKDDRVVLSGVDEVCTSSLTSYLDLKKIIGDKIDEYSVQKIVEDVIRLLTVYDEGDGRKLAGAKIRKEYPKAFTDEQLKQIMRLHFSGWGRLSRKLLESVTAEVPGFPEKINIITALRETNLNLMELFSKQYEFAAEIEKINGGFEDGRKNTFSYKHIVHDLFLSPSVKRTLWQMLRIVHEIAEVTGRPPKKIFIEMARGAEAEHGRTQSRKAIVQKLYENCKKDAGNWLKADELEKISKHIQEQDNFKLRSDKLYLYYTQLGRCMYTSESINIGELFNAHLYDIDHIFPQSKIKDDSLTNKVLVKKIANQEKTDVYPLSFDTQQKQTPFWQYLQANGFISLEKLTRLTRTAELSEKELGSFIARQLVETRQATKVAGQVLKKLFPDTEIVYVKARNVSDFRDKFELIKCREINDMHHAHDAYLNIVVGNVYHTQFTSNPWNFIKENREGYNFKHLFEREVKRNNKVAWTPGITISRVKSVLKKNTPIYTRHSYCKKGGLFDQTVMKKGKGQFPLKAEGALHRIGDYGGYNKVAAAYYTLVEYTEKGKGNPIRSLETIPLYLLSRSKKDKKVIADYLSKQLPCPYKIIVPRIKVNALLKVNGFPCHITGKTGDMFLLRSAVQFCCNHNDILFFKRILKCNAVRALYEKQKKEFKASDDYTLRMYVKDELRNEKHKTDIGEKDFETSLRNKTVEMYDGLTSRYETSIYRLRPNSAVLDTLKKGRDKFRTLSVEEQLQMLEEVLKLFRTVNENCNFSLIGGKPTAGKTTMGKKLSNLNSCILLSQSVTGIFEKRIDLLKI

SEQ ID NO: 8689 - protein, 1010 aa, unidentified
  REGION 1..1010: note = Description of Unknown: Cas Enzyme sequence
MRGKMRYRLGLDLGTTSIGWAMIRLDASGSPCAVIRAGVRIFSDGRNPKSGASLAVDRRLARSMRRRRDRLLKRKARMMRMLVEHGFFPRSAEERKELERINPYFLRAKALDQPLTPAEFARAIFHLNQRRGFKSNRKTDKKESTGSALKDAIKGVRSALDAGGVRTVGEFLYQRMLRGEPVRARYRESRTQNAEGKTRILKSYDLYVDRAMVEAEFDALWAAQTRFDPLLYNAKAYTDIKDTLLFQRPLKPVKPGRCTLLPDEERAPLALPSVQRFRILQEVNNLRVTSADLTDRVLTKAERDMVVEALESNAKRTFVQLRRLLQLPASTVFNLEDEKRPELKGNATSASLRKEGLFGESWDALTLNQQDEIVERLITEESEAKLIEWIKLGFGFSEDKAEMIANAGMPEGFGNLSRKALTRILPHLASDVITYDKAVQLAGFEHHSQLSGAASGEVLDALPYYGRVLQRHVGFGTGDPKDPEEKQFGRIANPTVHIGLNQTRLIINTLIKKYGHPAEVIVELARDLKQSKAQRDEEQKRQAENQRRNARHRETIAAILGIATHQVRRDDLQKVVLWEELHRDPLERRCPYSGEMISIQQLLSASVEIEHILPFSQTLDDSLNNKTVSLRSANRIKGNQTPYDAFGKNNVQGFDYAAILLRAAAMPKGKSYRFAPDGMQRWLKEDEGFLARALNDTRYLSRIAREYVSLVCPDKTRVIPGQLTAMLRAKFGLNAVLGHEGEKNREDHRHHAVDACVVAVTDQGLLQRFASASASARSRQLDRLVEDMPLPWASFREHVTRAVHAIKVSYKPDHSFEGAMHNDTAYGLLHGGQVRHRVLIDGKRTRLVETMRVIPMHKSSNLNRHGFTPDGRPLAYKGYKGDSNYCMDIFEDAKGKWVGKVVSTFEAYQLAKVMGAEAVMTGSGSEGNGKAIARIRINDTLKLFDGNSHILVRVTKLSASGTVSLIPLHEANVDARVRRNDLSYIYKTAGSLQKASAKPVTVDCIGNVSD

SEQ ID NO: 8690 - protein, 1534 aa, unidentified
  REGION 1..1534: note = Description of Unknown: Cas Enzyme sequence
MKNILGLDLGTNSIGWAMIEGKVEEGQNSLTPVQIKGAGSRIIPMTQDVLTNFAKGKATSQTKDRTKFRGTRRLRERQLLRRDRLHRILDLMGYLPAHYAEQIDRYGHILDEKEPKLAWFQDETKAWCFLFQDSFNEMLADFAKNQPNLVAGGKKIPYDWTIYYLRKKALTQPISNFELAWLLLHFNQKRGYYQLRGKDDMPEESENKKVEYLVAEVVHVEEDKNESSKKDEIWYNVHLDNGMIYPRKSKQPLDSWVGKKKEFIVTTTIQKDGTSKPSFSAPKEDDWGLMKIRTEKNIDASKKTVGAYIYDTLLDNPDQKIIGKLVKVVERKYYKDELKQILEKQREFHKELLDKKLCEQCYENLYSHNPDHRKSMLALSEKRGEGYFTTLFIDDILFYQRPLKSKKSLISDCQYEYHTYRKDGKEVRAYQKCIAKSHPLFQEFRLLQFLKNLRIIRREDWEYGTPEGELFPRNQYRTDIDITNEVLNTEEKWEQLYNYLNQKKEIKMKDLLSWPVLKLGKNPEKLYRWNYVEDKTYPGNETHAQIISYLVKAGIASNALTEEDEYLLWEILYSVNAKDELEKALESFAKKHGFDGTFVDVFKKSPAFPSEYGSYSAKAIKKLLPLMRFGNKWNEDNICTSTKERIEKLITGEFDEKLSDKIREKIGNELGNSHKDIKDFKFMPLWLACYIVYGRHSEAQDVNKWESPEDIDLFLKQFKQYSLRNPIVEQVVLETLRTVRDIWRYYGSIDEIHLEMGRDLKNPADKRKAMTERNIKNEQDNYRIKALLTVLANELNYENARDFSPSQQEILRIFEETAIESYKATEGKGDLPEHIKLIIEKFKVIDEKKRPTTSDVKRYALWLEQKYQSPYTGQPIQLSRLFTSDYEIEHVIPQSRYFDDSFSNKVICEAAVNKLKSNMLGLEFIKKFHGQKVEIGNGKFVTILSEDDYKKLVDEKYKSPNLKTKRNKLLMDDIPDGFIERQMNDSRYISKLVKGLLSNIVRTTDSEGNLEPEAVSKNLITTNGAITDMLKRAWGVNDVWNKIILPRFQRMNKIDPEHTYTAISAQGHEIPSMPAVYQYGFNKKRIDHRHHAMDAIVIACANRDIVNYLNNDSARDGGKRRYDLMHKLCNKKKDSDGYERMPRLPWSGFCDDVYNTLEGIIVSFKQNLRVLNKATNKFVHYNEEGKKIVDCQKGVNWAVRKSMHKDTVFGLVSLRKEKTVKLKEALSRLDRVTDKDLRDKLKELVAKHFTENQIKVHFEEHNDVWKDVDTKKIPIYYYTEEEGNEHYYATRGMKDLVSDFDKVKTLDEAKKKIENITDIGIQKILWNHIARCENNVEYAFSPEGIDDMNSHIVELNDGKPHKPIYKVRKYVKGEYKFAIGKRGNKKAKYVESDKGTNLFFAIYKGQEADDFNFVTIPFNEVLRRQQQHLSISDETDENGRNLQCILSPNDLVLLKDNSTNTKRIFKVVSVANYQCHFIPNNVSCPIVENVEYTPKNKFEKDDVSGLMIKAHCVPIKVDRLGHIVSIDNKPVDHD

SEQ ID NO: 8691 - protein, 1242 aa, unidentified
  REGION 1..1242: note = Description of Unknown: Cas Enzyme sequence
MKRILGLDLGTNSIGWAVVKVDENEKPVSIENMGSRIVPLTPDDANEFTKGNAISKNQSRTIKRTTRKGYDRYQLRREYLTAELRKLKMLPDERLIKLPIMELWELRGKAASKGNKLTLSEIGRVLYHINQKRGYKHAKSDESADTKQKAYVAEVNARYAMIKERNQTIGQFFAEKLKENEIETSKGKFYTYRIKEQVFPRKAYEAEFDQIIECQKEFYPDILTNEEINRLRNEIIFYQRRLKSCKHLVSFCDFEKREYINKVGKVVYGGPKVAPKSSPLFQLCKIWEEVNNLTLRNRKNDELFITIEQRQAMVDFLDTHEKLTLSDMYSILGISKQDGWWGGKAIGRGLQGNTTKIALKKALGDFVNADTLLQFNLKQTDSNLVDEVTGEILQVIDPKLEKEPLYDLWHTIYSISDKEELANALKKKYNIHDEDIINRLYAIDFVKSGFGNKSTKAMRRILPYLQQGLKYSDACEYAGFRHSDSLTKAENEARQLLEKLPPVQKNALHQPIVEKILNQMINVVNALMIEYGQFASIRVELARELKQSKDERNTTFLQNEAMQRLNESIATRLSSEGIKPTKRTIEKYKFIFPTKGCFDKRTGKFITKNFENLSTVNRCIYCGQPFSLSAALNGDGYEIEHILPRDLICDNSQSNKVLSCRKCNSIKSNKTAFDFMRSQGEHAFETYLERVELWYKDGIISPSKRERLLLSHEDYLERKKKDKATDIDKKYWENFVSRQAGETQYISREAIRILKQCCRYVNATSGSITATLRHLWGYDEILHQLNFERYKQAGLTKIVTWESNHGKNKHSKEQIVDWSKRIDHRHHAIDALVVACTQQGFIQRINTLNADETKDLMKKQIESAGIKFEEKKVLLDKYLTSLIPFKTQFVADAVNKILVSFKAGKKTATIGKRIEYKDGKKHVVQEGIIIPRGALHEEGVYGAILIDGKKEIVKKYKLGKGAQGFVFTGKETYVEKVNKKTGEIQIEDKIKNVLDSIVDGNIRNKVLQRLNQGFEEGQDYRNNVKKALDNLNNLDENPIFADKNNTIPIRTVRCRTGLSAVVPIKKNERGEAIGYVKPGNNHHIAIYRDKEGKLKEHAVTFWNAVERKKYGIPVVIENPLEVWDSIRDKQLPETFLEKLPDVNWTFEMSLQQNEMFILGLEDDAFEDAMRNKNYALISKYLYRVQSISESDYWFRLHLETQNDKTASAKLAKKYYRTKSIKGFYSLNPHKVYISVIGKIKEL

SEQ ID NO: 8692 - protein, 943 aa, unidentified
  REGION 1..943: note = Description of Unknown: Cas Enzyme sequence
  MOD_RES 930..933: note = Any amino acid
EEHYKKEFYAICQRQNLSDDQISLLEKALYFQRPLKSQRQSVGKCTFEPKKPRVADSHPAFELFRMLSFVNNIKVKGPHDVELRPLSQEEYEKAKPMFFRKSKPQFDFEDIAKAIAGKGKYQYIKEVGDKEYKFNYRMTQGVTGCPTIASLMSVFGDDYVSAIAERYTLSSGKTPSQMVNDVWNVLYSFSDKDKVKQWGKEKLQLDDDEAEKFSKIKLTHSFASLSLSAVNKILPWLEQGLIYSHAVLMAKVPDIVGEEVWKNRGESIAKELLSLIANFNPKDVTMQGTLDLCIKDILKDMCELEPGVAEKLYHPSMIETYPDAKKNAQGIYQLGSPRTNAVRNPMAMRSLHQLRNVINTLLRDGTIDSQTEVHIEYARELNDANKRKAIAQWNKDRENLRKKYAEDIRTLYKQECGKDIEPTDDDIVKFQLWEEQNHICLYTGEAIGIAEFVGPNPSYDIEHTVPRSVGGDSTLENMTLCSSKFNREVKKTKLPTQLSNYDAIMSRLEEWRTKIEKLRKDVDHVKTHSGMDKAVKDRLIQKRHLLKLELDYWVGKYKRFQMEEVPEGFARRQGAGIGLVGKYAGLYLKSLFHKAEDRSKSNVRVVKGTTTAEYRKMWGIQDEYEKKSRDNHVHHCIDAITIACIEPGEYNATARYYQQLEEYERNKANKPSFPKPWSTFTEDIKAIAQEMLVVHSTPDNMPKHARKYVQTSNGKKLALGDSARGSLHNDTYYGAIERDGEIRYVVRKELRSIKETDIENIVDDIVREKVKQAIAEKGFKKAMEEDIFMNEEKGIKIKKVRCYVPSVTNPLHIRTHRDESQKEYKRQYHVTLDGNYCMAIYEGEMNGKMKRTYEIVNMIDAASYFKKSADLTKRYPIAPENKNGLKYRCTVRTGTQIILLQSDKEELNLADKDDLARRFYYVAVMQKDGXXXXAVSIRLSCFG

SEQ ID NO: 8693 - protein, 903 aa, unidentified
  REGION 1..903: note = Description of Unknown: Cas Enzyme sequence
DALKKEYEDYKAEVQEKAVKSAKEKVFTGLLTDMKVSDKGRAMILKYMGTSSIELDKDGNRKSDQPKLRSPQGDDWGLRKIKTEQDIEQSGLTIGAYIYQSLLHHHDRKIIGGHVQTVDRKLYLSELRSILDQQKKYIPELNDHELYLRCLEELYPNNEAYRNSIANRDFTYLLADDILFYQRPLKSKRSLIDNCPFETRHDKPIKCIAKSHPLFQEFRIWQFISNLHIFESYNDVTPTFLPDHEAYANLFDFLSSIKSIDQKGLFRYLKIPKNDAPKYHWNYVQDKDYPVGETRAILLEGLRKANIPNTFLTPEREEHLWHILYSVDDPTQYRTALHTFAKHQGWDDRLTDSFAQAFDRLTVYKEKEYGAYSAKAISRLLPLMRRGKYWNPSAIDKDTLSRIEHIITGESDPTLTPFVRDKFAHINDIAQCQGLGTWQACYLVYNRHSEAIDTAKWNKPEDIDIFLNQFRHNSLNNPVVEQVVTECLRVVRDIWRQVGHPDEIHIELGRELKKTKAERERLTKIITEGENTNQRIRLLLLELLNPDFQVDDVRPQSPSQQEKLKIYEEGVFQSGIEIPDDIQDIQKRFTSPKNKPTHAEVIRYKLWLDQKYISPYTGKPIPLSKLFTTAYQIEHIIPQSRWFDDSYSNKVICESEVNQLKDRELGHEFIVHHAGEEVPLNLGGTVKIFTADQYEKHIKTTFASNPKKMRNLMLDEIPEDFTSRQMNDSRYISRLMMQLLSNIVRTEDEEGNVENAATSKNVIACNGAVTDRLKHDWGLDDMWNRIILPRFERLNIITDTSDYTDTTPNGHTIPSVPVDLRPCFNKKRIDHRHHAMDAIVIACTTRNHVNLLSNEAAKSNKRYDLQHTLRQTEYYQDPQGNKHERFTLFYKPWPSFTQDAYQA

SEQ ID NO: 8694 - protein, 1489 aa, unidentified
  REGION 1..1489: note = Description of Unknown: Cas Enzyme sequence
MAKVLGLDLGSNSIGWAVVDNERHCIESAGSRIIPMDAGRLGDFEKGNSVSFTKERTQYRGARRLRERYLLRRERLLRVLRIMGFLPEHFASQLSRYGKLPEDKEPKLAWREGKDGKPDFIFKSSFEEMVEDFRQAGSDNKIPYDWTIYYLRQKALTHPISKEELAWVLMQFNQKRGYYQLRGKADEGAADAESKNEIRSYHELTVTSVAKTEEHDKKGLTRYDITLENGWIYRRAFSVKPDWEGKTRGFIATFKLDKDGNPKEETPWLSSPSDDDWGLRKIKTENDIHESGLTIGAYIYQSLLHHPDRKIIGDFVQTIDRELYKKELRQILETQKQFIPELNDEQLYANCIEELYPSNDAYRTSIAKRDFTYLLVEDILFYQRPLKSKLSLIDDCPFEKRNNKPVKCVAKSHPIYQEYRLWQFLSNLHILLDDADITPNLLPDGDAYADLYDYLSTIKEIDQSAMLRYFKIGKKEMPRYRWKYVPDRKYPAGETRATLLGGLSKAGIDKGFLSPERELQLWHILYSVDDQQQYRKALRTFAHKQGWDDSQTDRFAKAFDRLTVYKERDYGAYSAKAIGKLLPLMRRGRYWNPQDIDCQTQLRINHIITGEEDDTLTSSVREKFEGLESIEQCQGLAPWQACYLVYNRHSEAIDAQRWTKPEDIDNYLGQFRHNSLNNPVVEQVVTESLRVVRDIWKKTGHIDEIHIELGRELKKTQSERQSLSQSILEGETTNQRIRLLLTELMNPEMEVENVRPQSPSQQEILRIYEEGAMQKADEIPDYIKDIQKRFSDAKKQPTPAEVKKYRIWLDQRYISPYTGRPIPLAKLFTPAYEIEHIIPQSRWFDDSMSNKVICEAEVNKLKGRELGHEFIVHHHGESVSLSLGGEVKILEVEAYEKLIKNNITNSKKRQKLMMDDIPDDFTSRQLNDSRYISRLMMHLLSNIVRSSDEDGNLEDSATSKNVIVCNGSITDRLKRDWGIGDVWNRIILPRFVRMNQITETTDYTATTDSGHLIPQVPLHMRQGFNKKRIDHRHHAMDAIIIACATRNHVNLLNNENAKSQQRYDLQHTLRTKETYVDGQGNTRTRPGDFIKPWPTFTEDVYHVLESIIVSFKQNQRIINKTSNHYTVIRNGKHTGCPQTKGDSWAIRKPLHKETVFGEVNLQLKKKINLKDAIKNPNTIVNRELKLKIKEQLDKGYSAKQIIDYYDKRKDVWPEAADGKVEVYYYTKDTKDRYFATRKSLIDLFKDTATQPAATKIIESITDSGIRSILYAHLANEGNNPVEAFSADGLERMNRNIRNLNGGHDHLPIKKIRVYEQANKYSVGAHGQKATKYVEAAKGTNLFFVIYTDKKGSRGYATVPLNVIIDLQKQYEKQWRAHLAERLQQDDLALMPSDSTLLYILSPGDLVYVPSEEERKNGIISLDLKRVYKCVSATGKQCLFIPCPVASLIQTGKEFEAQNKIERALTKEMIKEVCIPIQIDRLGNIIRIGQ

SEQ ID NO: 8695 - protein, 1300 aa, unidentified
  REGION 1..1300: note = Description of Unknown: Cas Enzyme sequence
MKRILGLDLGTNSIGWAIVNAIETTRKDNTTYLEPVSISCAGSRIIPMSADVLGDFDKGNSISQTAERTRLRMMRRLLERNHLRRERLLRVLKVMDFLPKHYNDTVSRYGKFKDGSEPKLPWYKSVRGKMEFLFQDSFNEMLAEFKQHQPQLVAGGKKIPYDWTIYYLRKKALTQRITKEELAWILLQFNQKRGYYQLRGEEEEEKANETIEIISAKILSVEKKEKDKKYEKYWYEMHLDNGMTYRATFYNDVTSWEGETKDFVLKRTTLKDGTPKNELSFLPTPEEIDLMDAQRKAKMYAKIKLRTEKEIENSHKTVGSYIYDSLLQNPNQKIIGKLVRTVERKFYKDELKIILEVQNELIPELKDKALYQRCIEELYTANEAHRRSLSKPDYVNLFLNDILFYQRPLKSKKSLIDDCPYEYHVSKDGEQHPIKCIAKSNPYFQEFRLWQFVQNLRIYQRERTVTDGQLDLFTNTTTNKLQTDVDVTSEILKTEEDYVKLFNWLNDRSSIKQDTLLSSYFKVKKEKGKDKYPYRWNYVEDKDYPCNETRATILSGLAKCNISADFLTHENEMSLWHILYSIEDKAELYKALKKFAHRHQLEKNFPEVLSKTKPFKKDYGSYSEKAIKKLLPLMRMGNYWNEEQIDAKTRERIEKIINGEYDENIKNRVREKAISLTDIQHFRGLPVWLACYIVYDRHSEAKEVEKWEKPEDIDYYLTNFKQHSLRNPIVEQVITETLRTVRDIWKQEGQIDEIHVELGREMKNPADKRRRMTERIQQNENTNLRIKAMLMVFMNPDMGIENVRPHSPSQQDILRIYEENALDNLSKDDKDYDFVSKISKVAQPSKSDIIRYKCWLEQKYQSPYTGKMIPLSKLFTPAYEIEHVIPQSRYFDDSFSNKVICEAEVNKLKDRQLGFEFIKNHAGEIVQLSQGGTVTIMSVEAYEKFVKDYYSSNRTKMKKLLMDDIPDGFIERQMNDSRYISKVVKGLLSNIVREKQEGDGEYQSSGEYEQEAISKNVISCTGSITDRLKKDWGMNDVWNHIVLPRFKRLNEVTGRDCFTTYNREGHEIPNMPLELQKGFSKKRIDHRHHAMDAIVIACATRDHVNLLNNEAAHYKHNANRYQLQRKLRRFATITINGKEREIAQEFLKPWDTFTTDAWQVLSNIIVSFKQNLRIINKTTNRYQHFEDGGKKGFEKQHKGESWAVRKSMHKDTVFGEVNLRLKKTVSLNEAIKKPENIVNKEFKKKVIELLDHGRDAKFIKKYIDDNKDVWSDINPAKIEIYYFSKDEKKRNGEPKERYFA

SEQ ID NO: 8696 - protein, 976 aa, unidentified
  REGION 1..976: note = Description of Unknown: Cas Enzyme sequence
MKQRILGIDTGTNSLGWAVVEKESDGKYSLIDKGSLIFQEGVKIEKGIESSRAAERTSHRALRKQYFRRRLRKIQILKVLVKYHLCPYLSDADLNLWHTKKIYPKSDDFMLWQRTNDNENKNPYYYRHLCLTEELDLNHESDRFILGRALYHLAQRRGFLSNRLDASEDNDDNGAVKGGIKSLSEEMEAAHCEYLGEYFYMLYKEEGNKTRIRTRYTDREEHYKKQHIHQELFVELEKSLYFQRPLKSQRTGVGKCTFEPSKPRAAESHPFYEEFRMLSFLNNIKVKGPYDVELRPLNAEERNKALPMFYRKTKVNFDFEDIAKVIAGKNKYQNIKDDGDKPYKFNYRMTQDVKGCPTTAALIAIFGDNYKEAIAESYTLSVKKNGELKTPDEMLCDVWNVLYSFSSESKLEEFAQEKLQLNGEDAKKFSKIRLSKGFASISLKAISNILPFLHEGIIYSHAVSLAKIPSIVGKDVWESDTQTQNELKSFVANFNPKDRGLQGTLENCLKDILLERYQLKAGAVDALYHPSMIDVYQDARKNKNGIYQLGSPRTDAIRNPMAIRSLTQLRKVVNKLLQQGIIDHTTEVHIEYARELNDANQRQAIAAWNRDQQKKREEAKQAIMEYRRTTAEPSNDDITKFLLWEEQKHICLYTGDQIGLEDFLGLNPLYDIEHTIPQSVGGDSSMMNLTLCQNKFNRDIKKAKIPTQLSNHEDILERISEWKETIEDLTKQIDRQRTNSSMPKATKDGRIQRRNRLKIDRDYWKGKYERFLMKEVPEGFALRQGAGNGLISKYAGLYLKSLFHKEDDRNKGNVRTIKGLTTAEFRRMWGIQDEYEKKSRDNHIHHCIDAIVIACIGANEYNRMAQYYHQEEEFHRGNGEKPKFEKPWATFTEDLKRLDQELLVVHSTPDNMPKQTRRKSVKAPNGNYYPSKGDTARGALHRDSYYGAIERNGEIVFVKRKAITDFKSINDLESTV

SEQ ID NO: 8697 - protein, 1211 aa, unidentified
  REGION 1..1211: note = Description of Unknown: Cas Enzyme sequence
MKKVLGIDLGSSSIGWAFIEESATNSEIKRLGVRVIPYTGDEKDQFSKGQTISVNKDRTLKRTARKTLHRYKLRRKNLLSFLAKYNMLPDNEKLLKIEPLQLYGIRAKGATEQIGLSDIGRILYHLNQKRGYKSSRTSSIEEDNGKKLSDYLAEMKDRKDQLEKEHITIGQYFYAQLKENRHFRVKQNVFPRECYINEFNQIWDTQQKYYPEVLTDENKVIVRDQIIFYQRRLKSQKGLVGECQFEKHHKVTPKSSPLFQVEKIWESIHTISITNKYKEVYTLSQGQRHQIFDYLDQHEKLTQTELFKILNIKRTDGWFANEMIRKSGLQGNLTKTTLLKKLKDLNIPSDELTRFELKITETEKPDKETGELLQRLIISPDFEKEPLYQIWHLLYSIDDPDLLINTLEKRYGVTSEQSAQLSNIDFKKSGFGNKSARAIRKILPYLINGSDYTQSCEATGYNHSNSLTKEENEQRTLHSSLELYKKNTLRQPVVEKILNQLINVVNAILKDEHLGRPDEIRVELARELRQSQEERNKTYSNNIKADKDHKAIRERLEKEYPGLPVSRKVIEKFKLFEQQDGTCIYSGNKMELSKVLRGEGIDIDHIIPQSRLFDDSFQNKVLAYRKENEAKKDLTGYDYMKSKSDSEFQQYTERVSRMFENGNITRSKQTKLLMSVTEIPDDFINRQMNETRFISREATKLLKGIARNVYCTSGMVTDFLRNQWGYNEVLKQLNWLKYEAAGKIQDGKIEGWSKRDDHRHHAIDALVVACTKQSIIQRLNRLNSSQTREEMLDAIKGKVNEGWQAKKSLLEQHVQLLQPFSTQQIKEAADQILISLKPGKKVATRGFNKADGKRPLTPRGQLHKEQIYGKIQRYSKKIPLNGRFTEVNKIADPQIQSLIRKRLNEFNGDPKKSFKGLDKNPIWTDETKTVPVTEVTIWEEHFVYKYPLGISFKEKDIEFIIDKRIQSLVRQRFEEKAGEKDHPLKNLENEPIWLDKKNGIAVKSVRCFTGLSNLVPLHVTENGLTKSKREASINSKAVDFVSTRNNHHVAIYKDSFGKYYEKVISLWETIERKKLGIPVIIQDPRNCWNYILEKGIDDQDILKNVPAPDDIFILSLQQNEMFVFNLSKEKLETEINNGNNNIISPNLYRVQKITNSDYNFRHHLESRLEQKEETSIFSQLEKFIRFKSINAFLTKSPIKIQMDTLGRIKII

SEQ ID NO: 8698 - protein, 1418 aa, unidentified
  REGION 1..1418: note = Description of Unknown: Cas Enzyme sequence
MKKILGLDLGTNSIGWALITHDFIAKEGEILGMGSRILPMGQDVISDFNKGVLQSEAATRTNYRGVRRLREREILRRDRLIKVLKEMNWLKTDFEPNHLVPFAYQFEDGKFLFKFMAAYNEMKAWLELKNPTIPFVPFDWTIYYLRVKALKDQLSREELCWVIMQFNQKRGYFQLRGDEELKSTGASKYFVSDKVKIIHDTGEKSAGKMVLYIELEEGIAGTFRSTYVPDWVGKSVDFLVTETTNKKGETKVELTTPSDTDWTFRKKRIEAELSNKHQTVAQKVMEAFARDARVKIRGKEVHTIDRKFYKEELEKILATQAQYYPELTNGEMSKKLAAVLYKNNLKQREFTSNQSVIWILLNDILYYQRPLKSKKSLITNCKYETRSYTENGVQKIKKVKAAPKSHPVFQEYKIWSLVHNLRISESKHQLSDGSIESNKDVSYEVLTNDNKAKIFELMDFASEVSADQILKSIGLKATTHAINYEEGKKIKGNETKAIIYRVLKNVSGEERAKSIANDQDKLEKIWHMLYSLGKKEDLAKALSIQNLELSREEQEVLADLDPFKKDYGSLSVKAMRKLLSVMRTGSYWKLDNIPVENVEILGHITDATENESISMQSRKQLAHLNGIEDCQGLPEYLAGYAIYGRHSEAENVIIYKNPEDIKLLKQHSLRNPIVEKVINETLLVVRDIWKKYGKPDEIHIETGRELKLPNEKRKELTQRRNQNEATNQRARAILKELSLQDGNINPFSLGHIEQYKLYEEATLNEKDIDDEIIKISRKSDPSVSEIKKYILWQEQRYKSPYTGQIIPLSKLFTPAYQVEHIIPKSLYYDDSINNKVICEAEVNKDKDNELGYNYMLKSNGKTIPGLGGKSIKLLTAEQYVTLVTDLYGPRSSKVKNLLAKEVPDGFIARQLNDTRYISKKIMSLLDPVVREEGETAMISKNIIPTIGAINASLRQEWGLSQVWKDLMTPRFQRMQEKDPAGMWYYKDAEGKVHLRQDNVDIKRLDHRHHAIDALVAACVTRNHVNYLNALNNEIIRRDLEGKLLDLTKTRRERSFLKPWPNFTAEAKKMTECIIASFKSDNKIITKAQNYYQKYAQINGEWKKRWVKQENHPDYWAVRQSLHKETVSGQVTLREYTSVTLSNLMGEPDKIANPEIRKKVKAAHALFNGDIKKIRQHFKDNPIILDGIEVVKTEKITFNNQYVATRKPITQDLTLKQLDQITDSGLRKELKAHLEKMDNKPELAFSPEGMEIFNKDRKMPVYKVRIYEDKGKKFPVGENGNKGLKFVEANKGTNLVFIIYKNMETGEHIITENSSLGYNDVVALTKDSLPLTEEKAGHQTIILSPNDIVSVKDDNDNTRYFKAVSFSGKDAFFVPVNFSLSIKDKAEYSVLNKFEREESGIMIKRHCEKLNVSRLGELQ

SEQ ID NO: 8699 - protein, 1675 aa, unidentified
  REGION 1..1675: note = Description of Unknown: Cas Enzyme sequence
MKKILGLDLGTNSIGWALVEIDNVKKTVRILGLGSRILTMDAAEVAKFESGAKTESGATKRTMLRTPRKLNERYLLRRDRLHCVLNLLNALPEHYKLSIEFESKKGKRSGKFKKGTEEKLAYYKDECGKYQFLFKEAYHQMENDFRKKYPEMFYQKRNGAQAKIPYDWTLYYLRHKAVTDKDFELTKEQLAWITLSFNQKRGYEKVIGQDEKVKKEGELSDSFVGKVKSINRIENQDAYEIILVDNNNDAIELFKYKEESKIPITEIGDLKEVEIVSKYDDEGTIDSKKTEYIINEVREFSIVDVRNTGRKIKENFVFEIELETGWIKEQQSKFTPKWKDTTRNFIIKTKYDENGNRILKGSDKGININIPKEEDWTLMKLKTETSLTSFNAKNETKGVASFVYFNILQNPKQKIKADLITVIERDYYREELDAIYKNQEQFHPELKNRNLYEQAIQLLYPNNNSHQNTIKELDFNHLLKEDILLYQRDLKSKKSLIADCVYEKENYERTDVKTGKKYKNPLKAIHKANPLYQEFKLWQFIKRLKIIRKEEVVNDEIKINLDVTGKLLSNDVKEELFAFLNDKESVTEKDILGFLNMKHKNLDVNSDGYKWNFTSEKEPCNPTRYNFILRTKRIKGFDYKTFLSSENEYNLWHFFYSVKKRDEFNKGLNNVISRLLEKSGLSKEFHSELVKNFSSFSGYTNEYGTYSEKAIKKMLPFLRLGKFWNEKEVEAILSKANQEVKQKVLDKEEINGELKDYQGLWVSSACYLVFGRYSEVGEVQFWHSPYDIENYLKNEFRQHSLNNPVVEKVLVETLHVVKDIWKYYGEEIGTDEAGRVIYNKLFDRIHIELGREMKKNNKQKEKDDKNNKENRKANERIVELLRELKKTNSSLEEKSPFQQEKLRILEEGLLSSIEYDKDGTQYELSNGKISKKEIKDITSKELSKISRSDFERYKLWLDQRYQSPYTGRFIKLSELFDRKKYEIEHVFPQERITLNAIYNKVICETEINKEKKAYTGYGFIANAKSKEVFCAAHNSKVAILSIDSYEELVKNNFTGKKRDILLSKDIPEEFTNSQLNNSQYISKMAMKLLSNIVREKGEDTFRSKNVLATNGTITSILKRHWQLNDAWNEIISPRFKRLNVLTNSNLFGDYREINGHKVFINTVPEEANKNFDPKRIDHRHHALDALIIALTSENHVQYLNNISSQEENDEEKLKTRKGIKFQLTNSRKGFNNEWEWYFLPPAQIKTKDGIDEIEYQFSEMKSNVFKEIAQNALENTVASFKQKNRVIRQRWNKYLKPIDGKLKVETQGALKEVVNYNVRKRLHEDTFYGKVKLQNNKNTSRNVITITLKKALEEQFDLYDLSIAKEIEGLKQLENNSIQEIIETLTTKYPKVKVYEKYVATRFGNELESFATITPDKIIKAIQSITDTGIQRILENHLEKYKEVIDGKTKFDSENAFSSDGVKELNKNITELNSGKFHHSIYKVRTSDALGTKFSVSEVGQKSTKYVVTAAGSNAFCGFYQNGNDRKYYIPTLRESVESLKQGLEPCPASHPEDHNYKLIFVLNPSDLVYVPTEEEIENPNLVDFSRMKKEQMNRIYKFTDGSGTTLNFVPVNTANILFNMSNKEQEKAKINLPIQNELGLGSPQSKNQNSLEGIQIKSLCWKLKFDRLGNITKY

SEQ ID NO: 8700 - protein, 1034 aa, unidentified
  REGION 1..1034: note = Description of Unknown: Cas Enzyme sequence
MSGFIVGLDLGVASIGSCVVLNKRIDSAAVSIFPEGVNVSPLGKESSRNTTRREKRQIRRQLFRKNKRRKLLTEILQSLGWFPEHILDVNELMQLDPYPLRAKGVSNALTREEFGRVLFHLSKRRGFKSSRKSGGTEEGVLFEGDKTGTKKGIAELQEEMHKNGFKTVGQYLAALNPHEVRIRNRYLLRKDLVDEYELLWETQLKFHPEWKKPDNFEEIIQKHFNVKYHDKLLESDLPTFLRDYVIYYQRKLKSQKGLVSPCKLEPKAKRAPASCLLFQEFRILQKLHDIRLIGKGKTNESLTQKQVENAFEWLNISPDKNFKQLKKELKISDDELNFKETDKIKGNRTAYELSKVFGKLVWNSFSEKEQFNRWRILYDAEDDGWLTNYGKQKWGLTAAETDKLLKVSLEKDYAELSQTAMKKLVPLMKSGGLDYTDAAKKAGYEHGLNTKKETLSDILGEPQNLRNPIVQQGLFELRKTVNAIIKDYGVKPDKIRIEFARELKMPKKKREGLSNANKNREKERDEIRNILFDEFNIKEPSRTDILKYQLWLETNRQCLYTGEFIGKEELFSPNIEIEHIEPLSRSLNDSQSNKTLSIKRFNNLKGNDLPFEMMEKGKITTSEYDEIVERAKILVRKGGYNKFKRFLKKSIDADMVSRQLNDTAWLAVEARKYLQTICPNVEVIAGQATAELRHLWGLNRILNRHGLDIKNRDDHRHHAVDAVVVACTDIGMIQQLSKLHEKGRKATNERFPPPWEGFRNDVKDAVNQILIKHKVRSRVRGQLHDETIYGPVKGFQQQQLTNERGLPVFKSRKELTALSEAMIDKIGDKKIKEIVKNRIREHGVEPTGKFKIPANAFSEPLYLPTKKGGKIPIRRVRIHDVATSKIKLKTGKYVDSGNNHHIVIFSKPDGKKDGIVVSLFEVAQRKRNKQPIYQTDVGEENTFLMTLQINELVLLNGGHFEAAEINWNNVSNEELSPYLYRVQKLTSGGVTFRHHLTSVLKNDSNVEIGRAIKTPNSFNGIKVTVNELGEIRPA

SEQ ID NO: 8701 - protein, 1536 aa, unidentified
  REGION 1..1536: note = Description of Unknown: Cas Enzyme sequence
MKKILGLDLGTNSIGWALINADENGMLQSIEGMGSRIIPMDAATLSDFDKGNSKSQTADRTKFRGTRRIRERHLLRRERLHRVLQVLGFLPEHYEQCIDFENRLGQFISETEPKLVWKINDEGKFDFIFKSSFDEMVKEFKLTQPQLFENGKIIPYDWTIYFLRKKALQFKIEKEELAWLLLNFNQKRGYYQLRGEDEEANPNKLVEFHELKVVEVTADELQKGKNEIWYSVILENGWVYRRSSKNPLFDWKDKTKEFIVTVDLNEDGSVKTDKEGKEKRSFRAPSEDDWTLLKKKTESDIDKSHKSVGAYIYDTLLQNPSQKINGKLVRTIERKFYKDELKAILVKQKEFHEELNNNNLFNKCILELYPNNDAHRNTLSTADFTKFFIDDIIFYQRPLKSKKSLISNCKFEFRIFKDLKTGIMQKEPLKCISKSHPLYQELRLWKFVKDLKIYEREKTIDGKFYTDYNVTDEFIKSEDDLIALFDWLNERKEIKQETLFLSYFKVKKKKGDEKLPFRWNYVEDKDYPCNETRSQIINRLTKSNVPISFLSKENELALWHILYSVNDKIEIEKALKTFAKKYSLDQEFVDTFKRFPPFKNEYGSYSEKAIKKLLPLLRMGKYWDKSEIHKETKARIDKIISGELDENIKIRVREKAIKLTEINSFRGLPEWLASYIVYDRHSEAGDSTKWNSPQDVDNYLKNEFKQYSLRNPIVEQVITETLRVVKDIWKQFGEFSEIHIELGREMKNPADKRAKMTSQISENENTNLRIKALLAELVNDIDVENVRPYSPSQQEILKIYEDGVLNSGIEIPEDISKIVKLSQPSKSELIRYKLWLEQKYRSPYTGEMIPLSKLFTTAYEIEHIIPQSRYFDDSFSNKVICESVINKDKDNALGYEYIKDNSGKKVELNHSKDVTLFKLAEYEEFVKQHYGKNRSKMKKLLMADIPEAFIERQLNDTRYISKVVKSLLSNIVREHDEQEAISKNVIPCSGGVTNILKQDWGLNDCWNRIVTPRFERMNELTNSKSFGHWENKDGKNVFQTEMPLELQKGFVKKRIDHRHHAMDALVIACATRSHVNYLNNESAKANAKESRFDLKHKLCFKTKLDEKGNYKWQFNKPWEKFTEDAQTSLGNVVVSFKQNLRVINKSINKFESFKNENGELRLDKNGKPVKGERKQIKGDNWSIRKSLHKDTVAGQVNLRFKKQVTLSVAIDQWEMLLDKNLKTKIKQLINEGLDKKKIQKYFADLDYQWNGIDITKPEVYYFSNGKEILVASRVSLDTTFNSAMIKCVTDTGIQKILLNHLVKFSEEKDGKTIEHPELAFSPEGIDEMNKNVLELNSGKPHHPIIKVRTFKPKGNKFNVGNIGNKKQKFVEAAKGTNLFFAIYSDDKGNRSYETIQLNIVIERQKQGLTAAPLKDEKGSDLLFVLSPNDLVYMISVEDQLGSLKIDYKHLTKEQLDRIYRFTDSSETRANFIPNRVASLIFNCKKEEQKRLNISYPIQNEYGLGSPKSKNERSIDGLMGKEFCFKLTVDRLGNITL

SEQ ID NO: 8702 - protein, 1275 aa, unidentified
  REGION 1..1275: note = Description of Unknown: Cas Enzyme sequence
DWLGKIKKFIVTTELNDDGSIKLDKEGNEKRSFRAPSDDDWTLLKKKTETDILKTEKTVGTYIYDTLLQNPSQKINGQLVSTIERHFYKDELKLIFAKQQEFHSELQDKNLLVRCVDELYRYNAEHGSILKSSDFSKLFINDIIFYQRPLKSKKSLISNCKYEYRKFIDKNGIVKKNPIKCVPKSHPLHQELRLWKFVKDLKIYEREKYIDGKLIADYNVTDDFIKNEDDIVALFEWLNERKEIKQDTLLSSYYKVKKQRGEEKLPYRWNYVEDKEYPCNETHSMIQNRLHKLSDYSDISFSVQQEKDLWHILYSVTDKHEIEKALGTFARKNNLSDEFVELFKKCPPFKSEYGSYSEKALKKLLPLMRMGKYWSYDAIDNQTRLRIDKLLTGEFDEKIKIRVREKAIYLSEITHFKALPEWLTSYVVYDRHSEASDFVKWNTYHDLDNYIEEFKQHSLRNPIVEQVITETLRTVRDIWKKHGDFSEIHVELGREMKNPANKRKEMAQRNSDNENTNLRIKALLAELANDGDFENVRPYSPYQQEILKVYEDGVIKSGIDLPDDIYKIAKASQPTKAELTRYKLWLEQKYRSPYTGEVIPLSRLFTPDYQIEHVIPQSRFFDDSFSNKVICEAVVNARPYKDNQLGYQFISKNEGRIVSELSTSKKTVKIFTIDEYEAFVKQHYAVNNFKKKKLLMEDIPETFVERQLNDTRYISKVILGLLSNIVRLENEEELTSKRVIPTNGSITTSLKHDWGLNDVWNRIVTPRFERMNKLTNSNVFGQWENKEGKRVFQTQMPLELQKGFNKKRIDHRHHAMDALTIACATRSHVNYLNNQSAKASATESRNDLKNKLCYKSKLDAKGRYTWQFYKPWDTFTEDAQLALESIVVSLKQNLRVINKSVNYFVSYKDENGKLNADKNGNPIKATRKQVKGDNWAIRKPLHKETIAGIVNLRFKKQVSLLVAIEDWENMVDKNLKTKIKQLINDGLDKKKIQKFFAEIDYKWQGMNVSKPEVYYFSNEKDVLVASRVNLDTSFNVKTISSITDTGIQRVLLNHLAKYDELKDGNSIEHPEIAFTPEGIDEMNKNIMELNNGKAHHPIIKVRTFETKGNKFSVGITGNKQSKYVEAAKGTNLFFAIYVNDKNERSYDTVPLNVVVERLKQGLKEVPEVNEKGDKLLFFLSPNDLVYIPTTEEQESHNLVEYENLKKVQLNSVYKMVSSTGTTCFFVRHDIAVSIVNKVEFSALNKTEKSIFGIMIKQVCWKLQVDRLGQILNVIR

SEQ ID NO: 8703 - protein, 1075 aa, unidentified
  REGION 1..1075: note = Description of Unknown: Cas Enzyme sequence
LNQKRGYKSLRGTEDPEASPIEGVEENAGVKKVKKTDWQERFDSLEDALEHRGLMPGEYFFEQLKADPLYRVKEKICGRNRYQDEFDRIWEKQNEYYPDVLTDENRRYLRNEVIFYQRPLKSAKHLVSDCDFESFWAKDKTGTWTEMHPKVAPKSSPLFQFCKVWESVNTISITDRMGKDVAISLEQKQAIVEDLECNPKLSATALLKKLNLKTRDHIPNQLIKEKGIQGNLTRCILLQRFEQAGLDPGHWLNLPLQLETYVNTTRPDPDTGEVIPRQRFSSDVEHSPYYRLWHLLYSSQDNDSLVINLQKMLGCTEEQARIISAVDFTKGGFGNKSSKAMRHILPYLIQGEVYSEACKSAGYNHSNSIPKEQNLQRELLDKMEGVRQNSLRNPVVEKILNQLVHIVNQVMASFGRPDEIRVELARELKQNKDERGRAFKEINKKESEKDNLRKTLMEEPEFRALGRTRVSARNLEKYRLWLEFDKQSPYEINKTVGIAELFREYEIEHIIPKSLLFDDSFANKTICHRNHNSGTNAKNQMTAHDFMKRREGGQHYEDYTKFVADAYNGRRISKTKWQRLLTTAENIPAGFIDRQLRETQYIAKKAREMLHSVCYEVTSSTGSVTDYLKQHWGWSEALLNLNWNRFPEERRREETDPHGKVNRQIKDWTKRADQRHHALDALTVACTKPSYIKQLNDLNQKVQGSKEESKYSILKKEVIQSERPFSPAQVQEALENCLVSYKPGQRVATRNTNKIRKGKKIIHRHLELTPRGAFHEESVYGLRQTPDHGPEPKAVIRWNISKLDKPKQFNQIVDRRVRNLLIDAFIRAGGVLERIPKKGEGPDNMDFAMARFLEMGGIVVTSKLNAQQEAANKKAMETIQKTEFTLRDHTRGLDVPLRRVRMVFNNNKLIPLHASENGQTFAMARANSTEDAKKVDYVNLKNNHHFALYQDADGKIQECIVTFWEAFQRQKNGLPIVIKNTAETLDKVLQETTGYPETLWESLPKADWQYLLSGQQNEMFVFDMSRDEILTAIQNKQFKKISPNLFRLRKISEGINWFNHHLESEPRESLEDKKF

SEQ ID NO: 8704 - protein, 1639 aa, unidentified
  REGION 1..1639: note = Description of Unknown: Cas Enzyme sequence
MLKRVLGLDLGTNSIGWALVQQNSEEKQGNIIAAGSRILPMSQDILGKFDSGQSISQTAERTRLRGIRRLRERQLLRRERLHRVLNILGFLPKHYADQIDFKNHFGKFIPEAEPKLAWILNDETTKADFLFKRSFQEMVEDFAKHQPQLTENKKKIPYDWTIYFLRKKALTNKIEKEELAWLLLNFNQKRGYYQLRGEEDDETPNQVVEFYSLKVIDVVDSGDRKGRDEIWYNVHLENGWIYRRTSRIFLDWVGKIKDFIVTTDLNDDGTVKKDKEGKEKRSFRAPAEDDWTLLKKKTEADVEKSYKTVGTFIYDTLLQNPAQKIKGKLVRVIERKFYKSELEAILKKQKDFHNELIDETLYRACLEELYENNDAHRNSICQKDFTHLFLNDIIFFQRPLKTKKSLISDCKFESRPMKDKDGKLIKDENGKQVLKPLRCISKSHPLFQEFRLLQFIQNIKLYQKEKKIDGKLETDVNVTGEFLKSAKDWINLLEWMNERKEIDQKAFLKYPRFSLKRNAEKYRWNYVEDKSYPCNETRALIISRLNKLKKIPENFLTKEIEEALWHILYSVEDKNDIVKALKTFADKHDLQEDFVEQFKKFPPFKKEYGSYSAKAIKKFLPLMRFEIYWSEESIHSQTKNRIEKILNGEYDETIRDRVRDKSINLTEINQFQGLPVWLVSYIVYDRHSEDGEVLNWETPADIEHYLKDVFKQHSLRNPIVEQVITETLRVVKDIWQYYGKGETNFFDEIHIELGREMKNPADRRKQMTNQITENENTNLRIKALLAELLNDSDCENVRPYSPMQQEILKIYEEGALNIANEIPEEIIKISKQAQPTQSELLRYKLWLQQKYRSPYTGEVIPLNKLFTRAYDIEHIIPQSRFFDDSFSNKIICEVEVNTDKDNSTAYEYIKNNRGKKIDLSHGKTVTLFTIEAYEDFVKGNYEKSRNKMKKLLMEEIPEAFIQRQMNDSRYISKIVKNLMSNIVREIGEQEAISKNVIASNGLITSALRQDWGLNDIWNEIITPRFERLNEITKSKSFGDWTNKDGKRIFQTQVPLELQKGFSKKRIDHRHHALDAIVIACATRNHINYLNNDNANGKDKTKPTRFDLRNKLRRLEDVQIERTENGQKVKKIIKVAKEFYKPWSSFTQNVKEILSNIVVSFKQNLRVINKTVNHYQVLKKDGQGKSVKVLLTQTKGDNWAIRKSMHKDTVSGLVQLKFQKTISLSAALDNWEMIVAKDFKAEIKRLVALKYDKEKLVKYFKEKDNKWGYTDVSRVEIHYWDVNEKGEPNNVASRVKIDDSFSSNNIKSITDTGIQKIMLNHLKKYDEDKNGKISEHPELAFSPDGVDKMNKTIQELNDGKSHKPINKVRTFELKGNKFNIGQNGNKAYKYTEAAKGTNLFFGIYLDENGKRSYATVPLNIVIERKKQGLSVIPENNESGHKLLFHLSPNELVYVPTEEERANPDSIDCTNLNQKQKERIYKFIDGSGTTANFIPSTIADLIFNPKKGEEKSRLSFPIQNELGLGSPQSKNQKSFDDVMIKNVCVKLKVDRLGNLSRAPQNSKYTSEKNDIVKEPDTVYETAGLKKFFSFDEMENDQLKYFASLEPIALLQNLKQMVLAVFGYKTEPSINTMPRIINFTEV

SEQ ID NO: 8705 - protein, 1515 aa, unidentified
  REGION 1..1515: note = Description of Unknown: Cas Enzyme sequence
MKKILGLDLGTNSIGWALIEQDNLKRLGKVIDAGCRILPMSQDILGKFDSGQSISQTAERTGFRGIRRLRERHLLRRERLHRVLNILGFLPEHYSVQIDFDKHCGQFLAESEPKLPYVFNKETKRSEFIFQKSFGEMLQDFAQYQPRLVDDGKKVPYDWTIYYLRKKALTDKIEKEELAWLLLNFNQKRGYYQLRGEDEDENVNKRVEFYSLRVTGVEATDDKKGNEIWYNVHLENGWIYRRTSKAPLDWNGKTEEFIVTTDLNDDGSIKKDKEGKEKRSFRAPAENDWTLVKKKTEYDIKNSLKTVGAYIYDSLLQNPSQKIKGKLVRVIERKFYKAELENILNKQKEFHQELNDASLYTVCLEELYEYNDAHRSSITKKNFTHLFLNDIIFYQRPLKSKKSLISDCKFESRSFIKDGKKQTEPLKCIAKSHPLFQEFRLWQFIQNLKIYQKEKKVDGQWLTDVNVTDEFLKSEEDTMALFDWLNGRKEVDHKALLKYLCKPLKLKESAYRWNYVYDPVKDESKNYPCNETKAQIVIRLSKVENVPEGFLNKETEEFLWHILYSVEDKNDIVKALKTFAGKNSLGDDFVEQFQKFPPFKKEYGSYSAKAIKKLLPLMRVGRYWNENNIDKKTKDRIDKIINAEYDETIRDRVREKSINLSDANHFQGLPLWLVSYIVYDRHSEDGDALKWKTARDIELLEQHSLRNPIVEQVINETLQVVRDIWKKFGKGEENFFNEIHIELGREMKNPADKRKQLTNQVTENEATNLRIKALLAEMLNDSTVENVRPYSPMQQEILKLYEEGVLNAENNIPEDILKITKQAQPTQTELIRYKLWLQQKYRSPYTGEVIPLNKLFTRAYDIEHIIPQSRYFDDSFSNKVICEVEVNKDKDNSTAYEYIKNNRGKKIELSYGKEVTLFTVEQYEEFVKNQYSGARSKMKKLLMEDIPESFIQRQLNDSRYISKVVKNLMSNIVREEGEQEAISKNVIASNGTITSILKQDWGLNDVWNEIITPRFERMNELTKSNNFGEWTNKEGKSVFQTQVPLALQKGFSKKRIDHRHHALDAIVIACASRSHINYLNNETALGKGKTKEEKEKRRYDLKHTLCFKKYNDDAKQNFKWMFHKPWEAFTQEAKETLYNIVVSFKQNLRVINKTANYYQAWKPDAKGKMNKEIVKQTKGENWAIRKPMHKDTVAGIVQMRFKKSVSFATALDNWQMITDNELRNQVVKLIGENYDRKRLINFFKEKGNKWNEKDISRVEIYYWDKENVASRVKIDDIFTSIKIKSVTDSGIQKIMLNHLGKYNEEKGGKIIEHPELAFSPDGIDDMNRNLFSLNEGKAHHPVYKVRTYEPKGNKFNVGQTGNKKEKYVEAAKGTNLFFAVYADESGKRNYETIPFNIVVERQKQGLSAAPEKNEAGHKLLFHLSPNDLVYVPIEEESKNAIVNLGKPTKNQVKRIYKVVSFSGNQCFLIRNDIATSIVNKVEFSALNKTERSIEGIMIKEVCIKLKIDRLGDMET

SEQ ID NO: 8706 - protein, 1338 aa, unidentified
  REGION 1..1338: note = Description of Unknown: Cas Enzyme sequence
MKKDYFLGLDLGTGSLGWAITDELYEVQRVHGKALWGVRLFENANTAEERRTFRTNRRRLARKNWRIQLLQELFSEDIEKVDDGFYLRMKESRYAPDDKQDCKGLCPELPYALFVDHNYTDKDYHKQFPSIYHLRKWLMETRETPDIRLIYLVLHHMMKHRGHFLFSGTIESIKEFKGTFKAFIQIVIDEELDFNLDIEDEDFNQIETILKDKGISKSAKKAELIKQLHAQTICEKAILNLIVGGTVKLSDIFENSDLDSSEKPKISFSDNGYEEYAAVVESSLGEQYSIIELAKAVYDWAIFADILGDYQSISAAKIAVYEKHKKDLAYLKKFIRDNLSKQVYLDVFVKTDTNLANYAAYTGMTKVNGKKQEIAGKRCSKEDFYKFLERTVIKSAADEEALIYLKNEMKKGTFLPKQAVKENGVIPHQVHLYELNRIIDNLKDRIPVLKKYENEIRKTFTFRIPYYIGPLNGINRSAGTTNWAKRRQPGKIYPWNFTEMIDEEESAERFIRRMTNKCTYLIDEDVIPKYSMLYSKFMVLNELNNLRINGEQISVTLKQRIYSELFQRYRKVTQKKLKDFLVREGVTDRTVDITGIDGDFKGTLTAYHDFKEKLTDTNLSQEDKENIILNITLFGEDKKLLNKRLASAYPELTEKQRKSLCTFSYKGWGRLSKALLEDITAPAPETGEVWTIIRALWESNDNLMQVLSEKYQFAEAIEEKNQKEETNEISYQLVESLRLSPAVKRQIWQTLQVVKELCKVMGNPPQRVFVEMAREKQESKRTDSRKKKLVELYKKCKNEERDWLQELGQTDDHKLRGDKLYLYYTQKGRCMYSGEIIHLEDLWDNQKYDIDHIYPQSKVIDDSLDNRVLVKKTYNADKTDIYPIKADIRNHMHSFWKSLLDGGFISKEKYGRLVRGEAFEPTELAGFIARQLVETRQGTKAVASILKQVLPDAEIVYVKARTVSEFRHDFKLVKVREINDLHHAKDAYLNIVVGNTYYTKFTQNASWFIKENPGRSYNLKKMFQSDNVERNGQIAWKAGEDGTIRTVKKTMDKNNILVTRRSYQVKGGLFDQQLVKKGKGQVPVKGGDERLHNIEKYGGYNSATGTYFMLVESEDKKGMKIRTIEYVPLYLRDQIKKNEYDSMQYLEKVRELKNPKILLSRIKTDTLFQVDGFYMWLSGRTGEQLVFKGANQLLLSKADAGTLKKVVKFVQRRKEIKDLRIVDYDDITQEELVGLYNAFFQKLADTIYQVRLGTQAKTLESKRDNFLQLSKEEKCIVLFEILHLFQCQSVAANLKLIGGPGKAGILVLNNNITNCNNICIINQSITGIYEQKIDLKTI

SEQ ID NO: 8707 - protein, 1197 aa, unidentified
  REGION 1..1197: note = Description of Unknown: Cas Enzyme sequence
MEKYKYILGLDVGISSVGWGMLALDEENNPTRIIDTGVRIFTPGEHVKTGESKTKARTAKRGTRRITRRREFRVDRIRYLLFQNNFLGKYDLNDLHVHEVNEILSDVFSDLITEYYKNKDVTPYDLKVKALDEKISSEELAIILVHYAKHRGYKSNREDNTSTSAESGKVKKAIAENNALMIEKGYRTISEMILNDERFSEKKRNSSGDYKTCVTREQYLEEIEKVLDAQIRFGLISNEFKSEYINIWVSQRHYASGPGGNSKYGGDLIAKMVGTCKFDGNPRAPKFAPSTEIFVALSKLVNLRYRIVGTSNYQVLTKEQINDILEMAKSQDKISFRKIVQLIGEENIEFKGLSLGKDKYISVLKKFKKEVLNLADDDRSRVDIKNLNEAEKEAYDILLHGALYEQIAIELKGITIIRKEIKKQFGSEEWNLLLNHIELLDLFVEIVTNYKTDDDVIKHLKEFNVDEKYYSFVLSLPNFKDHNNLSLDLIRKLNPLLLDGKRYDEAMNELVPDFRNALIEEEKYDLLIPINKNMEIRNQRVIRSLSQTRKVLNAIIKRYGMPHQINIETARELSKTMQERNKISRQMEENKLRNEELKKELVKTLSSRFKTIEDIKSMDLLKYKLWIEQQERCTYSLEKITIEELYDNNLVQIDHILPYSRTFNDNYLNKTLVKSKFNQEKANKTPYEWFGKTEKWDNYVVFIDSLDIPNQKKDNYLLKGLTLEIENEMRNQNLNDTKYISKYLTNYLKAYLNVPKVFNVSGSITGKLRGIWGLNRVTHSLESRDYYYSEDDHDEKKKNRENHLHHAMDSLVIASVTPSLVKQITSYEKYKRYINGKTLNQILNAEEYLIEEKNDQYVDHNTGEVFEDSKSLREYFEKMKMSEYIEKKKNSTYCLHFPLPYAEFIDELKIRVFEQDQDVYIDKINRFPYLVKEKRKMYPIIPSISKPKVGGSLHGETYYGIKIRENEKVVHERMSVISSSFNDKKLELIVDKEGGSKVVYETLISWLDGQDGEKAFKEKGYPKNPLTDNLIKKIKLETPFDGKGHIIGTKLVAKENVVQVKVFKKVNEDKMYFIGLDSYDVIQLKKGHDVDVIVWWGQGKNNVLIKYSELVRDYNSYIELQKNDLIEVELYNGAKGAAYSLGFTSGIFEVGSKLGDGLDLIGENLLFNKSRERYQLTISTIKSIEKLNISVLGKIDN

SEQ ID NO: 8708 - protein, 1035 aa, unidentified
  REGION 1..1035: note = Description of Unknown: Cas Enzyme sequence
MKWRFGADLGKSSLGWAAVELDKDNVPCRIIAAGSRIFSASEMAGRDPKSGASLAVDRRAARAMRRRRDRFKQRQAALLKYLTLAGLFPVNDAEREALSQLDPFALRAHALHDALPLHHIGRALFHLNQRRGFKSNRKTDRGKNEEDGKIRVGVIRLYEAMRDAGAETLGDYLHGRRAAATDPNTIPGVRTRLRPESGEDAKGNGYDFYPDRQMLEEEFTAIWDAQAPHYPDVLTDENRKRLFEVIFHQRPLKQPKIGKCSLLGNEERLSKAHPLFQQRRLLEELNALKIVRPGQAAETLTLEQRDALYLKLKDKRAVTFESLRKTLKLDPDARFNKESENRKDLKGDEVAAELGAKTRFGNRWAHFTIDTQWEIVSRIREQESDADEAALLAWLQDTHGLTPEQASATSGARLPEGYGRFGETATTGLIAALRAEVIVYSEAVQKAGFKHHSDFRTGEVLKELPYYGTVLERHIMPGTGEPGDPEELRVGRLTNPTVHIGLNQLRRIVNSLIKRYGPPEQIAIELARDLKLNDERKREINTRNKKNREDAVQRSKKLTEIGIADKGGNRALLKLWEELNRDNALDRRCVYTGQQISIEMLFSGAVEVDHILPFSATLDDSSDNRLLCMREANREKRKRSPHEAFGHRADWEDIAARAARLPHGKRWRFEPDAMSRFDTEEKFLARQLVDTQYLSRLAREYLGALYPDRGEGSGHVWVSPGRLTEMLRRSWGLNSLLPDHNFGGGADQPKNRRDHRHHAIDAAVIAVTDRHLLQRISREAGQRGHEAANRMTADLPEPWDDFRDQLGSIVSRIVVSHRADHGTVAKNPNGRDTTAGRLHNDTAYGLTGEKDAKGNDIVVHRVPLDALKKASDIEGVRDPDLRAALSAWTKGLEGKAFEARLLKFPALGPQPFRGIRRLRVIEPLSVIAIHDRQGRAYKGYKGDSNYRYDVWELKDGKWVAEVVSMFDAHQPGWSSAIRRENPTARKVLSLHQDDLLAIEQDGQDRKLMRVVKFGQNGQITLAEPHEAGDLKRRDA

SEQ ID NO: 8709 - protein, 1102 aa, unidentified
  REGION 1..1102: note = Description of Unknown: Cas Enzyme sequence
MKTWGIDLGTNSLGWAIIETQGEPGVHDEGRILASGVRIFSQSEMAGRDPQSKASLAVARRVARGMRRRRDRYLKRRQRLLALLTEHGLMPAEDSARQALVRDHDDSKGGDLSNSVYALRARALDKALTPHEIGRAIFLLNQRRGFKSNRKADNNDPDEQGKIASAIHVLDAKMMEEGARTLGEWLYMRRQRSLSVRARLSADGEGYDFYPSRAALEREFDKITDKQRGFHPELLNDAVIGEIREAIFHQRPLRPVKPGQCSYNPAEKRLPKAHPLFQKFRLLKEVNELEIVGEDQSHIKLTPDQRDALVLALRTGLNKQGRMPFSKLKSVLKIGKEVRFNKEMENRSDLEGDVIYFRLSRPECFGNRWADLPLEMQTAVTEKLRTEADYAALLEWLRGEAGLDDVHARAVADTPVPDGFGRLGASALSALIDAMEREVDDSGFVITEAAAAKRVYGRTNSEADPNRKGVDQLPKYQEVLARHIPPGTGDPDDPYDEFMGRITNPTVHIALNQLCRVVNGLIRKYGKPERIAIELGRDLKLNEAQRDEINNTIGRNTKAAIERGNKLTETFSQKNTGYNRLRLELWEDLNQKPENRVCIYCGKAIAGHMLFNGEADVDHILPYSKTLDDSKANRLLCCTACNREKKNRAPADVPQWRARYGEILARAATLPKNKQWRFAEDAMARFGEEEGFLARQLTDMQYISRLALTYLAHLYDQEEVDLDGVYKRHGRVRALPGRLTEMLRRQWALNELLHGHNLTGGDAAKPKNRLDHRHHAIDAIVIACTSRALIQRLATASAKAEEREADRVVARIDTPWPTFREDVRTAVGAIIVSHKPDHGTVSREGYARGRGQTAGKLHNDTAYGQTHDKDEKGNSLVVRRIPITGIRSAADIKRIRGNAHGHSELRDRLAAATSGLEGKAFEQAVVDFVKGDAKFKGIRHVRIAEVENPIWITHGDGRHKKGYLPGGNDRFDVWEFLDGKWDAEVVTTFDAHRPDFVPRMRRDNHNVRKIMSLKKGDMVAYNDPDNGKRIIAIVRKFDQRNKQLYLDPHNEAGNLDQREKQKTYKPLRPMPNPLKKYRPRQIRVDEIGQVFDPGPWWQQKGS

SEQ ID NO: 8710 - protein, 1048 aa, unidentified
  REGION 1..1048: note = Description of Unknown: Cas Enzyme sequence
MWILGLDGGIASVGWAVAEVEPGRREGRILAAGTWMFESPEEPTQSGPKLKNADRRMFRGQRRVVHRRAQRMRDIRLLFWDRGLNATLDRDALRGEGLDPWLLRAEGLDRKLEPREWAVALGHIAIHRGFRSNKKNKRPTNKASDDSKMLAAIEATAEKLAKWRTVGEMFARDPEFADRRRNRGGSFTRSILRDDQEAEVRKLFAAQRAFGNPAADDDFRGTFIVKAFSQRPLQSSEELVGPCPFEPGERRTARFAPGFERFRLYSRLAALRLQTGRTEQPLTPEQIASFPNNYGSTAKLTYKALRKHLDLDPNTRFAGIGRNEEDRDIVARHGSALAGTAKFRKVLEPAIGELETRKLLADTAVLDRAAEIVTFNEDPNLIRAGLAEAALSNEAQAAILEAVETGMFDEFKGAGHISAKAAAAIVPGLLQGLVYSEACALVNYDHAASAVTSVKDVNSPVARKALGEMLKQIRILERVYGNRTDGQGRKRFDRIHVEIARDVGKSIEERGKIERGIERRNKEKQGLREELAELLRMSVETLGPEDLLRYELWKEQNGRSIYSDRTIPPTAILATDNSVQVDHILPWSRFGDDSYHNKTLCFTGENADKRGRTPFEWFSDDKPESEWNALVARVEMCKSIRGFKRRNYLLRNAKETEERFRNRNLNDTRYALRALLAELDRQYEKKEGSPRRVFARPGELTAKLRQAWGIESMKKGPDGKRLPDDRHHALDAMVLAVTTESLLHMATRVSQEAERRGEEFHLRGLPEPWDGFRADVRAVFDTIFVARQEVRRERGKAHDATIKQMRAIDGETVVFERKAIEKLTERDLDLIPVPEAYGKIADPAKLRDQMVETLRDWIKAGRPKDRPPLSPKGDAIRKVRVRSNSKPALLVRGGTADRGDMVRVDVFTKPNRKGEKQFFLVPVYIHEVATLDAPPMRAVQAHTPDALWPTVECMEFAFSLYPMSLVSIVRSTGEVLEGYYRGMDRGSGNVEISSPGNSKAIIRGIGARTLKSFQKLRADRLGNISEVTSEVRVWRGKAFMSQDPPGSA

SEQ ID NO: 8711 - protein, 1457 aa, unidentified
  REGION 1..1457: note = Description of Unknown: Cas Enzyme sequence
LDLGTNSIGWALVEQDFENKYGKILGMGSRIIPMSQDILGEFDKGNSVSQTAERTNYRSIRRLRERHLQRRERLHRVLNVLGFLPEHYAAEIDFENRLGKFIAEKEPKIAYDNNKQFIFKKSFEEMLNDFRNHQPQLLKNEKGENKLVPYDWVIYYLRKKALTQKIEKEELAWLILNFNQKRGYYQLRGEEEEENPNKLVAFHSLKIVDVIADEKPNNKAETWYSLVLENGWVYRRSSKTPLFDWKDKIRDFIVTTDINDDGSIKTDKEGNEKRSFRAPGEDDWTLLKKKTEQEIDNSHKTVGTYIYDTLLQNPKQKIKGKLVRTIERKFYKEELRQILQRQKEFHQELQSDDLYNNCVRELYRNNEAQQLTLSKKDFTHLFTEDIIFYQRPLKSKKSSISNCSFEYRKFKTKDKDGKEIEKTEYLKAIPKSNPYYQEFRLWQWIYNLSVYKKDDDTNVTTEFLKTTEDFEKLFEFLNNRKEIEQKALIDYLLKRKLELKKAPKTEIEKYRWNFVEDKIYPCSETKAQIVSRLAKVENVPGGFLTREIEQQLWHIIYSVTDKIDFEKALKSFAVKHNLDEHSFAEVFKKFPPFKNEYGSFSEKAIKKLLPLMRLGKYWNENSIIENNNFYLKNIKFLLEKLSEKSDKISEADKEKWNREINAKLYNELIGFIDGDITSFQGLRLHIAQYLVYGRHSEVNIAGKWNTVDDLKKYLEEFKQHSMRNPIVEQVVTETLRVVGDIWNHYGNGAKDFFDEIHIELGREMKNTAEERKRITNQVTENENTNLRIKALLAEMMNDSTVENVRPYSPMQQEALKIYEDGVLNSDIEIPDDIAKISKTAQPTKAELTRYKLWLEQKYRSPYTGEMIPLNRLFTTDYEIEHIIPQSRFFDDSFSNKVICESAVNKLKDNQVGLEFIKNHHGEIVPLGLGKSVKIFEEKAYEDFVKQHYSKNRSKRNKLLLEDIPEKMVERQMNDTRYISKFISSVLSNIVRTDKNDDGINSKNIIPGNGKITTQLKQDWGLNDVWNDLILPRFERMNKITNSKSFTTYNDKHQKYLPAVPLELSKNFQKKRIDHRHHAMDALVIACATREHVNLLNNQSAKSDTTRYDLQYKLRNTEKWKDNNGRERDKFTEFKKPWNNFTADAKNELEKIVVSFKQNLRVINKTTNKNEKWIHKNGIKTKEYVPQTKGDSWAIRKPMHKDTVSGKVELPRIKVPKGKILTATRKSIDTSFDLKTIESITDTGIQKILKNYLLSKSNHPELAFSPEGIEDMNKNIEQYNGGKHHQPIYKVRIFELGSKFPLGQSGNKKTKYVEAAKGTNLFLAVYQDESGKRSFETIPLNIVIERQKQRLSSVPDKNEKGDNLLFHLSPNDLVYIPTEDEIENQLVGDFNNLSDKQMKNLYKIVSFTGSRLYVIPATVATAIVNKGEYTQLNKIELIKEKQYCVKLKIDRLGNISKA

SEQ ID NO: 8712 - protein, 1185 aa, unidentified
  REGION 1..1185: note = Description of Unknown: Cas Enzyme sequence
AENKGTREEKKLKAYEWRSKAITEKLEKEEAAYVITEINNNLNNSSGYLGAISDRSKELFFNKQTVGQYLYKQLQENPHTRLKNQVFYRQDYMDEFEAIWNCQKQFHPELTDELKTEIRDIIIFYQRKLKSQKSLISFCEFESQEKIINGNKKTIGLKVTPKSSPLFQEFKIWQVLHNLEFRNKETKEKFTPDADAKKILFDELNIKGNLSANKVIELLSYKPKDWELNYKEIEGNRTNKALYEAYLKILDLEGYDVKDLLKVKLNKDEAELDDLPVAALEIKQMVQAIFETLNINTSILDFDAELDGKAFERQASYQLWHLLHSYEGDNSNSGNEKLYDLLEKKFGFKKEHSQILANVTLSDDYGNLSAKAIRKIYPFIKENKYSVACELAGYRHSAASLTKEEIDNRPLKSKLELLKKNSLRNPVVEKILNQMINVVNTLIDTENKKLVAQGKEPNFHIDEIRIELARELKKNAKERAEMTTNINAAKLLHEKIIKILQDEFGVKNPTRNDIVRYKLYEELKNNGYKDIYTNTYIPREILFSKQVDIEHIIPQSKLFDDSFSNKTVVYRQTNLDKGNQTACDFIESKFGDKKLQEYKDRVEMLYKQKEGAISKAKYQKLLKKESEIGEGFIERDLRDSQYIAKKAKDMLFEITRSVVSTSGQITDRLREDWDLINIMQELNFDKFKKLGLTEQVEKKDGTFKERIVDWSKRNDHRHHAMDALTIAFTKRSFIQYLNHLNARKNEADKFHTAINGIEEKETYIVTDDDGNRKRVFKEPIPNFRQVAKEHLENVLVSHKAKNKVATKNKNKIKTAKGEKVKTILTPRGQLHKETVYGKIKLPVIKEEKVSAKFDLETVNNVANPTFKALLIQRLAENGNDAKKAFTGKNALSKNPIYLDEAKTQTLPEKIKLVSYEDDYTIRKDITPDLKIDKVIDAGIRKVLEERLKEYKGNAKEAFSNLDKNPIWLNKEKGISVKRVTISGVKNAEALHYKKDHFGKEILDENGNRIPVDFVSTGNNHHVAIYRDADGNLQENVVSLFDALRRIKYKIPVIIKDTNALWSELVNRNIEDEAFLKSLPSDNFQFLFTMKQNEYFVFPNEQIGFIPNEIDLLNPKNYKLISPNLFRVQKIATKNYFFRHHLETTVEEKKELKDIAYKPQLGLNGIKDIIKVRINHIGEIIQVGEY

SEQ ID NO: 8713 - protein, 1052 aa, unidentified
  REGION 1..1052: note = Description of Unknown: Cas Enzyme sequence
MVGAGKRPYRLGLDVGSNSLGWFMVWLDEQGRPKELGPGGVRIYPDGRDPKSKTSNAVDRRAARGARRRRDRYLTRRARLMALLVAHGLMPEDETERKRLEALDPYELRAKALDAALPAHHVGRALFHLNQRRGFLSNRKTEKKDGETGIIREAAGKLQAAMENAGARTLGEFLYGCHRAREPVRARNRSTGAKAEYDFYPTRQMALDEFNAIWEAQAPHHPAMTPAARTAIGLAIFYQRPLTQPPVGKCSLDPALDAEDAAGFRCPWAHPLAQRFRIWQEVRNLAVAETGKKPKPLSKEEGDKIALALFQNGKLSFDKMRALLRLPPEARFNLESEKRQDLLGDETAAKLSGKSLFGKAWRSLPLWRQIDIVARLLDEQDEARLIAWLTAEAGLDQAAAARVASAFLPEGHCRLGLRAIKKILPFMESGMIYPEAAKAAGYDHAHVPTGELSPTGHLPYYGEWLQDDVLGSGDPHDAKDKRWGRFPNPTVHIGLGQLRRVVNALIREYSAPAEVAVEMTRAFKLSPEQLAKVEKEQAENQRKNDARREELGNLGQAGNSRNLLKLRLWEELNPRDPLDRRCPFSGEVINIARLLSAEVEIEHLIPFQDSWDDSAANKVVCLRSANRLKGKQTPFEAFGSSPEWSDISLRANSLPKNKRWRFQPDARRRFDAMGGFQARQLNETGWLARVAKQYLAAVADPYKIHVLPGKLTAMIRAKWGLNTLLPDHNYSDEKNRKDHRHHAIDAMVAAMTDGPLLHRMSSAYDEERDKIEVPPPWPSLRDDLDTKLKAVVVSHKPDHGVAAQLHEDTAYGAVENPEAEGGNLVYRKAFLMLNEKETERIRDARLRDLVRAHVEAEKAAGKDLKSALQSFAARTDIPGLPKGVRHVRLIKAEKPEYLITLRDKSGKPYKSYSAGKNAFVDIFETSDGQWRGEAVTIFKANQKEERPRWPSEYPSARLVMRVFKGDMIRIEHEGKEKVVTVERLEPSASRLRLAENNEAGSLQSRHEDAADPFRWIFGYYADLKEWSAEHVRVDELGRLWRVWPDEAARAAQ

SEQ ID NO: 8714 - protein, 1120 aa, unidentified
  REGION 1..1120: note = Description of Unknown: Cas Enzyme sequence
MADKTLGPLAFGFDIGIASVGWCVLGENRIIDLGVRAFDKAETAKEGDSLNLVRRAARLMRRRLRRRAWRLTKLARLLKRAGLIADAQMFKNQQAFSQSLWELRVAGLDRQLSNEEWARVIYHLCKHRGFHWISRAEEKQAEADSKGEGGKVKQGLAGTAKLMKEKGHRSAAEMVLAEFAEAQRNKQGEYGKALSRTLLGDELAMLFQRQRELGNPQASQELEADILGHGDRKSGLLWAQKPPLAGADLLKMLGKCTFEKAEYRAPKASFTAERHVWLTRLNNLRIAVDGVTRPLNEQERQIALPLPYAQAGDFTYKQLRAALVKSGVLDDAFRFAKFAYAQAADGKAKDPETVVLVKLPAWQELRKTLRDKGLETEWQGMAGAATSGRPELLDQIAWVLSVFKDGDEVAAELRKLQLPGGEKTIEALSEVSFDKFHALSLKALRQIVPFMETGLRYDEAVAQIPEYGHHSQLHKVGEGEHKTLPPLYSGRDKDGRMVFSEDLDVPRNPVVMRSLNQARKVLNALVRRYGSPAAVHIEMARDLSRPLDERNKVKKAQDEYRERNDKDKAAFEAEFNIPAKSREFEKFQLYREQQGKCAYSLEPLDLHRVLHDIGYAEVDHALPYSRSYDDSKSNKVLALVKENRDKGNRTPYEYLGGAEDSPRWRPFAAFVEGNKAYRLAKRSRLLRKNFGNDEAEEFRERNLNDTRYICKFFKNYVERYLQLAEGSESKRCVVLSGQLTSFLRARWGLIKVRGDSDRHHALDAAVVAACSHRMVQNLSNYARSKELENVHTGFIDMATGEIVDPAMFHQLRQHFPDPWPHFREELKARLGINDEIKDDAIKLQAAMGRFGTYPPEALESLGPLFVSRAPQRRNGGAAHKDTIYGQPERLKAQGSVTQKVPLTSLSLKDLDKLIDPHRNEKLYAAVRARLEANGGKGDKAFPPGNPLRKPDRDGNPTGPIVRTVTMVIDKLSGIPVRGGIAKNDSMLRVDVFTKAGRFHLVPVYVYHAVANELPNRAIVAFRDEDDWTLIDESFGFRFSLYPNDLLKVKLRDSTRFGYYAGCDRSTACIHLWGHDRSTQFGKDGLMRSIGVKTALSVDKFHVDVLGNIYPAHPEPRRGLA

SEQ ID NO: 8715 - protein, 1050 aa, unidentified
  REGION 1..1050: note = Description of Unknown: Cas Enzyme sequence
SSVGWAIIGWRDGGPADLLRAGSRVFDAGMEVDSKSGKESSRNLARRTARLIRRQHWRRGRRLKKIFNLLKGYGLLPEGRVSSPEERQDYLNRLDNSILDSSWFRDNSRDGSIAEPRQVMPYIIRVAALDGPLEPLFLGRALYHLAQRRGFQSNRKESAATSDEKDEEEGKVKSGIAELQKNMETSGARTLGEYFARQNPHCQRIRQRWTARAMYEHEFDAIWESQARFHPQLLTAERKKALRIALFFQRPLKVQKYLIGECELEPGERRAGRYLLLSQRFRLLQKVNDLRIQTTDGPEGRLTVDDRNKLIEALELGGDYTFPAIRKLLGLGRTTHFNLEEGGETRLPGNRTASQIYSVLGNRWLGMSAAERDFVVEYLHGFQRADKLRTAAMRKFELDVATAEKFASIKLEPDYFGLSRRAMEKLLPSLEEGANYADAQFNAYGAREEHQLFDFLPPVDRWREIRNPGVTRSLTELRKVVNAIVRQYGKPMEIRIELARDLRQTKAQREKTWKKNRENQRARDKAAKKIFEEVGLRQPSNDDIRKVLLAEECNFACPYTGRAISMSALAGRESQYDIEHIIPFSRSLDNSLANLTLCYHEENRNVKRNQTPREAYASNLERFQEILGRVKRFRSDFAREKLRRFQMTTAEVEHAMEDFTSRQLNDTRYAARLAGDYLALLYGGRVDSSGTRRIRATAGQVTAFLRNEWKLNVILRDGPTANGGAVPKSREDHRHHAIDAVVTALTDDGTIQALSRAAERAPVELRRRFGVLEGPWPNFVDSVQVHIETLVVSHRPQKKVSGALHKETSYSADHGGFRHHRVSLSDLSEKDVADDSVIVDAVIRKCVRERLAALGGGEPAKAFALAGNMPHMTAHDGRTIPIRKVRIKETVKIRTIGQDSAIRYVRPGSNHHVEIFAEIGPNGSEMKWDSPGVVTMLEACDRLRNRQPVVRGRIDRPCELWEFKFSVATGEVLDCDTGPDKRELLVVRSISQEEKTGWIKINLVRVNDARKKNEIVSSRSWMTKSPNELRKMKARKVFVSPLGEVAEAHD

SEQ ID NO: 8716 - protein, 906 aa, unidentified
  REGION 1..906: note = Description of Unknown: Cas Enzyme sequence
MSVKTRDAFTIGLDIGIASVGWAVLAPDRIVALGVRAFDKAETAKEGESLNLVRRTARLTRRRLHRRAWRLKKLARVLQRQGVIDNVHVFQPQNPFSHSLWQLRVEGLDRQLNTEEWARVLYHLCKHRGFHWTSRAEEKKAEADTKSEGGKVKQGLAGTTRLMKEKNYRSAAEMALREFPEAQRNKRGDYGKALSRILLGQELALLFKRQRELSNLHAGSELEAAILGNGDHKNGLFWLQKPPLAGNDLLKMLGKCTFEKGEYRAPKSSFTAERHVWLTRLNNLRIVADGSTRQLNEQERRIALPLPYRQAGDFTYKQLGSALVEAGCLESAKFKFAGLSYPSEKQKAEGNAKDPEKAALVKLPAWQELRLTLKKTGLETEWQGMASAAMEGRPELLDQIAWVLSVFKEDEEVSSELRKLTLPNAEKMVEALLDIRFDRFHALSLKALRQIVPHMESGLRYDEACEKAGYHHNQLHKVGKGEHKYLPPFYSSRDKAGRMVFSEDMDIPRNPVVLRALNQARKVVNALVRQYDSPAAIHIEMARDLSKHFDERRKIEKEQTEYRERNEKDRALFAEHFGQMPKGLEFEKWRLYREQQGKCAYSITPIDIDRLLEPGYVEIDHALPNSRSFDNSKNNKVLVHAKENRDKGNCTPYEYLGGVQDSPRWRQFVAFVESSKAYRLAKRSRLLRKEFGKKEAEEFKERNLNDTRYICRFFKNYIERYLQLAEGSDARRCVVVSGQLTAFLRARWGLIKMRSESDRHHALDAVVVAACSHGMVKRLSDYARRKELEQVREGFVDAETGEIVNPVMFQQLHEHFPDPWPHFRHELEARLKIDDLAQLRSEIERLGSYPPDALDTLRPLFVSRAPQRRNGGAAHKDTIYAQPERLKAQGSVTQKMPLTSLTLADI

SEQ ID NO: 8717 - protein, 966 aa, unidentified
  REGION 1..966: note = Description of Unknown: Cas Enzyme sequence
LVKLCLPKPETALDDPIALRLRALKGEVLKPEELHAALAHLFKRRGYSEVPWKKTKAKTKKDDNPKKKEDDDEGEVLKAVEGIRKEMVEKDCKHAADLLATRIKEQNLWREHINCGKPLAELWAAAKMKGDLPKAESLQRKIYWPREVLQKEFEAIAAAQKKNFPQLAKKTDWLLYGDTKEVKGHHVFFKTTEARNPGVMGLRWPRFDNRGPALDSFQPVDEQGRPMHVVRKNKEAFGLAQWELALMNFRVLDFKTRQKRDPRTDFPIFIENVRNEWNKKGKVTEARLKKLAEPFKDKFLLIEDQMPLTPETGAGRARYSSPTLELIRKEIGEGRRVDPPQPILRRNGENAEQALNRYLADVKHPLVRHRLILFRGILARLVKEHGQPDTIVLEAVRSLALGQKAKNELNQRNEKFRKEREVAREQLSSNNESISRKGIQRYRLWQEAKGRCPFCLQTIERTDLGHGADIEHLVPRSIVDCNEFYNLTVAHIKCNRELKGDRTPLTAFGGTSQWEGIKSNAETCFTGRKLEIFLSPNAEELIEQKSDLQHTAYIARVIRHISLMQLGWLNNEGRDPTPEKQNPALRFQVTNGQLTGRLRKAWGLNQILHPLPPGKRWDELTDEEQKQFTEKNRGDLRHHSLDAMVIVCTLPWLAHRTHGAKDSLGRHGWWTQDEKQRSKAANPLFPNEGQMHEVVKQEIEKVVVKHHVSRSNHQQAYATTLYAKKAKDTYVAREVFTSLTPKNLGSIWPETFASYCESAWRRYSDESADLAGELKRTKNCVPESFTRKLCFSHFQKWRQDDCPEFYWPKEVKIPIRSVRLISLKDDTAVVPFSPGTHAYVKRTGFKEVQIFLAEDEKSFVPVFIPYWKNDKPLCVKPIKKNIKPVATIRRGGIVTLKKLSGPKNPLGNYRVVSTMQAKINLVPTHIQDKPEALLASGFLANGVNISWQTFFNAAGYELPHPPPVKS

SEQ ID NO: 8718 - protein, 1115 aa, unidentified
  REGION 1..1115: note = Description of Unknown: Cas Enzyme sequence
VEHKQQSQPLTFGFDIGVASVGWAVLAPNRIVALGVRAFDKAETAKEGDSLNLVRRNARLMRRRLRRRAWRLTKLARLLKRQGVIDDPHLFHPQHPFTHSLWKLRVEGLDRQLSREEWARVIYHLCKHRGFHWISRAEEKKAEADSKGEGGKVKQGLAATAKLMQAKDYRSVAEMVLSEFPDAQRNKQGDYGKALSRTLLGDELKRLFEKQREFGNPHAGEALQTELLGDDDHKSGLFWLQKPALAGADLLRMLGRCTFERTEFRAPKASYTAERHVWLTRLNNLRVFVEGRARPLNEEERRLALPLPYQQAGDFKYKQLRAALVKAGCLPDTFRFAGLAYPSAAQLADGKAKDPEDATLLKLPAWQALRFTLKKAGLGTEWEGMAGAAVDGRPELLDQIAYVLSVFKDDGEVRTELRKLRLPATERMIEALLDLRFDKFHSLSLKALRAIVPHMERGFRYDEACEAAGYRHSQPASADPGEHKYLLPFYARRDKDGRMVFNEDLDVPRNPVVLRALNQARKVLNALVREHGSPHEVRIEMARDLSKPLDERRQIEKEQTAYRERNEKDRAMFAEHFGREPKGVEFEKWRLYREQLSKCAYSVEPLDINRLLEEGYVEIDHALPYSRSFDDSKNNKVLVFAKENRDKGNRTPYEYLGGADDSPRWRQFVAFVESNKAYRQAKRTRLLRKNFGQDEVKEFRERNLNDTRYICKFFKNYVEHYLQLADGSDAKRCVVVSGQLTSFLRARWGLLKVREESDRHHALDAAVVGACTHGMVKRLSDYARRRELEHVRAGFVDMETGEIVDPVAFARLERHFPAPWLHFRAELEGRLKEDDPERLRTAMQALGTYPPDALKALRPLFVSRAPQRRNGGAAHKDTIYGQPDRLKAQGSVTQKVPLASLTIKDLDQLIDPHRNERLYATIRSRLEAHGGKGEKAFPPGDPLRKPDRDGKPTGPVVRTVTMVIDKLSGIPVRGGVAKNDTMLRVDVFAKDDRFHLVPVYVHHRVAGLPDRAVVAFKDESEWTLIDDSFAWRFSVYPNDLVRVRLKKESYLGYYAGCDRSTGAINLWTHDRNSHIGKDGLIRGIGVKTALAIDKLNVDLLGNVYPAQPEPRRGLA

SEQ ID NO: 8719 - protein, 1435 aa, unidentified
  REGION 1..1435: note = Description of Unknown: Cas Enzyme sequence
MRKILGLDIGTNSIGWSVIERDLENESGRILGIGSRIIPTESELLSKYETGQAASKNAGRRQARGARRLKQRYKLRRQRLIDSLILLEWLPKEFKPGNQITIGAETLQKMKTAFGTTEISDDWVVYYLRHKALTEELSKDELAKVLYHMNQRRGFKSNRKAGNEIPTEKDEENEGGKRKRVKKVEIVTIHSIEDSGEKQKGNSIYNIKLKDGRLGTIIRKAKPEWENQELELEITWVPPTKKDDERYEFRKLNNTDADKWAKQKVAREEAIRRSAYLYPGNYYFHELRKNPQYIIKDVSIDRQFYIDELTAILSKQIELNSSLNNSAKISQIAEKFYPKNQEKQKELKNNDIIHLFIKDIIYFHRPLKSKKSSITDCRLAYKNYSDSSTGKKMPYKAAPISSPVFQEFRIWQTVNNIRVLKREMRDTHGRLQIDIDVSEQYLTQKIIETLFDLFDGKEKVNQKQILKECGLSDKEFMINLFRLNEEKELPGNETKALIRRQFKKAGLETKCEELLNNPKDFYQLWHILYSLENEIDIKSALHRQFKITEDQAEIISKAPPFKQQYGSLSHQAMSRLLPLMRIGKYWQWEAIDNFTQIRLQNIFTGEFDEGISNLVRDLFEKHKIQKEEDCKGMIVPMASYTVYGIHSERNNSYYDKPEQVIPKEPLNLRNPIVEQVVNETLRLTKDIWNTYGRPYEIHIELARDLKKNAKEREDISKMITENENDNKRIAAILRELKWGNPNSIGDIERLKLWEKQADEKTKEDFRSIKFKKLTEPTKEEIQKYKLWASQKFLSPYSGRPIPISQLFTRAYDVDHIIPRSRLFDDSFENKVVVETELNKEKGNKTAYEYIRGGSPKGNKILSVTQFEAHVNQFFYRKKKRLLLSEDVPQGFSNRHLVDSRYISRKLNELLAPVAENQKDPVISTSGSVTSELKSSWGLSEKMKELVKWRFERLQEKTGESYVWYDDELDQDEKPTGRKILRLKGFEKRLDHRHHAMDALIIACTTRSHIKYLNDLNAAQYRKIPTDEEVKKYLPKLLEAGKNDYWQSRKFKKPWKTFVAEAVTALEGVVVSFKNNIKLYGRKANKNLRYILQADGTFKKELKPVVDEQGKKKLSPYVRQSLHKATYAGKIQIREYKPAPINEAFKTPNLIANKEEKKYLKKLLENSNGDLKKVVKLYKEAPLKDKEHNEVRRIMLIEMTPYYVNRVDISSGFDKKRIEKIPDPVLQKELVSHIDNIENLNKSRNKEEEIDAFGSEGIEILNKNRKFPITKVTIKEESSSKFEIRPGAYTEADKGTNLFFVIYENLNDFSDRLFESIPLRTVIEAKVTGSDFVEDRTGYRWFKLSPNDLIYLPDENENIASIDWNNRNIIANKIYKLVSCNKGQAFFVPHSLSKVIVDKIEFDSLNKVERALDGRMIKQHCIKLKIDRLGNIYPAK

SEQ ID NO: 8720 - protein, 1359 aa, unidentified
  REGION 1..1359: note = Description of Unknown: Cas Enzyme sequence
MEQKNELVVGLDIGTNSVGWAVVEINEQEGDTILKKIHGMGSRIIPMGQELKDFEQGNSITKNAVRRQKRSMRRNGQRYKLRRSKLIEVLHMLNAWPEGLNEILPKGTKMLSPLAQYGLRAKSVDELISLQELGRVLFHMNQRRGYKDIGDLMDELSGSVTQEKSDPKVLREIKQVIVSEIISEDTKGKRSILEIAVEVEGKRVIGTTSSTSFKNLVGEKLYIEIKTRKTAKGESIDFFRTSVTEWKKDKDKLDEEMEASGMHPGQFFFDEFQKDPLTRIRERIVLRERYKAEFNAIWKRQAVEGSALCDPEIRDKVVKAIIPNNLRDQQQWLQRDLGQFVRDYIIYYQRPLKSQRSSIGNCRFETGSIATTTRKAIPAKQVMPVSSPIYQLFRIWQQVNNIRIYDRELKSIELTPEERVRAVHHLITHAELKAENLLKVIGRDKEVRENSLRSDLPGHQTLGPLRKHLLKTKVWDQLLGEAITVKNIRESALYRIWHILYSIPEEEFRKRALQAIPELDGGVIADLMKVRYPKKHGAVSARAAMRIIPLMQCGDDYDPTLIADRDKARLDKFITGEDIPGMDSEMRAALGDPQRIEDFQGLAYWEAATAVYGDHRATAEPLFKKPEDVKSLQRGFLRNPVVEQVVNETLMVVRDIWKTYGRPTSIRIELARELRQNQEQRSKTFKHIGERDKERKVVVEELITKHNRSKPSRKDIEKYELWVQQKHQCIYSGKTIEASQLFDTREVDIDHVIPQSKFYDDSIQNRVLCFRTENAGANGKNKLLAATYMKNKGAGEWEAYLSRVNGWGMSRGKRKFLLTEEIPESFINRQLQDTRYIGTEVRKHLERFAPTQTTLGLVTDLLKNEWELNKVYKEILIPRFERLEKIVDRKLIEEVPGRNGHKDWKIEGFSKRIDHRHHALDALVVSLTRQKFLQRLTNVNQLNLSDDQKEALKRPTWYPLPHPKLREMVKQQLERTIPSIKNRQRLLTKSSNTTKFLKDPISGALGEQDQRKGKVYAVRGALHDEQPMGEIRQQRRWSLKEIIDWLAESKDAMEMLRPLNKEDIGYKMRFIAHEQERALLANYCAKYNWSLESIFENIKIDPIVNTDNKLVSELTVLVPLYTSTKALGERFSRTMANGIIDRSLRKRILHHLEAFNFDSKKAFTGDGLLQLNDLHHSAISKIRYIVDEKPVGKAKSRSLLIRKDDPNIHLHYESNENYALAVYTDLRNGVRSFEEIRFMDAVKSKLKGNEVQEQREGCSCFLLKKGDLVYVPLPDQVEPINWKTKDLFSGRIFKMTQISGYFIPVEIAQVVNFAKKEREYGTQNAALFDDPYTPNRQKVIENCVPIQMDRLGNIQVLKY

SEQ ID NO: 8721 - protein, 1100 aa, unidentified
  REGION 1..1100: note = Description of Unknown: Cas Enzyme sequence
LKDSQLLSASINELYPQNTGHQAVLDKKDFVHLFIDDIIFYQRPLKSKKSTIGRCDLERRPMKNKNGILAKDVNGKQITQGIKVIPKSNPLYQEFRIWKWIHDLSIYTKDNDQNVTSKFINSFTDKEKLFDFLNSRKNIEQKPLIKFFLEKTGLKGRALTAEIENYRWNFVEDKTYPCNETFSLIHSKLEKTIDLPADFITLENIKSIWHILYSVKDKSEYEKALLSFATKHKLHRDSFFESFRRTVLTENDYGAYSEKAIKKLLSLMRTGKHFTIEAIGITTKERIDKILNGEYDERIKDRVREKAISLTDISHFQGLPEWLAKYIIYDRHSEGAQAGKWDSSEELQHFLKEFKQHSLRNPIVEQVVTEALRVVNDIWNHYGGGVAGFFNEIHVELGREMKNPKEARERMSVQMTENENTNQRIKCLLAEMLNYSEVENVRPYSPSQQEILKIYEEGALNADENIDDSILKISKTAQPTSAELKRYKLWMEQKYRSPYTGESIPLNKLFTPAYEIEHIIPKDRYFDDSLSNKVICESAVNKLKSNQTGLEFINNHHGEKVQTGMGKTVRIFEPNEYEDFVKRHYSHNRGKRTKLLLEEIPAQMIERQLNDTRYISKYISAVLSNIVRADSNDDGVNSKNIVPGNGKITASLKQDWGLNDVWNDLILPRFERMNKLTGASDFTVWNENHQKFIPTVPLEFSKNFSKKRIDHRHHALDALIIACATRDHINYMNNTNAQSKGKSTEDNKKLRYDLRSKICFKAYNKSDKQDYQWKFSKPWPGITTDCKEKLNSIIVSFKQNLRIITKTNNQYWKWVEENGEKTKKLCKQTGTNWAIRKPLHKETVSGIVELKHIKVPKGKILTATRKNLDSTFNLSAIESITDTGIQKILKNYLASKGNNPELAFSPEGIEDLNKNIRAYNDGNYHQPILKVRVFETGSKFQLGQSGNNIKKYVEAAKGTNLFFGVYSNENNKRSYDTIPLNIVIERKKQGLNPVPTADDENNKLIFYLSPNDLVYLPNEGELHENDSYLKNSEKINIENIYKVVSFTGNRIFFIACNVSISIVNKQEFSSLNKMERSIDGRMIKEICIKLTTNRLGKAVH

SEQ ID NO: 8722 - protein, 1023 aa, unidentified
  REGION 1..1023: note = Description of Unknown: Cas Enzyme sequence
VERLMKYRLGLDLGSTSIGWAVLRLTERDGKYEPSAIIRAGVRIFSDGRNPKDGSSLAVTRRTARAARRRRDRLLQRKESMIRQLVSSGFFPADEEARRQLVDLNPYYLRAKGLDEALMTSEFGRALFHINQRRGFKSNRKTDKGNDDGSVMKQAIADVKNKLKELGVRTVGEYLYQRMLNGQPTRARLRQFTMPQDNGRNKIQKSYDLYIDRSLVEDEFEQLWAAQEKFNPQLYTPVAKERLKHILLYQRPLKPVDPGRCSFLPEQKRAAKALPIAQQVRIYQFVNHLRYLDANAQEVPLTLSQRNIVVSELLKSSKRTFDQLRTVLDFPGTVKFSAEDEKTKDIKGDSTAGILSNKKFFGNQWFKFSFELQNQIVEKLLYEENEANLISWLVTHTGVTEDEAEQISGAPLPDGYGSLSVVALQRILPELKKDVVSYKKAEINAGFGSPSALATYQDGEIWTELPYYGKILARHIGFGTNNPEDIDEVRYGRINNPTVHIGLNQLRQVMNGLIKEYGHPTEIVLELARDLKMGVEERTRLNKQQAENQKQNDRRRQEIAEIIGGDKTPEKVTRAELQKMILWEELSPLPQERCCPYTGQQIRKTMLFSPAVEVEHILPFSRTLDDSLNNKTVAMAWANRAKGNTTPYEAFAKQSIEGINYADILHRTRSMKKEKRYRFAEGAYEKWLKEDKDFLARALNDTRYFSRIAKEYISVVCPRSTWVIPGQLTALLRGQLGLNAILDEVEEKKNRHDHRHHAIDACVIAITDRSLLQRVATENARTVDKQYSRLIQRITPPWLTYREQVKRAISHIWVSYKPNHSHEGAMHNDTAYGLLGNGQVRHHKLVDGKREEVVETLSVIPMTCAKANKRHGVNSDGTPKAYKGYKGDSNYCMEIYQDEKGKWKSEVVSTYDAYQIVRKQGLEQLRNKEVAQNGRLLMMRIMRDDLLRLEHEGVLGVYRICALSTNGVITLALHQESNVDARNRDKNDSFTYTFKTAGSLQKSKARLVSISATGRLKDPGFQE

SEQ ID NO: 8723 - protein, 1368 aa, unidentified
  REGION 1..1368: note = Description of Unknown: Cas Enzyme sequence
MVLRQHEYIIVLGGMSMRNNKNYNIGLDIGTNSVGWAIVEENNQKIFKKGGKALWGVRLFDEAVSAEDRRLKRNTRRKYERRRQRIKLLQEEFKEEIEKVDKDFYQKLYESKYHKNDTKNKTLNITDLEKKEIFNKYSTIYHLRNELMTNNEKFDIRLVYLAIHHIIKYRGNFNYNARNLNINDIDVANSLNEIFNLIIANIKPENFPDTSSEVDVNALYKTLLSNSTKNDIQKNIANILNNTPSNFSNNFAKLILGKESNITKMFDLENEKEIKLSFTKSDFDNKLMETADDLGEVYYIIIAIKNLYDALFLKKIFNSSDDNIKFLSEYMIKRYDKHKKDLNKLKIILNIGKSKNEINNTTNYNKVFRSTNKDMCLYDKYVKNNIDYDTFKKDLIKILDDVLKESPDINKEYNDIILELEKEEFLPRIASTDNGRFPYQLNKTELIKIIENQGKYYKFLLDKANDGEYKLVKLLSFKIPYYVGPLTSSDKSNYAWMIKKENVKITPYNFEEIVDKEASAEKFITRMISHCTYLLDEPVLPNNSILYCKFKVMNELKQIKINNEKLSNEVQKDIFENLFKKETGTITERKFINYLNTTNYFEMYNGEYNIKGYSSDKEFANNMQSYIDFFGENGFFKDTNYTENDAEEIIKWITIFEDKDILEAKIKRNYKDLTDKTIKQLVNKKYSGWGNLSKKLLTEISYFDKNTSTPKNIINLMEETNENFMQIINNDKYNFQKIIKDNNKYVKNLDKLDYDVVGNLATSPQNKRGIYQSLKIVEELVNYMGYEPKNIMIEFARNDDVKKRTDNRKKYLEQLYEANKNTIDEYKSLRNELNKKENKDLSDMRLFLYFIQEGKCLYSGEKINIEELNDKNKYEIDHIIPRTLIKDNSIDNLALVLRKYNQDKKASYVLPVTWQKNQKMYWDLLKEHKLMSNKKYYNLIRREFKQEDIDGFINRQLVETRQITKHVANILENYYKNSNIIYLKADISHNYREKYDLFKFRQINDYHHAHDAYLAAVLGEYKEYYLNKELNYDAIKEMNNEIVRLDEGKRNKLQYGYVVNSLDENLFGIVSKISSKFVNKKTGDVNFNPKEFNEIVANTLYRNDILISRKSEVKTGRFYKEKIYKRGVGTIQINKKMEVKFYGGYSNMETKYMMLIKFKDNYKIVGIPKYFNKNTLKEEFDDFINEQLNNKNLDKFEIIKKRIPFETELIYKNQAIYVTGYGVQNKNCEICNATQLKIPKKLYIKWKYALNYILNKNQKYQEDALKYIDEIYDFLLNINYYPLFQSAINKIKNTILFSKLDISDKQQIVNALFNLFHCNSINANLSKYNLSDRIGRLSGINITSGTIITKSITGLKGNIYEFQNSSDN

SEQ ID NO: 8724 - protein, 1420 aa, unidentified
  REGION 1..1420: note = Description of Unknown: Cas Enzyme sequence
MKRNILGLDLGTTSIGFAHIIEGDSPEQSSIKKIGVRVNPLTTDEQTNFEKGKPVSVNADRTLKRGARRNLDRYQLRRENLIDALLQANIITKETILAEDGKNTTHETWLLRAKSVYEKIEKEELARVFLAINKKRGYKSSRKAKNEDEGQLIDGMEIAKRLYEESLTPGQLAYHLLQEGKKFIPDFYRSDLQAELDKVWNFQKQFYPEILTDEFYKELQGKGQRATSASFWGKYQFNTAENKGNREEKKLQAYKWRNEAISKQLEKEEVAYVITEINNNLNNSSGYLGAISDRSKELYFNHETVGQNLYKQLQENPHTKLKNQVFYRQDYLDEFEAIWKEQSKHHKELTDNLKAEIRDITIFYQRKLKSQKGLVSFCEFESKEIEINNNGQIAKRRIGLKAAPKSSPLFQEFKIWQVLNNVLVRKKGSKKRVLKESDQTKLFDKEKEIFDFDLETKQKLFDELNIKGNLKANKIIELLGHKSSEWEINYSELEGNRTNKVLYDAYLKILELEGYDEDLLKLQGKDDINVSELKASAFEVKDMVRRIFEVLNINTEILEFNAELDGKAFEQQASYQLWHLLYSYEGDDSPSGNEKLYELLEKKFGFKKEHGQILANVTLSDDYGNLSSKAMRKIYPYIKEQTYDKAAALAGYRHSASSLTKEEISTRPLKDKLELLKKNSLRNPVVEKILNQLVNVVNALIEKNRSINPNFRFDEIRIELARELKKNAKERAEMTTNINAAKTENDKIRDIIKRDFSNVKNPTKNDLVRYKLYQELSFNAYKNLYTNEKIDYYKLFGKEYDIDHIIPQSKMFDDSFSNKVLVPRQANLNKGNQTAYDYMSNKSKEEFDKYIATIETLYKERKITKAKYQKLLKQETEIGDGFIDRDLRDSQYIAKKARNLLYEICRIVTPTSGSVTGRLREDWGLVNIMQELNMEKFRSLGLTEMVEKKDGTFKERIVDWSKRNDHRHHAMDALTIAFTKHNYIQYLNYLNARKNEYHKLHSNIIGIETLETEIIIDDDGNKKRVFKLPIPNFREKAKEHLENVLVSHKAKNKVVTKNKNKTKSKNGEKTKVELTPRGQLHKETVYGKYQYYVNKEEKVGTKFDEKTINKVSNPLYKKLLLKRLSENGNDPKKAFGGKNALSKSPIYLNEEKTETLPETVKLTWLEEDYSIRKDVTPENFKGEKSIEKILDKKVKDILKERLNTFGNDAKKAFSDLEKNPIWLNEAKGIAIKRVTISGVKNAQFLHYKKDHLGNYILDKNGDKIPVDFVSTGNNHHVAIYRDEKENLQERVVSLFDAVQLVNAGESVIDKNYNQGIGWEFLFTMKQNEYFIFPNEKTGFNPGEIDLLDPKNKKLISPNLFRVQKIATKNYMFRHHLETTVDDKKEMKNIAFIHIQSCNLLKEIIKVRLNHLGDIVSVGEY

SEQ ID NO: 8725 - protein, 1080 aa, unidentified
  REGION 1..1080: note = Description of Unknown: Cas Enzyme sequence
MAWRFSADLGTASLGWAALELDATGKPFRIIAAGSRIFSDGRDPKSGASLAMDRRAARAMRRNRDRFKQRQAALLKHLTAAGLFPADTAERKALEGLDPYELRARALHEPLPLHHVGRALFHLNQRRGFKSNRKTDRGADDDTGKVRIGVERLYERMRDAGATTLGEYLHHRRAAAADANAIPSVRTRLRPETGEGAKGDGYDFYPDRQMLEDEFDAIWTAQAPHHPDALTDDVRDRLFEIVFHQRPLKAPRIGTCTLVPGDARLPKAHPLFQRRRLYEEINALRIVRVGENPHPLTLEERDILYLKLKDSRVSTFKAMRKALKLDAEARFNKESENRPDLKGDEVAAEMGAKTRFGNRWVNLDWPAQWDVLSRILDQESDENHAELVAWLEQVHGLSPEAARASANARLPQGYGRFGLEATTRLIEALKTDVVVYSEAVKAAGFAHHSDFRTGEVFRDRDGVPALPYYGAVLERHIMPGTADPDEKDEASRIGRLTNPTVHIGLNQLRRVVNRLIKAHGLPQDIIIELARDLKLDEDAKKEANKRNRQNREAAEARSRKLIEIDQRDTGANRAILKLWEELNLDNVLDRRCVYTGRQISIDMLFSGAVEVDHILPFSATLDDSFGNRLLCTREANREKRKRSPFEAFGHRPDWEDIAARAARLPREKRWRFEPDAMQRYDTEDKFLARQLVDTQYLSRLAREYLTSLYPDQGEGSGRVWVSPGRLTEMLRRSWGLNSLLPDHNFGGGAGQPKNRLDHRHHAIDAVVIGVTDRALLNRISREAGQQGLDGAERVTADLPEPWPDFRGHVRAAVGKIVVSHRVDHGTVAKSSLRKGRDATAGRLHNDTAYGLTGETDAKGASLVVHRAPLAALKKTADIEKVRDTDLRDALAHFTTDLEGKTFEAAIRRFPELGPLHFRGIRRVRLIEPLSVIPIRHGPGGVHLKGYKGDSNYRYDVWELPGGKWAAEVVSMFDAHQPDWTSTIRRDHPTARKVLRLHQNDMLAIERGDGRELVRVVKFSEKQLALAPPNEGGSLKARAADKDDPFNYLYPSPNTLKAWGARQVRIDELGRVLDPGPRKNV

SEQ ID NO: 8726 - protein, 962 aa, unidentified
  REGION 1..962: note = Description of Unknown: Cas Enzyme sequence
MAKKVLGLDLGTTSIGWAFVLEDESNTEKSEILKLGVRVNPLTTDEQLNFEKGKPVSINSERTLKRSMRRNLQRYKLRRNNLIAILKEHGIITDTTVLAENDKHSTHSTYALRAKAATEQLGLEEFARVLLMINKKRGYKSSRKAKNQDEGQLIDGMAIAKRLYEENLTPGQLCYQLLKDSKSTLPDFYRSDLQTEFNKVWDFQKQYYPEMLTEDLLKAISGQGKENTRKRILAITQTYTAELKGTKLSKQEKRIIPYEWRNKGISKKLSKEEIAYVLTDINNNINNSSGYLGAISDRSKELYFNNLTVGEYLYNLLKNNPHARTKNQVFYRQDYMDEFEKIWTVQAKYYSQLTDALKAEIRDVIIFYQRKLKSQKGLVSFCEFENKIIEVTGEDGKIKKKTIGAKVSPKSSPLFQEFKIWQVLGNLEAKNKTSREKLTFDQSARQALFNELNVKDKLSVNQVFKLLGYKAEEWELNYKELDGNRTNKVLYDAYLKMMASEDDEESAISFNSTDLKDNVAAFFEKEGIDISILSFDAELDGKDFEKQNSYQLWHLLYSYQEDNSPTGNDTLYKLLNEKFGFKKEYASILASITLPDDYGSLSAKAMRKIYSYIKDSTFSVACELAGYNHSKSLTKEEQQNRPLNNKLEILPKNSLRNPVVEKILNQMVNVVNAIIAEPSLGKPDEIRIELARELKMNADERAQMTNSINKAKTEHDAIRIKLNKDFNIKNPSRNDIIRYKLYEELKNNGYHTLYTNTYIPPEILFTKDIDIDHIIPQAVLFDDSFSNKTLCFRNDNLKKANRTAYDYISTEYGEEALTAYEQRIKMIYEAKDGSGIKKAKYNKLLKKGSEIGSGFIERDLRNTQYIAKKAKQILEDVCRTVVPTTGSITDRLREDWGLTNVMQELNIEKYRRLGLTEKVERKDGSFKEKIIDWTKRNDHRHHAMDALTVAFTKHSHIQYLNN

SEQ ID NO: 8727 - protein, 936 aa, unidentified
  REGION 1..936: note = Description of Unknown: Cas Enzyme sequence
LGATSLGACCLELDNEGRLKGRITALARIFSDGRDAKTGASLAIDRRAARAMRRRRDRFKRRQAALIKYLTQDGLFPADPIERKTLEALDPFELRARALDQKLPLHHLGRAFFHLNQRRGFKSNRKADRGQDDEAGKIAIGIDRLRQQIEESGSRTFGEFLHKRRLSAADDNAIPPVRTRLRPETGEGAKGDGYDFYPGRALVEEEFEDIWEAQAKHHPSVLTDAVRDRLYEIIFHQRPLKKPKIGRCTLLPAEERLPKAHPLFQRRRLLEEINALRIVLPGEVPVALTLEQRNALVLALKDSRKKSFESLRKTLKLDPDARFNKESENRTELKGDEVAAELGAKARFHKRWQHFSADEQWTIISRLIEEEDETALRQWLVENYDVTAEQARAIAGARLPDGYGRFGLTATKDLIEALEAEVIVYSEAVQKAGLGHHSDFRTGEIWRDEDGTPALPYYGKVLERFIMPGTGNPDDPEELRIGKLTNPTVHIALNQLRRVVNRLIRTYGPPAQIAIELARELKLTEDEKRKRNRENNENRIAAEDRSRKLAEIKQRDSGANRALLKLWQELNPHNVLDRRCVYTGKQISIDMLFNGEAEIDHILPFTETLDDSNANKIVCLRDVNRLKRKRSPYEARLDLFNRFGADADWDAIAARAARLPQNKRWRFQPDAMQEFVAKGGFLARHLTDTQYLSRLAREYLSALYPHSGEGSSHVWVSPGRLTEMVRRKLGLNELLPDHNFGGGADQPKNRLDHRHHAIDAAVIAIVDRPMLQAIARASGQDGTEGIERIIVPEPWDGFRDDLRRAVNRITVSHRPDHGTISKAGAAKGKDQTAGRLHNETAYGITGEKDAKGKTIVVHRVPLTSLKKATDIEDVRDPVLRKALQDFTRGLDGKAFEEKLQTFPKLGHLSYRNIRRLRVVEPLDVIPIKDKNGRIYK

SEQ ID NO: 8728 - protein, 1167 aa, unidentified
  REGION 1..1167: note = Description of Unknown: Cas Enzyme sequence
MKITLGLDLGTNSIGWCVLASDESANKHTILGAAPRIIPMDQQEIADFNKGNLASATSERTRLRSVRRLHERFLLRRQRLHSVLNILNFLPAHYAAAIDFNRYHGKFLPGQEPKLAYNFNVITNRNEFLFRQSFDEMLKELGRGPEMLVPYDWTIYYLRKKALTQPVTREELAWILLQFNQKRGYQVARGEDIEAPRKKREEYMKLAVLRVEPTGDRKQTGEEWYNIHLENGLIYKRASKMPPMLEGNILELIVTTDLDDAGNPKLGKDGRIKQSISAPKDDAWILQKTRAEHDLTLSGKTAGAYIFDALAKNPDEKIKGKLLRVIDRKYYKDELYQILESQLRFHPELSDPGLYERSLMQLYPSNENHRIGLQQKGFIHLLIEDILFYQRKLKSKKGLISNCRFESRVFKKDDMLVREPLKCIPKSHPLFQEFRLIKFVQQLEIYQREVNENGKLVFDVKVTDRFLPTPAERFQLFLWLNERASVNQAAFFKYPGFKLKKDASLYRWNYVEDRDYPCNETYADMRRYISKLEGVAADVLTPAFQESLWHILYSVTDPRELQSALTKFAIKEKLPSNFADVFIKFPPFENAYGAYSYKATRKLLQLMRWGDLWSYDSIDEKTRGRIDKILTGEYDAGIRDRVREKTIQLKEHSDFQGLPEWLATYIVYDRHAEAKDIKVWTKLEDLDNYIRQELKMGSLRNPTVERVVAECLKVVRELWKTYGSPDSRFFDEIHIELGREMKNTNEDRRKITEAALANEQTNLRLKALLQELMNDAEIENVRPNSPSQLEILKIYEEGVLSAYEKNLPDDISKISRMASPSTSQLVRYKLWLEQKYRSPYTGEIIPLSKLFTPAYEIEHILPKSRYYDDSLNNKVICESVVNADYKGNQTAYEFIASSMGRIVTELSGPGKTVKILALEEYEKLVKECYGKNRGKMKRLLMDDIPEAFIQRQLNDTRYISRYIRELLGNLVRGEDEQEAIPRNIVTASGGVTAILRQQWGLNDVWNSIIAPRFERLNELKGTPGKYGSINPRTGKFLPEVPLADQEGFNKKRIDHRHHALDAIIVACTTRDHINYLNNETALGKANKEEKQKKRYDLRQKLCFKKPNGTGQDGYSWEFIKPWETFTQDVRAILENMVVSFRQVNRVINRTVNRYTKYERNKDGQLEK

SEQ ID NO: 8729 - protein, 1047 aa, unidentified
  REGION 1..1047: note = Description of Unknown: Cas Enzyme sequence
MNKYRLGIDLGANSLGWCALTLGGEGQPNGILDLGVRLFADGRDPKTGTSLAADRRAARQMRRRRDRFVRRRETLMNALVRHGLMPADKAGRKTLEALDPYALRAKGLDARLDPHELGRALFHLNQRRGFKSSRKAAGGADEERGLIDSGIQKLKKELEVTGARTVGEFLARRHSKRDPVRVRPRGKGAKAEYDFYPQRALIEDEFEKLWVAQMRHHASLLTEEAKAEIRRLIFHQRPLRPVDPGRCTLDPSDPRAPRALPLAQRFRMLQELNNLEIVALDQTRRRLTRTEREKVFAKLVPAKELTFEQMRRLLGLEAGCTFNLESEKRRGLKGDATGRILSDKKRFGKAWWTLLEAKQDAIVETILAEEDEEALARIAHEDWGLDPEAAQAVARVSLPEGYASIGRRAMEKIVPILRDQGIVFADAARAAGYEPSDFRADGSEDELPDYREPLARHLVGASGNPEDPEDKRFGRFPNPTVHIGLNQTREIVNALIEQYGKPAEIVVELARELKLNRHQKDEVNKRQAGETERNEKFRAELASLGLPPNRENMLRLKLWEELGPVHDRCCIYTGAKISKEMLFGAEVAIDHILPFKDTLDDGVGNLLLCLKRANDYKGKRTPFAAFGQSADGYDWRAILLRAENLPKNKRERFAPDALERFNRGEDFIARQLTDTAYLARIAREYLGQVCPSNKVWAVPGRLTALLRGKWGLNGILSDSNLKNRADHRHHAIDAFVVACTDRSLLKRMSDAAVQARLDRALEDVPDPWEGFDRDALRDKVRAAVVSLRPDHGRQGRLHEETAYGLITDPAKEEGATVVYRKPFADLNENEVARIRDKALRMAVQDFIAAQKASGKTVKEALAAYAETTQYIRHVRLLKTEDPASLVPIRDRQSGEVYKAMSAGENWCIDLYAQPDGKWAGVPITLFQANQPGGVAAAVETARRARHLHPAARKVMRIHKGDYLKLEHDGIEKIMRVVRLEAKAERLRLAPHNEAGELDKRHNDPDDPFRWVFVSFNQLRLRAARKVAADPLGRVHDPGPTALRMATA

SEQ ID NO: 8730 - protein, 960 aa, unidentified
  REGION 1..960: note = Description of Unknown: Cas Enzyme sequence
MAWRLGLDLGTNSLGWAAVQLDEQDRPCGFLAAGSRIFSDGRDPKSGASLAVDRRAARSMRRRRDRFKQRQAALLKHLTADGLFPADEGARKALADKDPYELRACALDEKLILPELGRAFFHLNQRRGFQSNRKADRSKDEDAGKIAVGIDRLRDAMVEAGARTFGEFLHMRRASAANANAIPSVRTRLRPETGEGAKGDGYDFYPGRNLLKEEFDEIWEAQQPYHPDALTPKVHERLFEIIFHQRPLKAPPVGMCTLVPGERRLPKAHPLFQRRRLLEELNALMIVRPGEKAERLMPEQRDLLLLKLKDKRKVSFESLRKTLKLDPAARFNKESEHRTELKGDEVAAEMGAKTRFGTRWAHLSPDEQWTIIERQQDIESKEDEAAFEAWLTKTYDLTAEQAKAVTGARLPSGYGRFGLTATTKLIAALDRECDANGRVIVYSEAVDRAGLGHHSDRRTGEIFEDEDGRPALPYYGVALEQHIMPGTADPSDPEEMRVGRLTNPTVHIGLNQLRRVVNRLIRAYGPPREIALELARELKLSDDEKKRRNQENTKNRQEAEKRSAKLEELNQLDSGANRALLRLWEELNPGNVLDRRCIYTGQQISVDMLFSGVVEVDHILPFDATLDDSNANKIVCMREANREKRKRSPYEAWGHTSRWPEIAERAARLPRNKRWRFEPDAMQRFAEDGGFLARHLVDTQYLGRLARDYLTALYPEQGEGSGKVWVSPGRLTEMVRRKMGLNSLLSDHNLGAEQPKNRKDHRHHTIDAAVVAILDRGMLNGIARASGQGQDVYEEVKIRVPDPWPGFRDDLKRTLDTITVAHRPDHGTVSKAGLKKGHDQTAGRLHNDTAYGLTGETDAKGNGIVVHRVPLSSLKKPADIDRVRDPLLRAALHEFTAGFEGKAFEAMIADFPKMGPLDYRGIRRVRVTEPLSVIPIHDASGKAYKGYKGDSNYRYDVWEM

SEQ ID NO: 8731 - protein, 1450 aa, unidentified
  REGION 1..1450: note = Description of Unknown: Cas Enzyme sequence
MNKKTILGLDLGTTSVGWASVIEGETPDQSEIKQIGVRVNPLTVDEQTNFEKGKPFSINKDRTLKRGARRNLDRYQDRRKHLIMLLLDAETIAEETLLAEIGKNTTHQTWAIRAKAATEKIELGDFARVLLAINKKRGYKSSRKAKNEDEGQAIDGMAIAKKLYEENLTPGRLVFDILKTGKKYVPDFYRSDLKTEFDKVWQFQKQFHPEILTDAFYKALQGKGQRATSALFWTTYKFNTADIKDLEVGLKTEKTVKLNLRDKKKLQAYKWRAEAVEKELSKEEMAYVLTEINNNLNNSSGYLGAISDRSKELYFNHQTVGQYLYEQLKNNFHTSLKNQVFYRQDYLDEFEKVWETQAQFYPQLTKELKEEIRDTVIFYQRKLKSQKGLISFCEFESKEIEIEKDGKKVKRTIGLRVAPKSSPLFQEFKIWQNLNNVLIRKKGSKKRKAQKENAQSSLFDTEKEIFELVLEAKQALFDELNLKGNLTSKSIIEILGHRSQDWEVNYIQLEGNRTNKALYDAYLKILELEGYDVKDLLNVKSNKDEVELNDLTVLAAEIKKMVKSIFEVLNINTKILDFDAELDGKEFENQASYQLWHLLYSYEGDNSKSGNEKLYELLQKKFGFAKEHAQILANVSLQDDYGSLSTKAMRRIYPFIKENQFSTACELAGYRHSKHSLTKEELDNRILKPRLEILKKNSLRQPVVEKILNQMVNVVNALIDKENDQLEAEGKPRDFHFNEIRIELARELKKNAKERAEMTTNIDTAKKAHEKIFELLQTEFGLKNPTRNDIIRYRLYEELKNNGYKDLYTDTYIPREILFSKQIDIEHIIPQSKLFDDSFSNKTVVYRKDNLDKGNQTAYDYIESKQGEKGLEKYMERVESLFELGKKNKEEGISKAKYQKLLKRESEIGDGFIERDLRESQYIAKKAKEMLFQITRSVVSTSGQITDRLREDWGLINVMKEMNLPKYRALGLTEMQERKYGQQVEVIKDWTKRNDHRHHAIDALTIAFTKHNHIQYLNYLNARKNENHKLHGNIIAIETKETELKMDDNGNKKRVFKEPILNFRQVAKAHLQAVIISHKAKNKVVTKNKNKISGKNKEQTTLTPRGQLHKETVYGKYRYYVNKEEKVSVKFDMETVQKVANPLFRKLLSERLAANGNDPKKAFAGKNALSKNPIYLNDAKTETLPEKVKLTWLDEDYSIRKNVTPDNFKDEKSIDKVIDEKAKSILKKRLKDFGGDAKKAFSNLDKSPIWLNEEKGIPIKRVTISGVKNAEPLHYQKDHLGNDILDENGKKIPSDFVSTGNNHHVAVYRDEKGNLQERVVSFFEAVERVNQGVSVIDKTYNQHLGWEFLFSMKQNELFVFPNEAIGFDPNEVDLLDPKNKRLISPNLFRVQKFGSLLSGFWFRHHLETSVDVNNNLKGITYKVVQSANSLNGLVKVRTNHLGDILGVGEY

SEQ ID NO: 8732 - protein, 940 aa, unidentified
  REGION 1..940: note = Description of Unknown: Cas Enzyme sequence
MANRLWRLGVDLGANSLGWAAILLDENEEAEGILAAGSRIFSDGRDPKSGASLAVDRREARAMRRRRDRFKQRQDALLKYLTQDGLFPADPAERKELEELDPFALRARALDEALPLHHIGRAFFHLNQRRGFKSNRKTDRAAGDDAGKIAIGVGRLEEKIAESGARTFGEFLHRLRAGATDQNAIPSVRTRLRPETGEGAKGDGYDFYPGRALIEKEFHDIWEEQAPHYPGVLTPDVYERLFEIVFHQRPLKAPKIGKCTLIATEDRLPKAHPLFQRRRLLEELNALMIVRPGEKAERLTRQHRDALWSKLKQSKAVKFESLRKALKLDPDARFNKESENRTDLKGDEVAALMGSKTRFGSRWLDMPAEEQWAIIEALEKTESDAEVAAFRDGIERRYGLSPDQSRMVANAPLPAGYGRFGITATTRLIEALRDGTNADGRVIVYSEAVQQAGLGHHSDFRTGEVHDELPYYGAALERHIMPGTGEPSHSEEKRIGRLTNPTVHIGLNQLRRVVNQLIRAYGPPAQIAIELARDLKLTDEDKKRLNRENNENRLAAERRSRKLLEIGQPDTGANRALLKLWEELNPNVLDRRCIYTGQQISIEMLFSGAVDIDHILPFAATLDDSNGNKIVCMREANRLKRKRSPYETAADFRNRFGPDADWDAIAARAAHLPRNKRWRFEPDAMERFQTETGFLSRHLVDTQYLSRLAREYLASLYPDVGEGSGRVWVSPGRLTEMVRRKLGLNDLLPDHNFGGGADQPKNRLDHRHHAIDAVVIAIVDRGMLQAIARASGQEGQDGRERIVIPPPWAGFRDDLRTAVNAITVSHRPDHGTASKAGLPKDGDATAGRLHNDTAYGLTDRIDARGNKLVVHRIPITSLKPEHLIEGGGSAKPAWVADPDLRAALAEATQGRKDKAFTEAVLRFADAEHIWKRLRRVRILE

SEQ ID NO: 8733 - protein, 1439 aa, unidentified
  REGION 1..1439: note = Description of Unknown: Cas Enzyme sequence
LLKLLIMNNILGLDLGTNSIGWALVQQDFENKEGKILGMGSRIIPMDQKILGDFGAGNSISQTAERTGYRGVRRLRERHLLRRERLHRILHLLGYLPEHYDKQIDFTKRFGKFVEGVEPKLAYANNTFLFQESFYEMLEEFKKLQPEFLKNKNGKDGLIPYDWTLYYLRKKALSQKIAKEELAWIILNFNQKRGYYQLRGEEEEENPNKSVEFYSLKVVDVVADETKNSKGETWFSMHLENGWIYRRSSKTELFDWKDKVKEFIVTTDLNDDGTAKLDKEGNVKRSFRAPSPDDWTLLKKKTEKDIDNSDKTVGTYIFDNLLLNPKQKIKGKLVRTIERKFYKDELKQILLKQKEFHPKLQDENLLMDCIRELYRNNEQHQQMLSAKDFVHLFLEDILFYQRPLKSQKSSISNCSLESRKSKDGVVFPIKVISKSNPYYQEFRLLQWLQNLAIYRKEDDVNCTNELLPNQNDWEDLLEFLNTKKEIEQKQLVEFLLKRKHDIKKVPKTETEKYRWNYVEDKPYPCNETRYLMQSRLDKTEDVPTDFLTFEREMALWHIIYSVNDKIEYEKALKKFAEKHYLNVESFFENFRKFPPFKSDYGSFSEKAIKKLLPLMRFGKSWNWNEIHQESKGRIEKIITGEYDENIKNRVREKAEKFNLKTENDFQGLPLWFVQYIVYGRHSEANVSGKWNSVKDLEEYLKEFKQHSLRNPIVEQVITETLRVAKDIWTKFGNGAKDYFSEIHIELGREMKNTADERKRLTNLVTENENTNLRIKALLAEMALDQNVENVRPYSPMQQEILKIYEDGALSSENEVEEDILKISRTAQPSKSELIRYKLWLEQRYRSPYTGQVIPLNKLFTPEYEIEHIIPQSRYFDDGFNNKVICESEVNKLKDRQLGLEFIKNHHGYKVSDKVSILEVTEYEEFVRQNYAKNRTKRNKLLMEDIPEKMIERQLNDTRYISKYVSNLLSNIVRDDKEGSNDDGFNSKNLIPGNGKITTRLKQDWGLNDVWNDLVLPRFERMNQLTNSNDFTTWNEKHQKFLPTVPLEFSKGFSKKRIDHRHHAMDALVIACATRDHINLLNNESAKSDLKRYDLQRKLRTQETYLDKNGKEKTAFKAFIKPWANFTKEAKDALENIVVSFKQNTRVINKATNYYEKYVEKNGEKVKAVVKQEGTNWAIRKPLHKETVSGKVQLDRIRVAKGKILTATRKSLDSTFNEKTIGSITDTGIQKILQNYLMAKGGKPEIAFSPEGIEEMNKNIALYNGGKQHQPILKVRVFEQGSKFALGETGNKQDKYVEAAKGTNLFFGIYVDKNEKRSYETIPLNIVIERQKQGLPSVPESNEKGHRLLFSLSPNDLVYVPEEGETSDESKIDTNRIYKVVSFSTYQLFFIRQNVGTSIVNKEEFSSLNKMERSIEGAMIKEVCIKLKIDRLGNILKVTN

SEQ ID NO: 8734 - protein, 1085 aa, unidentified
  REGION 1..1085: note = Description of Unknown: Cas Enzyme sequence
MRWRLGADLGTNSLGWAVIELDEDDRPIGIVTAGSRIFSDGRDPKSGASLAFDRRAARAMRRRRDRFKQRQAALLKHLTEAGFLPADEAGRKALEGLDPFELRAMALREKLPLHHLGRALFHLNQRRGFKSNRKADRGKNDDSGKIRVGVARLHEAMRDAGAETLGDYLHGLRSASTDPNAIPSVRTRLRPETDEGARGDGYDFYPDRQMLEDEFGLIWERQAPHHPEALTAENEERFFEIIFHQRPLREPKIGTCTLVPGEPRLPKAHPLFQRRRLLEEINALRIIMAGANPAPLTPQQRDVLYLKLKDRKAVSFETLRKALKLDPDARFNKEGENRRDLKGDEVAAELGAKTRFGTLWQHLSDEAQWEIVSRIRAQESDEDEAMLVAWLRDAHGLTPEQANAVAGARLPEGFGRFGETATKKLSAALKADVVVYSEAVEKAGLGHHSDFRTGEVLDELPYYGAVLERHIMPGTGDPADPEEQRVGRLTNPTVHIGLNQLRRLLNRLIKRYGPPEQVAIELARELKLDEERKREINTRNRQNREAAVKRSEKLGEIGIADKGGNRALLKLWEELNSGNVLDRRCVYTGVLISVDMLFSGAVEVDHILPFSATLDDSNGNRLLCMREANREKRKRSPYEAFGHRADWEEIAARAARLPREKRWRFEPDAMSRFDAQGGFIARQLVDTQYLSRLAREYLSSLYPGSGDGSGHVWVSPGRLTEMLRRSWGLNSVLPDHNFGGGADQPKNRKDHRHHAIDAIVIGVTDRRLLMKIAREAGLRGHEAASRMTADLAEPWEDFSDEVRDVVRGIVVSHRPDHGTASKAGLPKGHDATAGRLHNETAYGLTGEKDEKGNDLVVHRVPLDALKKTDDIDAVRDTDLRAALHEWTFGLDGKDFEARLRKFPELGPLQFRRVRRARVIEPLSVIPIRDRNGRAYKGYKGDSNYRYDVWEMKDGKWQAEVVSMFDAHQPGWTSKIRKENPTAKKVLSLHRDDVLAIEPQGKVDLVRVVKFSEKQLALAAPHEAGALKARAADKDDPFNYLYPSPNTLKSWKARQVRVDELGRVSDPGFPARKAARRRPPKRAAAE

SEQ ID NO: 8735 - protein, 1068 aa, unidentified
  REGION 1..1068: note = Description of Unknown: Cas Enzyme sequence
MRWRLGADLGTNSLGWAVIELDKQDAPIGIVTAGSRIFSDGRDPKSGASLAVDRRDARSMRRRRDRFKQRQSALLRHLTEAGLFPTEEAERKVLEGLDPFELRARALTDKLPLHHVGRALFHLDQRRGFKSNRKAERGKNDESGKVRVGVTRLYERMRDAGAETLGAYLHSLRASSADPNAIQSVRTRLRPEKAEGARGDGYDFYPDRQMLEDEFGLIWERQARYHPDVLTPENKERFFEIIFHQRPLKEPKIGMCTLVPGEARLPKAHPLFQRRRLLEEINALRIVRAGANPEPLTLQQRDVLYLRLKDKKSVSFETLRKELKLDPDARFNKESENRKDMKGDEVAAELGAAKRFGKRWQHLSDEAQWEVVSRIREQETDADEKLLLGWLEETYGLTPEQARATVGARLPEGYGRFGETATKKLIEALKADVIVYSEAVERANLGHHSDFRTGEIFTDGKGRPALPYYGVALERHIMPGTGDPADPEELRVGRLTNPTVHIGLNQLRRVVNALVRRYGPPEQIAIELARELKLDDKRKQELNAKNRQNREAAVKRSEKLGEIGIADKGGNRALLKLWEELNPDNVLDRRCVYTGKLISVEMLFSGAVEVDHILPFSATLDDSNGNRLLCMREANREKRKRSPYEAFGHRADWEEIAARAARLPREKRWRFEPDAMSRFDAQGGFIARQLVDTQYLSRLAREYLSSLYPGSGEGSGRVWVSPGRLTEMLRRSWGLNSALPDHNFGGGADQPKNRKDHRHHAIDAIVIGVTDRRLLQRISREAGLRGHEAANRMTAELSEPWEGFSDEVRDVVRGIVVSHRPDHGTASKTGLPKGHDATAGRLHNETAYGLTGEKDERGNDLVVHRIPLNSLKKTADVENVRDPDLRAALHEWTFGLDGKDFEARLRQFPELGPLHFRNIRRVRIVEPLSVIPIRDRDGRAYKGYKGDSNYRYDVWEMKDGKWVAEVVSMFDAHQPRWISKIRQENPTARKVLSLHQDDVLAIEQEAGARKLVRVVKFGQNGQITLAEPQEAGDLKRRDAALEEVDPFKYFSPTAGGLKRVKARQVRID

SEQ ID NO: 8736 - protein, 1088 aa, unidentified
  REGION 1..1088: note = Description of Unknown: Cas Enzyme sequence
MKRILGLDLGTTSIGWAYVLEGENDEKSEIKQIGVRVNPLTVDEQSNFEKGKPFSLNADRTLKRGARRNLDRYKLRRKNLIELLKQSNIINNDSILTETGAASTHSTWKLRAKAATEKVELDEFARILLAINKKRGYKSSRKAKNEEEGQLIDGMAVAKILYNENLTPGQLVFQNLKKGSKLIPDFYRSDLQNEFDKIWEFQKSYHPEILTDEFYKALQGKGMKATSALFWTTYQFNTADIKDLEDSLKNEKTVNLSLREKKRLQAYKWRNDALTYHLEKEQVAYVLTEINNNLNNSSGYLGTISDRSKELYFNHQTVGQYLYEQLKANFHTRLKSQVFYRQDYLDEFEKIWETQAKFYPQLTKELKAEIRDVIIFYQRRLKSQKGLISFCELESKEFVLFKNGKKIVKISGSRVAPKSSPLFQEFKIWQNLSNVLIRPKGRKRGKSTDKQEYLLSTDDKKALFEELNLKGNISAKNVLEFLNLSPKDYEINYTKLEGNRTNQALYNAFLQIIDLEGYDSKSLLKVKSNKDEIDLSDITIPASEIKEIIQSIFESLNINTSILNFNAELDGDAFEQQSSYLLWHLLYSYEGDNSSSGNERLYELLEQKFGFKREHAKILSNIPLQDDYGNLSTKAMRNIYPYIKENMYSVACELAGYRHSKHSLTKEELENRTLKAKLDLLPKNSLRQPVVEKILNQMINVVNTLIDKENSQLEKEGKPRDFHFDEIRIELARELKKNAKERKELNASVNSGKSRHDKIIKILQSEFGIKNPSRNDIIRYRLYEELKWNDYKDLYKNMYIPKEKLFSKEIDIEHIIPKSKMFNDSFSNKTIVYKSDNLAKSDRTAYDYIESVGTEDDLNEYLKRIEYGYALGSKSKDSEEGISKAKYRNLLKRENEIGEGFIERDLRETQYIAKKAKEILFEITHSVVSTSGSITDRLREDWGLISIMKEINLPKYRALGLTEQIERKGGNTIEVISDWTKRNDHRHHAMDALTIAFTKRSFIQYLNNLNARRNDANGDSISNSKENVAIDTSRLKLSSRDVLGIEAKETIKKYDDNGNYKRVFKEPIENFRQIAKEHLESILISHKA

SEQ ID NO: 8737 - protein, 1032 aa, unidentified
  REGION 1..1032: note = Description of Unknown: Cas Enzyme sequence
MRSQPFMLTGGYIVKTGTSRRYRLGIDVGSTSLGWFVVWLNDKDEPTGLGPGGVRIYSNGRNPKSKESNAEGRRLARGMRRRRDRYLQRRGKLMMLLIQHGLMPAEESARKALEALDPYELRAQALDAALPTHHVGRALFHLNQRRGFLSNRKTEKGDSESGAIKQAAAKLAALKQEAGARTLGELLAGRHRSRLAVRTRNTGTGARVEYDFYPTRALLAEEFDAIWAAQAPHHSAMTEDARAAIRDAIFFQRPLKQPPVGKCSLDPAHDKDDAEGFRCPWAHPLAQRFRIWQEVRNLAVLEAGKPAGPLSKEDGDKIALGLIQNNKLSFDKMRGLLDLPPEAKFNLESAKRGELKGDETAAVLSAKKYFGKAWRSLPLLRQTEIVDKLLEEADETALIAWLMAEAGLDAEAADRVASAFLPDSHSRLGLRAIRKILPLMEGGLNYPAAATQAYGDHAKLPTGEIKDYLPYYGEWLQDDVLGSGDPRDGNDKRWGRFPNPTVHIGLGQIRRMVNALIQEYGPPEQIALEMTRDFKLSPTRLREVEQEQADNQKKNERRAEEIRKLGQAVNHLNLMKMRLWEEQNPYDPLDRRCPYTGEVISIERLLSDETDIDHLIPFSYSLDDSAANKVVCMRRANREKGNRTPFEAFGHSNGKPYDWTEITLRAALLPKGKCWRFDPDARAHFDKIGGFEARQLNETGWLARMTLHYLAAVTNPYKIHVLPGKLTAMIRGKWGLNTLLPDHNFSDAKNRKDHRHHAIDALVAAFTDRRLLHKMSSAYDAERQKIEIPLPWPTLRDELDTRLKAMTVSHRADHGAARQGGHDSTTGPLHEGTAYGVVRSPDKEDGANLVYRKAFRDLNEKEIARIRDRRLRDLLSAHVEAEKRTGKDLKASLLSFTQRTDMPGIQQPIRHVRLTKPEKPEYLVFVNDRTGTPYKAYSAGENACVDIFETTDGKWNGEAISVFEANQPGMRPAWRAGQADARFIMRIHKGDLINLDLEGKRTVMVAHRLDASANRFKLAAHNETGNLDQRHA

SEQ ID NO: 8738 - protein, 1290 aa, unidentified
  REGION 1..1290: note = Description of Unknown: Cas Enzyme sequence
MDMKNHLLTKGNDLPPYDIVWAFDLGKGSIGEAVRRGNEFLHKASLLIPAELARRGPATSSGTPASRYRMLQTRRAHERREHWLDIVWEAAGLKPLISRTVELVDYEVRKVKKMVRGKTRWKTKKVGGHWVLKHEADKLLEKEFGSKNDSIYYTSCALRIRLLNEHKLETWQLYKALFSAIQKRGYAKVPWEKEQKASDKNDKNAIEEAENIIAGKRWTDFAQHPEVAKLGDAFKRACYFDAWHMKLWNPANPKHIELRSDERPESTQKVVFPGRVIAEEVLCLAENAAKQEPKLNEAFDKIMEDWRENVKRRFARVNGHRVRLGKKPIHEPDFSLGARNFAELLAFGPGGSPKTAKEGVRNIPSHDAATRRATGIRPGGTDDAMGTLNQEVARFDNRLRSPCALIPRLTVCRNLAPEEIPAIKTDDHEKLLPAQVTLLMKLKDMRVEEREATRKQRGLTADELREIFEKLNPQRKYHLTKREWRTWCGHLNLLPVTDPDEKNAAKKPDANAEAGEKKKSDELAVERPRAAGRARFSRPALRLLKELLLSGEDPLVFHKKLIDRNDELLKRLNLDVLDKEPVITKKDAGGNDYITYIKHPRPWLLVNDLDFLLRMGKDGNLFIPTQQLDRLAQESDASIKEREIAIRTLIGQQNNPIVRHRLETFWKRLQKLETKFGEPKRIVLEFVRDDSESSWLGSEAIVEITKAQKEQRERRENARKMLADMGQPNGDVLKYLLWEAQGGQCLYGVDGKVKEEKLNPATGESFARCLYIDTALPFTSLNKYRIDHIVPRAKGGPNSFSNLILTTDEANAAKGDRTPWQWFRQDRSLAEWDAYKERVLRRYKDLGGKKVRLLLSADAEKLVERHTPLVETAWIARLAQTVASLHFGWANGNDSEGRKRVTTVSGGLTGRTRKKYFLNSLLGRNRELDKNISEKLTALAELKTSTLTKEEQKAQARILRAELDELNTEAEKARDDDRHHALDAMVLSFLEGWVNDPKREDEFRFDMLGDNPPYPPQLKTEIGQLRQRIIAFESALGKAASADDRARINRQIIACRDGLAKMRMSRNPLAVREAFRREIDGDENNGIKPILPLWLHYPKPELKAAFHRGVWLRVESKSLAARATVDDFATAFEQERIALAGLPYFENHVTEAMEYSVAHGVRRIIEIVAHKDYDSKAIGLCVEGFLKTAPAEAQWKKWCASSAAPTGIKPKKGQADNREFYFYKIEEARTKRPQETPSSKASLYSIGIGTNEVPEFDRTHFETQITRLVCRPERGADKPGIPLQPDSELQ

SEQ ID NO: 8739 - protein, 1426 aa, unidentified
  REGION 1..1426: note = Description of Unknown: Cas Enzyme sequence
MQRLGLDLGSSSIGWALREDNKIEKRGVITFQSGMMKGQTGGYTSPTRDRRTARSKRRLIQARKYRKWELLKILLNESAPLDKTELEIWSKYKKEQPQRFPENEKFLNWLACDFSYEGGVKYTNPYELRVKALDNKLSKHEFGRALYHLVQRRGYKDIGETDKETEKQIERRGESGFQDALKANRTVAEALTKEFLDKGKRARNQYPYREEYREELELICKGQGYDISKNDKNEYNNDFVQQLWKAIIWQRPLRSQKGNIGKCILEPTKSRCPVSHPIFEIFRAWSFINTIKYYDDKDEKQSLSPDSRTQLFELFLKKDKNFKFEEIRIFLDKQLKSKKKYNYPIDNKTGKYDTSVSGMPVCKGLIDVFGDELKQAMSSIHTFNIGNAQKIVQGYSIYDLWHVLLEFDASHLKDFAIQKLYVQNQATKKGEEFNPFAKLKNNITSGYSDLSLKAMSKIIPFLKEGYLYNESVVLAKIPELMGEKWESEKEKIFESIKQSNKIYTWNKNIVSISNNLIDQYKGLEHEEKFAYKDFKYSLDSDDLNNVTKACQGHFGEKSWKDRTDKNKIIESVKEHYQAFFKDQKRSYRAVPLLTDLFKEKLQENKINIDQKLYHHSHKENIYGNSVTDKKTGIQILPEARIDSIKNPMFNKAMSILRKMINELIKQGTIDEETEVVVEVASDLNDNNKRAAIDRYQKLRRDNREKYREFLKEFKEKEKRDINVEVSISTFEMWTEQTFDEIIDEKVKKITNKNNIDILKEKEAVKRYELWMEQKGQCMYTGKMISITQLFSTDIDIMHTIPRSLLPDNTMANKTVGFKRYNSDLQKQKLPTQCDNYYKDVEGWGTRIEPRLNAWIDKRDNYKKQYEDRLKPKGNEDEKTKNTRIQEKHYLKMHFDYWHNKIDRFTADEIKDSWARRQLVDTQMVSKYAREFLKTYFKKVAVQKGIVTADFRKIYGFQEEEEIKSRNRHTHHAIDAAVLTLIPVNSSHRDKILKKMYENAESGKGQYTTSPFQGFNSQKLIEDIDNNTLIVNYENENILKQTYRNIRKRGRLQYLKQDDKKIQLKAKGDTVRSSLYKDTFLAKIRDVERFKDGQPMHEAGDWKYKQGKEEFIFVVRKPIQDVLSKIDDIVDPIIKELVRKQKNNNEIKDYQGNIIRHVRIKTKAGQPVKERVNYRSNHNHKNHYYSAAGSIPYSILLQKVNEEELKREMIPIASFEVAKMHKRSGSFDIGQYVQELYPEYVGWNTKLLKVGQKLIVLNNDSEYENRKNIDFQTKRLYVITQFSEGSIWLKYHLEAQSKDEIKDTISRLKNNLLREYEVEIGIPQVKEDVSILDTKKRKDDYENRKYRFDTINNSFRLKSVSEKIGLEETKKIKSQLDKFKAISGSIEIEGKTPLLKMSKENWNFLYEGEDFEVSLLGDLKLKEVVNL

SEQ ID NO: 8740 - protein, 1731 aa, unidentified
  REGION 1..1731: note = Description of Unknown: Cas Enzyme sequence
MSKKILGLDLGTNSIGWALVEIDYKNKIVKILGLGSRILTMDASEIANFESGTKIASAAAQRTEKRSPRKLNERFLLRRDRLHCVLNLLNSLPQHYKLSIEFENKKGKRSGKFKKGVEEKLAYYKDENGKSQFLFKDAYYQMESEFKKLHPEIFYNKNNGNQTKIPYDWTLYYLRHKAVTDKDFKLTKEQLAWITLSFNQKRGYEKVIGQEEKIQKEGELTDTFVGKVKSVNKIKGEDAYEIILVDNNNENSELFRYKEETKIPITEIGDLKEVEIVSKYDDAGTIDRNKTEYIINEVREFLITNVHNTGMKRKDNFVFNVELETGWIKEQQSKFTPKWKDTKRDFIIKTKYDEKGNRILKGMDKGRNINIPKEEDWTLMKLKTETSLTSFNAKNNTKGVASFVYYNLLQNPKQKIKGDLITVIERDYYREELDAIYKNQEKFHSELRKENRALYEQAIRLLYPNNSNHQKAIKELDFNYLIKDDILLYQRDLKSKKSLIADCVYEKENFERTNEKTGKKYKMPLKSIHKFNPLYQEFRLWQFIKRLKVIKKEDAHNEEIKINIDVTAQLLTNEIKEELYGVLNDKESVTEKDILAFLNKKSKSLSISADNYKWNFTSEKEPCNPTRYNFILRTKRIKGFKYKLFLSPENEYSLWHFFYSVKKRSKDNKELTSLIGKLLDKANLSKEYQAELVKNFSSFGGYTNDYGTYSEKAIKKLLPFLKLGKYWNAKDVEAILSNANHEVKQKVLDKEEISGEVKDFQGLWLSSACYLVYGRYSEVGEVQFWQSPYDIENYIKNEFRQHSLNNPTVEKILVETLHVVKDIWKYYGEEIGTDGEGRIIYQKLFNEIHIELGREMKKNNKQKERDDKQNKENRKSNERIVELLRELKRNNTSLQEKSPFQREKLRIVEETLLSSIEYDKDNTEYKLANGKITKKEIREITSKEFSKISRGDFERYKLWLDQRYQSPYTGRFIKLSDLFDSNKYRRDHIFPQERITLNSLSNLVMCETEINDLKSSRTGYGFVQQYQGKEIKCAAYGNEPVGVISIQQYEELVNSSFSGKKREILLSKEIPSEFTNSQLNNSQYISKMAMKLLSNIVREKDEDTFRSKNVLATNGTITTTLKRHWQLNDAWNEIISPRFMRLNELSSSNLFGDYREINGHQVFINEVPEEASKNFDPKRIDHRHHALDALVIALTTENHVNYLNNISSQENSEEKLKTRKGIKFLLTNSKKGFNDEKEWYFLPPAQIKSKDGIEEYEYQFKDIKSKVFKEIAQNALENTIASFKQKNRVIRQRWNKYIKKENEELSIIKQDGLKQVINYNVRKPLHLDTFYGKVKLNDKTTFVSLEKALIEHFDFVDKQLTNQVNELKKEKKSIKEISEILGNKYSNVKVYEKFVATRFGNELESFSQVASDKIIKIIESVTDTGIQQIFKNHLYKFDTLVKKIEEIAESEYVDHVVDGEHQTALKALLEENSNPEYIILEGKEIRETEIFIKDLKEEIEDRALIKHNPQLAFSPDGIKELNDNIIELNNGKFHHAIRKVRMADAMGTKFSVSEEGQKSTKYVVTAGGSNAFCGFYQKGTDRKFHIPTLRESVESLKEGYEPCPSTHPDDSSFKLLFVLNPSDLVYVPTDEERGNTNLVDFKNLKKEQVNRIYKFTDGSGTTMNFTPANVANLLFNMSNNDQRKVGIKLPIQNELGLGSPQSKNQNSLDGVQIKSICWKLKVDRIGNISKA

SEQ ID NO: 8741 - protein, 1371 aa, unidentified
  REGION 1..1371: note = Description of Unknown: Cas Enzyme sequence
MNRILGIDLGTNSIGLNLRENDEFIWYGVYTFRKGVGEGKAGEFSFAAERTKHRSSRRLYNSRRYRKWETLKVLIEAGFCPLSIEKLNQWKHYKKGIGRVFPVDDSPFQSWIKLDFNGDGVSDYASPYQLRRELIFKKLDLTIPENKYRVGRALYHIAQRRGFKSSRKSGTNEKAAVYKGSHETKTIGRNEYESLIIENGSLGAAFAYLEDQGIRIRNRYTLRSDYQAEIISLLDHQDIIDTNFRENIQKSIFFQRPLRSQKGLIGKCTLEPSKSRCPVSHPRYEEYRAWSFINNIKYRTNSNLHFESLPLPLKEKLYNEKFFLKSKDFEFSQIRKFIKTHGGKDWELNYSHKMDDISVSGCPISARFKSVFGDEWQKFEKTVVRKNKKGGDETITYRIDDVWHILFSFEDEEYFEEFLGTVLDLNGDQIKELKTLFNSFPVGYANLSLKAINNILPLLREGLIYSEAVILAKIPEIIGTDLFAKDKTNILEGIKNVITSTREDKTRTAIVNNLIFKYYALDNTEKFGWKNASYELAESDLNDIVAAAKEHFGERTWAAKCENYKQSLLQYVTQKYQDFFSSSKREHLKPPHLVNAVKQFIADNFKIEAKKLDYIYHPSQIAIYPKKEGQEYLLSPKTSAFRNPMAYKTLYKLRAVINYLIETGKIDEDTRIVVEIARELNDSNKRWAIEKYQRDREVQNRSFAVAIGELLKEKNFKGVVNPNSDTDVDKFRIWTEQLEQYDEIKKEISSIENNKKLSVSEKNIQKYRLWKEQNCHCMYTGRLISLTDLFDVNTIDFEHTIPRSKSFDNSLANLTVCYADYNRSIKNNRLPVELPNYDSESHGYSAIKPRLEAWENRVDELYKQIDFWKMKSTRAIDKSEKDDAIKQKHLRQMDYDYWKNKLDRFTRKEVSTGFVNSQLVDTQIITKYALHYLKTVFDKVDVIKGSITAEFRKIYGIQPKEGIKDRSKHSHHAIDAAVLTLIPSPRKREEVLKKAYEYEEQSKKKQYHEKPFSAFNYSMIEEIQNNILINNLAEKNNVLAPGKKIVRKRGKIVWLNKKKKIFKVATGDSIRGELHMQTYYGKIRMVERNDSGVPLRDNNNNWKFLNGTDEYKYALRIPIEDLSALDKVVDPHLAKMIENQLNGRSLKKAIAEGIFMLDKNGIRVNQIRRIRTWQSVDPLQIKSQTYKSAMNYKNYYYAKNAENYAFAFYKNKDGDNTVVPLNLYQISTFDDQNSICSLKELFEEKVFNKKGIEIPLYHVFIPGQKVLFYETEKEELKTATNLTNHLYFVKRLYQANRGNIQFQHHLEAREDKQLLEDFPEKTFGKKGSNGFSKFSTDFIAPRLLLSPGNFDFIIEGKDFEMKLDGSIEFKY

SEQ ID NO: 8742 - protein, 1019 aa, unidentified
  REGION 1..1019: note = Description of Unknown: Cas Enzyme sequence
YKDEIKCIFQFQGIKFESDLFKTLVESGKNKNDGRIFFKRPLRSQKGLIGKCTLEPNKYRAPISHPAFEVFRAWSFLNNIKYKENIGWKQLPLELKQDIYHEFFFRKSKAYFSFSEIVAFIKKQGKDWQLNYSSKTTVTACPVSARLKDIFGDDYVNVKIKKAKAPKSDKAFYDIEDIWHVLFSYEDQEYVAEYAASKLSLDSEKTKQFITAWNACPIGYGMLSLNAIRKINVFLQKGLIYTEAVLLANIPEILGGKFWRDNEKLLLNSISEVVAENRQQKAILNTANNLVSRHKNLEATEKFAHKDNRYKLVESDLNDIQTAIEEQFGTSRWNESPNDRKRVIFDTIKDCYQAYFSKQGIVRDNGNEERVVSVQSNNKIYNKTESGYYQLPKLIDTLREFLQDNFEHLDKRKLSQLYHPSEINIYPPAKEVDGVLKMGSPKTGSFKNPMAMRTLHELRKLMNYMIETNQIDTETRVVVEIARDLNDANKRWAIEAWQRQREAENQEFAEAINQLLKENKTVKANTESNDDIDKMRLFYEQNTDQTLPEVFEVDEGESGKKKRKRSSGKDEAIRWSGHGKKLIDKYRVWKEQGYQCLYTGKFITLTDLFNENVIDFEHTLPRSKSFDNSLANLTVCYHDYNRTIKKNQIPADLSNYDKDFDFGGSIGKCSAIKPRLAAWIEKVKRIQQQIDFWKTKSKKAADKSWKDDAIRQRHLWQIELEYWQNKLDRFTITEITTGFKNSQKVDTQLISKYALHYLKTYFEKVDVQKGSITSEFRKIYQLQAPDEKKDRSKHSHHAKDAAVLTLIPVAAKRDAILEKYYEAKENKTSFIAEAPYNGFKREFVWGIDDNVLINNITNNQELTPAKRKVRKRGKEVFIEKPDGTKVNKWATGDSIRGQLHQETFYGAIRPALRGDKGNLLKDENGKFLQEDLKYVLRVPFNEDFNSVDKIVDEGLKKQIKEHTKRAGGFKKAYEEGIYLLDKSGKPHGNRIRHIRVWASVSEPLAIKKQTNLSTKEYKQ

SEQ ID NO: 8743 - protein, 1046 aa, unidentified
  REGION 1..1046: note = Description of Unknown: Cas Enzyme sequence
MKRLLAQLGILTPSQLDEPGGPWPWKLAARVHAGGPLLSWRELWDVLRWYAHNRGYDGNRKWSRDDEEDADDTEKVKAARALMEKLGKPTMCQTICAKLQIDPLSSDKKTSSIAYKTSNAAFPRDVVRDEVMGLLEKHVGKLPQLTPALITALCAEDNTPKDGQSVRDVLKSLGFDAHLPGRFVGGLLFGQAVPRFDNRIIGECPVSGEKRPLKDCREYLEFRWAEILANITVRETKDGDKRPLSAEERAQLTELARAEGGFTAGDFKKAVLKVSGASFSNAELMMTHPDAEEALVLDPAKRFTVTNGMMKAVWAVLPPILQKRIQGRWNKRRRVSWAWVLQQPESPTGLEAKLQAAWKETKRKTRKGDEEPKWEDRVKLSLAPVYPSGRAPYGREVMKRVVEQVMDAKMHPRNPGGVLDAEIIKKHDLAKEIDELTNNHLVRHRLKILLRLVDDMVKTYADGDATAVDKCVIEVARDLVEFSGKTNKEVASELGIKLKNFKDVSKRLTSDLEGTSIPIGAGLIRKARIADDLAWTCPYTGKEYDAVTLARGKVDKDHIIPRSLRPSDSLDSLVVTFDAVNKWKANRTAWKFIEEEQGKTVPGRPDLTIVTMKQYEAFVNKLAGEKKPSRFTPGQGSLDDKLRQWSRKQKMLLKDYEEKEFTPRDLTVTSHLVRLSARQIEKRFVHLQNTDRIVSIPGSVTGVVRKAWNCLGCLAPACPEVMEMRPTIGADRQLVLGADGQPSLSLQVRPKGDIRDITHLHHALDACVMAFACHFMPKDGKLWEQIVTRKVLKHDEEAFRERYGWHGLLKLADPKDEAARGKTRKLEVLDLPDTFKKQIVEALKERRVVQHVPADMSGARLEMNTWRVMKTEGDQVHLRQRTFGPKDIDPETGARKRTTKEAKERASKLVGLKDGKLSALKGALVIGENYGVAILNAANVVNEEDRYRIMPFHQVKKQMEELKKVNNGHSPLVLRSGQLIHVKSGGYAGTWRIFSVKNNTSGMALDIGLPDVTRLKNGTLGHKINVLLKSLVKAGITPLNHDLIGG

SEQ ID NO: 8744 - protein, 1063 aa, unidentified
  REGION 1..1063: note = Description of Unknown: Cas Enzyme sequence
MKKILGLDIGIASVGWAMTEIDEEKLAQIDPETGEVTLRGKIIGLGVRTFTQAENPKDGKSLALPRREKRSQRRRLRRRRQRLDQLKELFIGHHLLSAQEIDELLKPQAFLQSPWQLRAEAIDRLLTKEELFRALYHLAKSRGYKPQKGDISDEKAQKEDGAVKEAIRHNNQLLELSGFVTFPQLLVSNNQQPDPVFRNRDGSYINSIPRPMIQQEAQLILEKQVNLGASYITTQFITKFNNLAFTQRSAMDRKQMEKMIGHCIFEKIERKAARNSYSAELFVLLTKIANLNLRTIDNPEKIELTHEQKNKIRELAYQQKTVSYKTIRNCLDLENQLIFKGLSYSSQKTKGGKEKDPESEKFIELKGYYEIKKAYEGFGTEEFHSLLKHPEKFDQICEILTTTKTEEESLAELKQIVPAAIAEKLKNISFSKYIHLSLKALSKINPYLQQWHNYAKACELADYRHYDPNSESAKFDFLPSFEELRDKDIVFDEIRNPVVHRAVCQVRKVVNAIIRQYGRPDQINIEFTRHAKNSFKKRQEIRKGQEEYKEEKEQAKKQCEAMGLNSDEGDNLLRLRLWRQQDEKCVYSAKDIRIADLQNPQALEIDHIIPYSRSLDDSLNNKVLCLVQENRQKRNQIPAEYFGIDTPKWEDFKQRITASALPKPKRDRLLKLKIEEEEKFIERNLRDTSYITRYTADYVRNFLRLTDRKNIKNTVQTRNGSLTAFLRHHWGFNKNREAGDQHHALDALVCAVSTQGMVQYLSRYTSRLEEKGKEWLKKFAYQSHVPVPWGNWESFREEVKEHLEKIFVSRAPRRKASGPIHDETIRSTKKLQSDGVSALRTKLANIKAKNADDLDKLIFDTDRGSNSVYQVLLERLQQHGWDSKKAFVNDLHMRRRDGTDGPVIKTVRLQNTQKSGMTVRQGIADNGDMARVDVFCKDKKFYLVPIYLKDFTQGILPNKAATAGKEENDWRVIDDTYQFIFSLFKDDLILVKKKKEPEVFGYYTGMDRAAASINFDQYNRVKSERGWGVQSLAIFKKYQIDVLGNYHEVKGEKRQPFGKPKVA

SEQ ID NO: 8745 - protein, 1553 aa, unidentified
  REGION 1..1553: note = Description of Unknown: Cas Enzyme sequence
INKEEKKILGMGSRIIPMDAAIIGDFDKGNSVSQTANRTKYRSTRKLYERHHLRRERLHRTLNILGFLPKHYADEIHFTDEVVNGKTIKKYGKFKEDKEPKLVWKPYGKKENGKNKFEFIFQESFQEMIEEFKKTQPQIFYEKQNGEKTKIPYDWTIYYLRKKALTEKITKEELAWLILNFNQKRGYYQLRGEEEEINDNIKEFVIALTISKIEKGEVDKKNDKRTWYKMTLSNGWDYSATFTTEPKWENTEKEFLITEEYDEEGNIKIVKEKKSDQTGKEKRRITILPTFDEINLMAKKDQDKIYGKIKARTELTINNSKTTVGTYIYDTLLQNPKQKINGKLVRTIERNFYKDELRAFLKKQIELQPELFTDDLYNDCVRELYQSNEAHQLALSNRDFEHLFLDDIIFYQRPLKSQKSSIGNCSLEFLLHKINKKDEKGNPIKNVFEQDSNGKDIEIKDNLKCIPKSNPYYQEFRVWQWLYNLKIYTKTDDVDVTTEFINSYQDKDNLFAFLTTQKEVNHKDLLVHLLTPVLKEKYPNAKSKAFNSELQKEIAKYRWNYVFDDAKEKEEEKSKKYPMNKTEYEIRTKLKKVANVPDGFLTAEKKYQLWHIIYSVNDKNEFEKALETFAKKNALFYEQEKDEKGNRKDNESCFIKCFKNLVWVEKDYGSFSEKAIKKLLPLMRLGKHWNWENIDEKTKNRIANLQTAEVDASIRDRVREQVQKEKLDRNEDYQGLPLWLAQYIVYDRHSEASDTGKWHSIEDLKTFLKEFKQHSLRNPIVEQVITETLRVVQDIWEHYGERAENFIDEIHIELGREMKNTAEDRKQITNQVTGNENTNLRIKALLMEFANDDSFKNTEDFKNEEGKTPDFYKKGNNPVRPYSPTQHDILKIYEEGVLNSIKNKKYEDSEKLKKEKDDEMLKIGTTAQPTKTQIEKYKLWLEQKYRSPYTGKTIPLSKLFTPAYQIEHIIPQSRYFDDSISNKVICEAEVNALKDRLLGLEFIQKHYGEKVQTIFGEVEIFQVDAYKSFVNEHYDKNRGKKTKLLLDEIPDKMIARQMNDTRYISKYISSLLSHIVRADKDDDGVNSKNIIPGNGKITSILKQDWGLNDVWNGIILPRFERMNQLTQTTAFTSINKEGHLIPAIPLELSKGFQKKRIDHRHHAMDALVIACATRDHVNLLNNQSAKSENSRYDLQNKLRNKEKWQDKNGIDRDKFTEFKKPWNNFTDEAKNKLEEIVVSFKQNLRVINKATNHYEKIENGKKLKVVQKGTNWAIRKPMHKETVSGKVDLPRIKVPKDKILTATRKAVDTSFTSKVIESITDTGIQKILLNYLNSKNNDSELAFSPEGIEDLNKNIEQYNDGKKHQPIYKVRIFEVGSKFQIGQSGNKKDKYVEAAKGTNLFFAIYQDENGKRSYYTIPLNEVIERQKQGLSSVPEKNDKEHQLLFHLSPNDLVYVPEEGESFDVKNLKKDRIYKFTDGSGTMANFIPVNIAEIIFNLNKDKQKKAFGKELYPIQNEIGIGSQGSKNENTITGEQIKAVCIKLKIDRLGNILKA

SEQ ID NO: 8746 - protein, 1343 aa, unidentified
  REGION 1..1343: note = Description of Unknown: Cas Enzyme sequence
MGNGNELIVGLDVGSNSLGWAVVEMNGDKLEKIHGMGSRIIPMGPELKDFEQGNSITKNAVRRQKRSMRRNNQRYKLRRANLVKVLEELQAMPEGLGELAVRGERMLTSMELYGLRAKAVTEPITLLELGRVLYHMNQRRGYKDIGDLMDEMHGVDKKDDLDKKVTREVEEVLVKEVALDDDKGKVEIYSVTLGDGRIGTTRSRSFLDLVGSKEYIEVKTRITLKGESIEFYRTNVTDWKKDKDNLDSMMEECGLHPGQFFFKEFQKDPLNRIRERIVLRERFREEFKAIWTEQAKAHPVLVDPAVRDRVVHALVPNNKKFQDIWLTKDLGTIVRDHVIYYQRPLKSQVSNKGMCRFEPRKPVVPVSSPVYQLFRIWQQVNNIRLVDRYMREEELTAQERNIVVQHLIKHIELKSEGLTKVVGRGKEEKENNLRANLPGHQTLVKLRPMLKKEDVWKRLEIEALQFKDVESTMLFKIWHILYSVPEAENRRKGLARLLGVSDEVIEKLAAVRFERKHGAVSSRAAARILPLMMCGEAVAIEDIHSRDQRRIQAVIDQVEVKGLSEEMKAKLADLTSLEQFQGLPYWKAATVVYGDHRAVAAKPFGSPDEVKSLQRGFLRNPVVEQVVNETLMVMRDVWKVHGRPTSIRVELARELRQNQQQRSKTHSRNQARDKERSGVRQVLIDEFNRPKPSRKDIEKYELWKQQKHQCIYSGKPIEVTQLFDTREVDIDHIIPQSKFYDDSIQNRVLCFRTENAGANGKNKMLAAPYMKAKGPAEWEAYVTRVNSWGFGWGKRKYLMAEEVPESFINRQLQETRYIGTEVRKHLERFATTNATLGIVTDVLKDEWGLNKVYKEVLLPRFERLERVVGRKLIDELPGRNGHQDWRIEGFSKRIDHRHHALDALVVALTRQKFIQRLSNMNQVRLSEEEKEAMKSPTWYPLPHPKLRSMVKEQLERTIPSIKNRQRLLTRSTNETQFLKNPDTGALGKKRQSKGDVFAVRGALHDEQPMGEVREQRRWPLKNVLKWLYEQPDLESVLQPLEKKEPAHAKRFIAHEHERALLAGHFAKYEWDVAQFKKGLKKDPLVNGKNEEIQAITVLETKFAAVRTLSPMFSLPMVEKIIDRSVRKRVADHLKAFGNDPKKAFAGDGLHMLNDGQAQKLNKVRCIAFDTNIQDTKGFTPLHHKDDPNTKQHVKKGENYALVVWVNEETGEREFDVIAFYDAVERQLKGIGLVDARPGWRHFILRKNDMVYVPRPDEDARTIDWNNTEKIGERVMRMTKMSGNRIYFLSTAISQTVDFSKTEQEFGSQGATEFEDRDEPRTKINSVCIPMKIDRLGQPVALPF

SEQ ID NO: 8747 - protein, 1016 aa, unidentified
  REGION 1..1016: note = Description of Unknown: Cas Enzyme sequence
MGTIRYRLALDLGSTSLGWALVRLKDSEPVALIRAGVRIFSDGRNPKDGSSLAVTRRAARAMRRRRDRLLKRKHRMMALLLKHGFFPTDITERKALELLNPYELRAKGLDKALTPAEFARALFHINQRRGFKSNRKTDKKDNDSGALKTAISTLRQQLDPSGADGKARTVGELLWRRMQAGQEVRSKNKSAKPNKVQYDLYIDRAMIEAEFDALWAKQSALTPSVFNETARADLKDCLLHQRPLKPVKPGRCTLESDEERAPLALPSQQRFRIYQEVNNLRILSDDLRDQPLTREQRDQIVTMLERPKKDKKTAHEVTFDQIRTALKLGGNTKFNLEDAKRTSLKGNSTSSNLSKLNLFGPNWVTWTLERQDEIVWKLLTEESEATLITWLQNEFGFDETRAEIIANTGLAEGYGSLSRKALARILPLLQAEVVTYDKAVQAAGYEHHSHISHAATGDILPALSYYGEYLQRHVGFGTGNPDDPPEKRYGKIANPTVHIGLNQTRVVVNALIKRYGHPSEVIVEVARDLKQSREQRKEDQEQQAKNQKRNERLRGDAANILQISPERVKHADIQKLILWEELSSDIAERRCPYSGVQIGARMALSDEMEIEHILPFSQTLDDSLNNKTLASRRANRVKGNRTPVQAREDFEREGWTYDAILQRAERMPKSKRYRFGPEGYEKWLREDKDFLARALNDTRHLSRVAREYLSLICPQGTRVIPGRMTAMLRAKFGLNDILGLQGEKNRNDHRHHAVDACVIAVTDQGLLQRFAQASASAREKQLDKLVDAMPLPWPTYREHVERAVRNIWVSHRPDHGYEGALMEATAYGIRKDGTIKQKTKVDGSEGREIKNLVRISEPKQPTRHGVNADGKPLPYIGYVGGSNYCIEIVRNDKGRWEGEVISTFDAYQLVHQQGKQRLRHPTESISGKSLAMRLVIDDIVRMEIDGEEQTLRVVKVAGSGQIWFAPLNEANVDARNRDKTDPFAYTSKMAGSLQTSKTRRVTISPIGELRDPGFEE

SEQ ID NO: 8748 - protein, 1766 aa, unidentified
  REGION 1..1766: note = Description of Unknown: Cas Enzyme sequence
MNKNILGLDLGTNSIGWALINKEEKKILGIGSRIIPMGDDKGNFEAGKKITRNATRRIARGIRRGNHRYKLRRNKLLFALYKLGMLPNMITFGFFKRDEHGEDNKVIDQFPIPHKLQKLFVEPIRKGHKNFKGDTALSILELRAKALNEPVSLKELGKIFYLLNQRRGYNGGGEEDEKEVQNQEGETQKVKKIYKELKVSKIEPVQHCEEIKVDKTKKRFPIYKIKVVNIETGEQTEGFSIKELSKDTESVFTYTKSSPESKQIRFHFADDEIKFKYDGSSIVSETFNGKVLECTPMYEFRKKKWVYEIEIIDEEENEEDRIGNGLLLLKHTKNLEKIKRNELIEFEINITTKANQNKEFEFLLPNKTSWKKNLESIEKTISENKKIKFNNNELDATGKGNYHICHFFLEKIKKEDGAINTDYKIRDNVILRKRYIEEFNAIWERQISANPEFKKLTEDKVLLEEIINYIFPERDASKPETEQSKDSKKNDLKKTAREKGLKEVIEKQIIYYQRKIKSQADLIGGCQYETAVDENKRPINRVIERSHPLFQEFRMWDQINKCYVDARNPEGTKYKYSKRFLAKEEKENIYNKLSDKKELTYEGWCSALNLRYEGKGKDKRNIDWPKGLHKKEKFKGNETLKTIKNLLGESLFEKAFGSDKDLTHYQNEKYIAFYSTLYDSVGSNEMDIADERTQKIRKFLAETIIQADIPENNTYDEYLDKRALEIAKFKFPRKYASLSIKAINNLLPLMQLNSPILLNEQSEHKRKLNLLTSLYHQFKHQLKTYDSEQEKKREHEKISKALLADFYREYDILSEPINEGGWPYWAAAGLMYGRHTAEQKERISNYHEIQPLSKEETLRNPVVEQMTNETLQTIKSILKAYKLSPDELEIKVELARELKNNAKERESMHNNMLNNAKANKVAAYEIMQMEYEDGKKKIKPENECKHNGCSDNCYQSAKLKQPTANEILKYRLWKEQGMVSPYTGNPIPLCKLFRGDEYNKEHIVPKQRFFDDSQSNLVIAETKVNKAKDNLTAIEFIRKYGGKTVDGFPIKTLSSFEIDVMNHSTLSNGKKKKLLMKEIPEDFIERQKKETQYIARKVKEKIGSIVGLDNVTTTTGGVTDHLREIWKLNEILKEMNKERFQLMATMVQEPKESWCNYKEVTSKKGGTRKVLVLKNWSKRLDHRHHAIDALVVACTTQSQITQLNTLNQIVQEKLKEKYEDLKNKEEISDEEIGNKLAEMNENEKKEFQKMLGSLRQFDFPWEENKFLPEAKEKIDQLLASFKGKKRLLIQNKEDKYSKRTNELMLKVRGALHQETVYGKFDDDETKKVNIKTAFELAEFILEPNIKEKVLQRIDEYEGDIDEAMEALSTKEGKLKDDRNKIIKSATLHFKEKDVYRVNLSKFGDKKNAEGIIDRVIDKTGLIKRDLFNHLYSYCLKSKMEQLRLDNELINETIDHFVQFILKEEVITQEKFENSLDTLDANDKKKIKGWINGKVAFSEDGIEDFNEQRLKKNPNLKPIFALKVMYAKNAGESSLKPIKRKHRDKGIFDYVKPGDNYCYAVLQKNDTRDFLPVSFFDAATWVTNKFRIDTKSGYKFPKRYNERLNYIEEIIKQKIKEEKPGFEILCLLQQDDLVYLPFDKEDAKMAESNSDNGFWFDKDKKRWRRIYRVVKFTGSQCYFTPFTYTSPINYKPIMDETEKKEREDDNKEIPKEGLFEFGTNKNCSPFEMTEMYITESLINKNRKYKANRIQDSCIKIEVDRLGNITKP

SEQ ID NO: 8749 - protein, 1702 aa, unidentified
  REGION 1..1702: note = Description of Unknown: Cas Enzyme sequence
MKKKILGLDLGTNSIGWALVEQDFENKEGEILGMGSRIIPMDAAIMGDFDKGNSVSQTANRTKYRSKRKLYERHHLRRERLHRVLYVLGFLPEHYADEIDFEKRLGKFKEETEPKLVWKKNGKKTNGKVKFEFIFQKAFNEMVEDFKKAQTQLFIEKAKIVEGKEQKIETKIPYDWTIYYLRKKSLIEKISKEELAWLILNFNQKRGYYQLRGEEEEVNENVKEFVANLTITKIEKGEVDKKNDNRTWYKIIFSNDWQYNATFTAKPNWENTEKEFLVIEEYDETGNIKIVKDKFSDTTGREKRKITPLPTFEEIEVMSKKDQDKIYGKIKTRTELTIKDSGTSVGTYIFETLLKNPKQKINGKLVRTIEREFYKDELRGILKKQIELQPELFTDDLYNDCVRELYRSNKAHQLLLGKRDFVHLFLEDIIFYQRPLKSQKSTIGNCSLEFRLHKINKKDENGNVIKNVFEKDENGKDIEIKEYLKAISKSNPYYQEFRVWQWIKNLSIYKKEDDTNVTLEFLNSSKDYERLFALLMTKKEVNHKDILEYFLVPIMKQKFQNTKPKAFKEVLQKEIAKYRWNYVFDDTKEREEDKSKNYPMNETGYEIKRRLKEVTNVPSDFLTAEIEYKLWQIIYSVTDKNEFEKALETFARKHSLHYVPKLERNSKNPDKGCFVENFKNFKPFKSEYGAYSEKAIKKLMPLLRIGKYWSFNSIDNNTKARIQNLQTAEVDESIRERVREQVKKERLGKNEDYQGLPLWLAQYVVYDRHSEASDISKWHSVEDLKTFLKEFKQHSLRNPIVEQVITETLRVVQEIWKHYGKGAENFFEEIHIELGREMKNTAEDRERITKQFKENETTNFRIKALLMEFANDDFFTNNKDYRNEKGETPDFYKKGNNPVRAYSPSQLDILKIYEEIVINKYSEEDLKNEKTGLTESKEGKIKEVTIYDISQKSQPTKAQIEKYKLWLEQKYRSPYTGKTIPLSQLFTPAYQIEHIIPQSRYFDDSISNKVICETEVNSLKDRLLGLEFIKNHHGEKVQTPFGEVEIFQEDAYKSFVNEHYDKNRGKKTKLLLDDIPDKMIMRQMNDTRYISKFISLLLSHIVRADKDDDGVNSKNIIPGNGKITSILKQDWGLNDVWNGIILPRFERMNTLTQTTSFTLTNKEGHTIPAIPFELSKGFQKKRIDHRHHAMDALVIACATRDHVNLLNNQSAKSENSRYDLQNKLRNKEKWKDNTGKERDKFTEFKKPWEDFIANTKSELEKIVVSFKQNFRVINKATNYFEKIENGKKVKVEQKGANWAIRHSLHEETVSGIVNLPWVKIGKGEIIAATRKPLDKSFNVDRIKKITDTGIQKILLNYSDFIIENTESLNEIGSNILLETNDKKKKELESILYKETAEIAFSPEGVEQLNKNIHQFNDGKYHQPIYKVRVYEKGSGRFNVGIKGNKKDKYVQGAPNLFFALYTNEQQQCKGGDKKPTKRCFETIPLNIVIERQKQGLKPVPEINELGEKLLFHLSPDDLVYIPTVVELETQNAIDFSNLTKEQIRRLFFVNDFSGSTCYFRPNRISKAIVPKEVDMNYDKKRNKISGSFDTKTASFEGEHIKDVCIKLKLDRLGNISKAGNYQTSSTTNNNAVSEPEVSYTKRNWTLKSFNSFEAMEQDQLANYSAMPPIERLKALKELTLNAFGFKHESEMNAPDRKLKFDE

SEQ ID NO: 8750 - protein, 1046 aa, unidentified
  REGION 1..1046: note = Description of Unknown: Cas Enzyme sequence
MASLKKQKLDIPYRLGLDLGTNSIGWSIVALNEEGSPNKIIRLGSRIFSDGRDPKTKTSLAAARRLGRSMRRRRDRQLNRKRNLMAILISFNLMPSDEKARKALEQNDPYELRARAISSPLMPFELGRALFHLNQRRGFKSNRRSRNKEEETKISADILGLKDGIEATNSKTLGDYLFKKHQRKESLRARPGSKLYPTRNLYEQEFALIHKMQAPHQKISQVQWQEIHQCIFFQMELRAAVVGPCQIFPKEFRCPMALPSFQKFRLLQDINNLRVMGTKGASPLEQTFRDTIFAKLNRQGTSKFEAIRRLCKIDKDAYFNLESEKRVLLKGNAAGALLSKPEYFGEKWDAFSDEKQDELAEKIIFEENDEIVRNQVMSSAELTPTQVDNIVALTEDDFPKGYARFSQKALLKLIPHLKKGLGYAESVEAIGEHHSQRAPGPDQLANELPYYGEALPRTIGFHPLTGNSIEKKFGKIGNPTVHIALNQMRRVVNAVIADYGKPCEVVVEMARDLKLSQKAKSDIDKEQAKNQKRNEAIAKRLEELGVTNNYDNRTKFKLWEELNFSDPNDRRCVFSGERISIEKLFSSNVEIEHILPFSRTLDDGFGNKTLATTSANRQKGGRGPFEAFGHSTGEFAYDEILQRAQSLPFGKRRKFSEDAMKRFDDDTDGLKGFLARHLNDTSYLSKVAKQYVSLVCASKNVWVTPGRVTAMVRHQLGLNKILSADGIKNRADHRHHAIDALVVALMDRKSLQKLANKNSRGKREEIEILPDWPSFRKEVEGAVNEIVVSHRPEHGENAKFHEDTYYGFVDPPIVRDGTPFNLVTRKDFSGLKISDIEKIRDEKLREEVNAIAEKANKSEGEFEKLLAQFSTERNIRRVRLLKTDQSVREIRHPQPSPRHVKGIIPGDIHHLEFWLLPKGAELREPAKTEYISFKKNPRLVVRGVSFFDLKRVQKTHAKPHPAAKLKMKIHKGDLARINQSGKERIVRIKSLRPSNKVILFEDHYQSGEQGTSSAKGNTATFANLEAISFTLLFVDPIGNIIESRKS

SEQ ID NO: 8751 - protein, 1082 aa, unidentified
  REGION 1..1082: note = Description of Unknown: Cas Enzyme sequence
MTYRLGIDLGSTSIGWCILQTTGNEPVAIADLGVRIFSDGRDAQSKTPLAVNRRQKRGERRSRDRRKMRKARLMQFLISAGMMPTDRNQAKELEKLNPYQLRRDALDKKISLHELGRALFHICQRRGFKSNRKSDKKEDDSGNLKSTITELAEKMDNESARTLGEYLFVLGEFYKERKIRENPKQAPLHMPVRVQVSKGIGGNVYTLFTSRKMYEDEVALILETQKKHHPALTDDVIAKIKDIIFFQRNLRPQEAGPCRFESGLKRMRKAYPLFQHFRILQEVNNLDLERFAEHEEPLTHDQRLKIIAELKKTKDLTFNKIRKLLGLSDGAKFNLEAENRDRLQGDLTAHAFSDKKKGGFGKAWFDLSPQQQDEIVTKVLEEEDEAVLVSWLMEKFSLDEQQAENVAGASLDEDFGSLSRKAIEKVLPHLEEGHIYPEACKRAGYHHSDFRTGEAFDQLPYYGQLLENSVTGGTRNENDKDQPEKYFGKIANPTVHIALNQLRRLVNAIVEKYGHPAEIVIELARDLPLGEEGLAELKSDQAKNKKRNDRINEELAKLGVKQNYANRLQYKLWEDLASDPAKRCCPFTGRMIALHKLFSGEFEIEHLLPFSRSFNDSPANKTLSHRDANRFKNNRSPYEAFSDNPAGYKWEEITARASNMPDNKRWRFYPNAWEISKGKEEDIIARMLVDTQHMARVAKQYLSFVCHPDKVWTIPGRLTAMMRDKWGLNDILGEDDGQKERGDHRHHAIDAFVISCTTRGMLNKISGAANKMFENDTLYSKRLKLVEKMPEPFEGYYQRIEALIENTIVSYKPDHGNARSAITSKRPFTVAPLHKETAMGYVGKGEKKGTGIYVTRMFLAQMLTKPDIESIADAKIKERLLDKLDGKDEKSDAWKKVLQEFSEEWNIRRLRIHVEKTVDAMVGVRKRQQPEGEPYKYYAMGGNYCAEVYCHTKGKDAGKWNIEIIPDYYAHQKNFIQQWRKDNPTAKLVMRLQIDDMVAYEEEGQTIYARVKKMTGGRVYLRPHNIAKEKSDQESWAASPNLMQQKQARKIAVDILGNIKDPMGKHDRADHRNYKGRLSSGS

SEQ ID NO: 8752 - protein, 1286 aa, unidentified
  REGION 1..1286: note = Description of Unknown: Cas Enzyme sequence
GNETPATAQRTRSRATRRLYMRRRMRKQRLLLHLIKNGMCPLSEAGLKNWKVKDSYPLEEAFITWFKLNPYELRAKGLVEKLTPMELGRILYHLSQRRGFQSNRKGGDGEQESFHEGLEDKGIAGYNDTKRLIEEHGTLGKAGYELGKDHIAIRKRYFKRSNLVDEFNQLWDVQKNFHAILTDGLKAELGDGKIGDLFFQRPLKGKKSDVGRCTLEPGKKRAPISGIEAELFGVLHTVNNIKMDGRPLNEAERRKVLPKFFRKSSATFPFEDVRSALKEKGVEHSFNYDRADIRSKEDGKHVKLTGAHTIAHLADLWDADPLTIVDAFGTMAPEKEAERKQWEDRWSVIYNANDWADISERKEKGQYVRAVGAKRDKRDLKEYASTVWGLNEEKLEVLKKFDTKQGYHNLSSRALGRIIPLLYQGIPYHYAVLYANLPTIFKVVHKAADGKTVMSIDDRWAKMTADERKAVHQGIHAQVASHRQYNVETLLLNGLIRHYRDTFGDEGMRKGFWNAEWDARLERAIGETLSLDQKRSKGAEELAKLHSDVKKEFIRNIESHQKVQFEELYRMDARVKNWLQANYDLEPKALEKLYHHSAIDIYKNRQGDRLGDPKTPGLKNPMVYRALHSLRMVVNKMIDAKLIDRKTQVNIEMARQLDSANKRRAWERYQGVMRKKNEEAEKAVREYFESIGKHDNPTDEDIERMWLLEEARQVFGKVTCIYTGKEFGVADLFNGGVEVEHTWPRSKTVDNSMANKMLCDTNYNRTIKKERMPATLPNYDKETMVQGKMLPGIKESAEPILKLWEKYKRIVDGCKQSSKTAATKESKDKAIQDRWFNQFFRDYWRTKYEHLTAEEIKPGFMNRQLVATGQITKLARAYMNSYFNRVDCLKPEALTAFRKEWMGESFVHEKDRSKHTHHAVDAAVCAAVDRTAFNALAHHYEEHDEKNIAGSFDHPWDSFGTDMRNLRDAALVYHVRKPSIGRTSVYVRKVKLKDGKTVVVKATGDTVRGTLHGATYYGRVKRKKAGTDEYEVKTVIRKTLDHSSFYPFKEADKAKVVDKRIKELLENADLEKVKADGGLEVRVKNGNGSVIQKIKKVRVFEPSVKNPKALKAHRDALPGAEHKHHLWVTGGENPLLAMYENSKGRGAHRIFSLFELAEYMKSQRGRSKILDAIPTEHPERTGFRLAMRNGKPFVLHVGQLVVLYKNDPEEVIVQNSAELNRRTYVLRKVEDDPRVNLVNVLDSRPDKEIEESSEWDINAPFKWLRFSPHGMKAMFDGIDIDLSPIP

SEQ ID NO: 8753 - protein, 1060 aa, unidentified
  REGION 1..1060: note = Description of Unknown: Cas Enzyme sequence
MIKNKLGLDLGTNSIGWAFVKEADTNNEQSSIEKIGVRVNPLTTDEQTNFEKGKRITTNAGRTLARSARRNLQRFKLRRENLLEILKTNKWITADFILAENGNKTTFETFRLRAEAAEIQLELQDLARVLFLINKKRGYKSSRKVNNTEEGQLIDGMDIAKKLYHDQITPGQYVLDLLNSGKKKVPDFYRSDLQAEFDAIWNFQKSFYSDLLTDSLKEEIAGKGKVATWAILKTPLNLVGIKRNLKRDELKLENYQWRNDGLIKQLSLEELAIVLQEINGQINNSSGYLGAISDRSKELYFNHQTVGQYQYAQLQNNPHARLKNQVFYRQDYMDEFEKIWEVQSKGRETIFTKELKEELRDVVIFYQRKLKSQKSLISFCEFEQREIIVEGKKKTVGLRVAPKSSPLFQEFKIWQILHNVKLKNKLTKEVLILSEESKQFLFEELNLKGKLSASDVLKILIEKPKEWEINYSELEGNRTNQVLYNAYLNILDIEGYDVREKLKLKLNKDDITLADLDVSANEIKEKIKAIFSHLGINTAILDFNSELEGKDFENQLSYQLWHLLYAYEEDDSPTGMDTMYRLLEEKFGFNKDQAKLVGAVALQADYGSLSTKAMRKIYSFIKDNEYSVACDLAGYRHSKHSLTKEELEKRELKSRLEILSKNSLRNPVVEKILNQMVNVVNTLIDTENDKLEKEGKPRDFKFDEIRIELARELKKNAKEREELTKAVNSGKIEHEKIIKILQNEDGIKFPTRNDIIRYKLYQELKNNGYKDLYTNTYIERKDLFSKKYDIEHIIPQSRLFDDSFSNKTIVPRQVNLDKGNKTASDYILDSFGNEKLEEFVRRVEALYNLKEENISKSKYKKLLMKGSEIGEGFIERDLRDSQYIAKKAKEMLFQITKSVLSTSGSVTDRLRQDWGLINVMKELNLEKYRLAGLTEIQEDKNGQPKEIIKDWTKRNDHRHHAMDALTVAFTKHNHIQYLNNLNSRRNENSDKKANIEAIENKETHKVQDGKGNYKRVFNEPVVNFRQIAKQHLEAVLVSHKAKIKLLQEISIKLTEAIKSN

SEQ ID NO: 8754 - protein, 1143 aa, unidentified
  REGION 1..1143: note = Description of Unknown: Cas Enzyme sequence
RILGLDLGTNSIGWAFVKEADNKDEQSSIEKIGARVISFDNFVSTESGKESKNPEQDFRGGKGISPNAGRTLKRSARRNLQRYKLRRENLTEILKSNNWITNQSILAENGNKSTFDTFRLRSLAAEIQLELGDLSRVLLMINKKRGYKSSRKVNNTEEGTLIDGMEVAKKLYHDNLTPGQFVLTLLKENKNKTPDFYRSDLQNEFDKIWNFQKTFYADILIEGLKEELKGKGKVATWSILKGPLNLVGIKRDKKRDEQKLENYQWRSDALVKQLNLEQLAIVLQEINGQMANSSGYLGAISDRSKELYFNKQTVGQYQYAQLANNPHSRLKKQVFYRQDYLDEFEQIWKVQAKGRESIFTNVLKAELRDIVIFYQRKLKSQKGLISFCEFEQREIDVKGKKKTVGLRVIPKSSPLFQEFKIWQNLHNVKLKNKLTKEISLLSQEDKQTLFDELNLKGNLPATEVLKLIVDKPKDWEINYKELEGNRTNQALYNAYLNILDIEGYDVRSELKIKLSKDDISLADLEVSSSEIKDMLITIFKDLGIDVNILDFNSELDGKTFEEQASYRLWHLLYAYEEDDSPTGMETLHLLLAQKFGFTKEQAKIIGNVAFQDDYGSLSAKAIRKIYPYLKELEYSKACELASYRHSKHSLTKEEIENRQLKTRLNILPKNSLRNPVVEKILNQMVNVENTLIDTENDKLEKQGLSRNFQFDEIRIELARELKKNAKEREELTKAVNAGKIDHEKIIKILQTEDGIKYPTRNDIIRYKLYQELKTNGYKDLYTDQYIERKDVFSKKYDIEHIIPQSRLFDDSFSNKTLVPRDVNLKKGNKTAYDFISDGYGNIALEQYVSRIEIMFNQKEENISKAKYKKLLLKGPEIGEGFIERDLRDSQYIAKKAKEILFQITKSIVSTSGSITDRLRDDWDLVNVMKELNLEKYRLAGLTEMQTTKDGHPKEVIVDWTKRNDHRHHALDALTVAFTKRSHIQYLNNLNARRNNEYDSISNAKERTSIEINSLKITSKDALGIEEKETKKIKDRNGNYKRVFNDPIPNFRQIAKQHLEAVLVSHKAKNKVVTRNVNTINVKKGVKKQFVLTPRGQMHKETVYGKIKQYAFKEEKVGAKFDEATITLVSNPQYRHLLLKRLAE

SEQ ID NO: 8755 - protein, 906 aa, unidentified
  REGION 1..906: note = Description of Unknown: Cas Enzyme sequence
FKSEIFYKYFMKRVLGLDLGTNSIGWALVEIDDEKRIVRILGVGSRILNMDAAEIAKFESGAKIVSTASQRTLKRSARKLNERFLLRRDRLHCVLNLINALPKHYKLSIEFQTEEGKRSGKFKKGVEEKLAYYTDQNGVSQFLFKDAYFLMENDFKKNHPNLFYRNKSRTQTKIPYDWTLYYLRHKAATDPDFELSKEQLAWITLSFNQKRGYEKIIGQDDKIQKEGELSETFVCKVRSVTKNEETACYKIVLVDYQNENSVVFEYIEETLIQLTQVGDLKEIVKVSKYNDSGEIDENKTEFSINEILELKVVDVRNTFKKAKDNFVYDVELETGWIKEQQSKYLPKWKDTTKDFIIKTKYDIKGNRIQKGADKGRNINVPKDEDWTLMKLKTETSITSFNAKNNFKGVASFVYYNLLQNPKQKIKGGLLTVIERDYYREELDVIYKNQEKFHPELRKENRELYTQAIKLLYPNNKNHQETIKDLDFNYLIKEDILMYQRDLKSKKSLIADCSYEFRQYKDKTTHQRVKIPLKVIHKFNPIYQEFRIWQFIKRLRIIKLENIVDKETRVNVDVSNMYLSNFQIRESFFTYLNDKDTVTEKNILDFLSKYYNDKTINQKNYKWNFTSEKEPCNTTRYEFILRTKRIKGFDYKRFLSPENEYKLWHFFYSVKRKEEFRKGLGSLLSQLLEKSDLSNEFLPELIRNFSSFTGYVNDYGTYSEKAIKKILPFLRVGKYWNPVVIENVLSQSENKVKDKVLEKEQINGEIKDFQGLSISSACYLVYGRYSEVGEIQYWKSPNDIENYLKKEFKQHSLNNPVVEKVIIETLQIVKDIWKTYGTKQGTDENGNVLYDKLFSSIHIEMGRDLKKNNKQKASDDKINNENRKANERIIEILKELKRDNKSLEIKS

SEQ ID NO: 8756 - protein, 1525 aa, unidentified
  REGION 1..1525: note = Description of Unknown: Cas Enzyme sequence
MKKILGLDLGTNSIGWAVVNADEKTRDDGSRYLKPNSISAAGSRIIPMSADILGNFEKGNSISQTAERTRMRMARRLHERALLRRERLLRVLSLLGFLPKHFADKIDRYGKFTDESEPKLAWRKNTEGKYEFIFQDAFNEMLAEFKDKQPEIVEEGKKIPYDWTIYYLRKKALEKALSKEELSWLLLQFNQKRGYYQLRGEEEDIPQDKKIEYLAQKVVKVEATDQKKGDDIWYNVYLENGMIYRRTSKAPLDWEGKIKEFIVTTDLEKDGTPKKDKEGNIKRSFRAPQEDDWTLLKKKTEADIEKSRKTVGCYIYDSLLNNPKQKIIGKLVRTVERKFYKEELTQILKKQVEFIPELRNDNLYKQCIEELYPINEAHRNTIAKTDFANLFINDILFYQRPLKSKKNQIDNCPYESHNYIDSKTGETKTAPVKCIAKSNPLFQEFRLWQFIHNLRIYQREKEINGKLLTDVDITNECLKSEEDYVKLFDWLNDRESIEQEELLKHLFNTKKSKNKENPYRWNYVKDKVYPCNETRATILKGLSKCGINASVLSPELEMALWHILYSVEDKKEIETALTHFAQKQGWNSEFATVFSKLKPFKKDYGSYSEKAIKKLLSLMRMGKYWKEENIDENTRNRIDKIINAEYDERISLRTRDQVKKFEEKKTKELNGEYHLDEISKFKNLPLSLACYIVYNRHSEAREIEKWEKPEDIELYLKNFKQHSLRNAIVEQIVTETLRTIRDIWKQEGQIDEIHLELGRDLKNPADKRKKMSENILKNENTNLRIKAMLMEFKNPGMGIENVRPYSPSQQDILRIYEENALENLTKDDEEFDFISKISKQAQPTKSDIVRYKCWLEQKYRSPYTGKTISLSKLFTSAYEIEHIIPQSRYFDDSFSNKVICEAEVNKLKDRQLGYEFIAEHHGEKVQLSQGEVVEIFSVEAYEKFVKENYANNRVKMKKMLMENIPDDFIERQLNDSRYISKVVKGLLSNIVREKVDDENYEPEAVSKNLISCNGAITDRLKKDWGMNDVWNSIILPRFIRMNQITGKDCFTTTNAEGHLIPQMPLELQKGFNKKRIDHRHHAMDAIVIACTTRDHVNLLNNEAAHSKYNTNRYQLQRKLRRFEKTVIDGKEREVAKEFLKPWDSFTMDSKNILENIIVSFKQNQRVINKTTNAFQHFDENGKKTFAKQGKGDSWAIRKPMHKDTVFGEINLRKVKSVSLNEAIKVPERILNKNIKEKILELKNNKIDAKNIKKYMEEYHIGGYGTDTSKIDVFYFTKETKERFFATRKNLDISFNRAKIEDSIADSGIQKILLAHLERKNGDAEQAFSPDGIDEMNKKIIELNNGKFHQPILKVRVYEKADKFAVGQKGNKKVKFVEAAKGTNLFFAVFEKDGKRSYLTIPLNVMIDCQKQYGNQWKNNIEAYLKEKELAEKDVKLQFILSPNDLVYLPTEGSIDKKRIYKIVSFTNNRLYAIPYAIAKSIVDKNEFTQLNKVEFTDNKESIKDVCIPIKTDRLGNIIEFDGKRL

SEQ ID NO: 8757 - protein, 1492 aa, unidentified
  REGION 1..1492: note = Description of Unknown: Cas Enzyme sequence
MKRILGLDLGTNSIGWAVVNAELDKDGSFYLIGIEAAGCRIIPMDASVLGDFDRGNTKSQTAERTRLRGIRRLTERYLQRRERLHRVLNILGFLPAHYSQTLNRYGKIKEDKSPKLAWVKNNFGKYEFLFEDSFNEMLADFKSVHPQFADKKIPYDWTIYYLRKKALTQKIAKEELAWILLNFNQKRGYYQLRGEEEEVKNINKKVEYVALEVVAVEDTGEKRGKDTWYNVHLKNGWIYRRTSSVPLDWVGKVKEFIVTTDLNDDGTQKVDKDGNVKRTFRSPKEDDWTLVKERTQSEIEHSDKTVGAYIYDSILQNPSQKIRGKLVRTIDRRFYKEELKMILDKQSEFHVELRNKDLYKSCIEALYSSNDAYRMNIANRNFTYLFIDDILFYQRPLKSKKSMIANCPYEGNTIKDSKTGEEKHYGIKCIAKSHPLYQEFRLWQFLSNLRIYKKENIGDVDVTSDFLKSEEDYVALYDWLNVKKAIDQKTFLKYPLFGLKKSVGQYRWNYVEDKSYPCNETHSQILAYLNNSGISSDFLTAEIEEKLWHILYSVEDKHELIKALKKFASKYQISDSFVDTFQNFPSFKKEYGAYSAKAIKRLLPLIRVGKYWSESAIDKITYERIKKIISGEYDEGIRDSIREKLLNFRDIISFKGLPLWLACYIVYNRHSEVKEIMQWKTPAELQKYIDSFKQHSLRNPIVEQVITETLRTVRDIWEQYGDLDEIHVELGREMKNSADKRRKMSQKISENENSNLRIKALLMEFANPEFEIENVRPNSPSQQDLLRIYEEGVLENEDNLPDDIGNIIKKFREIDVKKRPTRSEVIRYKLWLEQKYRSPYTGQPISLSKLFTSAYEIEHIIPQSRYFDDSLSNKVICESEVNKLKSNLLGYEFIKKHGGEIVELSFGRSVKIFTEYEYEKFVSDYYGKNRTKLRKLMMDDIPEEFISRQLNDSRYISKVIKGLLSNIVREDGEEEAISKNLIVCTGSVTDRLKKDWGINDVWNKIVLPRFVRLNEITGRVQFTSKNIDGHEIPSLPLEFQKGFSKKRIDHRHHAMDAIVIACAGRNIVNYLNNASASGKAKISRYDLQHLLCDKLKTDGMGNYKWFIKKPWETFTQDVYAALDSIIVSFKQNLRVINKATNLYTHFENGEKKLVKQKGVNWAIRKPMHKDTVYGEINLRKIKQVSLNEAVKDPSRIVNKEFKEKLLSLLEQGYSVKLIKKYVEENKDIWQDINLSKIDIYYFTKETKERFFASRELLDTSFDKKKIEKITDTGIQKILLRHLEMKNGDPNLAFSPDGIDEMNRNIITLNGGKKHCPILKVRTYEKAEKFAIGNNGNKSLKFVEAAKGTNLYFAVYETEKMNEVTGIIEKKRNYETVPLNTVIERLKKGLSVAPPDENGNEPKFVLSPNDLVYIPYNKQFSDGKLDCSRIYKFVSCTGNEAHFIPAYIANPIIDTKELGSNNKSQRAWTNEMIKEVCIPIKVDRLGNIIKVGY

SEQ ID NO: 8758 - protein, 1530 aa, unidentified
  REGION 1..1530: note = Description of Unknown: Cas Enzyme sequence
MKKILGLDLGTNSIGWAVVNAEEIHDEKEEGKVTLKPISIEAANSRIIPMDAAVMGDFDRGVSVSQTKERTGFRGTRRLRERALLRRERLHRVLDLMGFLPEHYSAKLTRYGKFSDDSEPKLAWRKNDSGIYEFLFKESFEEMVSEFKKEHPSIEKVPYDWTIYYLRKKALSQALTKEELSWILLNFNQKRGYYQLRGEDEEVDKSKKIEYYALKVVKVEETAEKKNDGSIWYKVHLENGMIYSRASKIPLDWEGKTKEFIVTTDLNEDGSCKIDKEGNVKRSFRAPKEDDWGLLKVKTESDINDSGKTVGCYIYDSLVKNPQQKIIGKLVRTIERKYYREELRQILEKQKEFIPELKDVDLYKRCLCELYSMNEAHRNNVLNRDFTYLFIDDILFYQRPLKSKKSLISDCPYEIRKDKDDNDYSVKCIAKSNPYFQEFRLWQFVKNLKIYQREKEVDGKLCTDVDVTNDFIKSEDDVVALFEWLNDKASVKQDALLAYFKIKKKKNEEAPYRWNYVEDKEYPCNETRAAILKGLSKAGVKQEFLTKEKELEIWHILYSVEDKIEIGKAFVKYAKDNSLEESFAEEFAKLKPFEKEYGSYSAKAIKKLLPLMRMGKYWSADAIDEKTKERVEKLITGEYDENISDRVRDKVKDLRDISQFRGLPLWVACYVVYNRHSEAKDIVKWKKYEDIDAYLRSFKQHSLRNPIVEQVVTETLRTVRDIWKQVGQIDEIHLELGREMKNPADKRKTMSENIQKNENTNLRIKAILAELKNPDYGVENVRPYSPSQQDILKIYEEYALDNLTKEDEDFDFVNKISKSANPTKSEIVKYKAWLEQKYCSPYTGKMIPLSKLFTDAYEIEHIIPQSRYFDDSFSNKVICEAEVNKLKDNRLAYEFISSNEGRIVTLADGKTVKIFSVGKYEDFVKKHFTGAKKKKLLMSEIPDGFIERQLNDTRYISKFIKGLLSNIVREKIEEGVYEQEAVSKNLISCTGGVTDRLKKDWGMDDVWNRIVLPRFERLNELTGKNNFTAVNQQGHLIPNMPLELQKGFNKKRIDHRHHAMDAIVIACATRSHVNYLNNESAKSENRREDLKKTLCVKTKTDDKGNYKWVMRKPWETFASDVQISIENMIVSFKQNLRVINKTVNKFEHYDENGKKTIVKQCKGDSWAIRKSLHKDTVFGEVNLRKIKEIRLNIALENPQTIVDKDVKRMVYSLKREGKKDKDIVKYFEDNKEVWTEVATGKVKVYYFTKDTKDRFFATRKPLDSSFTEKKIKEEVTDIGIQKILLAHLEAKKNDAEVAFSPDGIDELNKNITKLNGGKFHQPIYKVRVYEKADKFAIGSTGNKSKKFVEAAKGTNLFFAVYSLEKEDKKSGAQSVRTYATAPLEMVINCQKKNPKDWKAELDSVLKEKEYVDKKAKLLFILSPNDLVYLPTKEELKNGVDLLDKDKIYKFVDSSGIQANFVPFSVSKAIFSMTKDEQKKVLGKETYCIQNEIGVGSRPSKNQVAITGEMIKEICLPLKVDRLGNIISLGY

SEQ ID NO: 8759 - protein, 1541 aa, unidentified
  REGION 1..1541: note = Description of Unknown: Cas Enzyme sequence
MKKILGLDLGTNSIGWAVVQGEKIEDTQLGSTVIKPIAIEAANSRIIPMDAAILGDFDRGNSVSQTAERTRYRGMRRLRERFLLRRERLHRVLDLMLFLPKHYSSKLTRYGKFSDDSEPKVAWCKSESGNNEFVFKSSFDEMVAEFMKYHPTIERIPYDWTIYYLRKKGLYNALTKEELSWILLNFNQKRGYYQLRGEGDDVDKTKEVKFYALKVLRVETTDEKKGNDTWYNVHLENGMVYRRSSKVPLDWEGKIKEFIVTTDLNEDGTYKTDKDGNVKRLFRAPKEDDWGLLKVKTESDIDESGKTVGCYIYDSLLHNPHQKINGALVRTIERKYYKEEIRRILDKQKEFIPELNDVELYKKCTKELYSMNNVHRSSIEKRDFTYLFVDDILFYQRPLKSKKSQISDCPYEKYKYYKTNEQGEKVECVQRIKSIPKSHPLYQEFRLWQFVQNLKIYQREKMVNGKLCLDVDVTSDFLRTEDDVVALFDWLNERKSIKQDVLFVSYFKMKKKDGLSSYRWNYVEEREYPCNETRSEIVGLLKKVEVSDSFLTKEKEEALWHIMYSVEDRYEYKKAVTKFAIKNQLPEKFIEEFSKIRSFEKEYGSYSVKATKKLLTLMRMGKYWSEDAIDIHTRERINKIIDGEYDEKISDRVREKVEHLTDFSMFRGLPLWVACYVVYNRHSESNDVVKWEKPEDIDAYLKSFKQHSMRNPIVEQVVTETLRTVRDIWRQVGQIDEIHVELGREMKNPADKRKRMTERILENENTNLRIKALLAELKNSEYNVENVRPYSPSQQDLLKIYEEYALDNLTKEDKEYEFVSKISKISNPTKSEIIRYKAWLEQQYRSPYTGEMIPLSKLFTSAYEIEHVIPQSRYFDDSLSNKVICESEVNKLKDNMLGYEFVKKHGGEIVTLTGGKTVKVFSVEQYEAFVTKYFSGTKKKRLLMSDIPDGFIERQLNDSRYISKFIKGLLSNIVREKIGDGEYEQEAISKNLITCTGGVTDCLKKEWGINDVWNRIILPRFERLNRLTDTENFTAVNQQGHLIPNMPLELQRGFNKKRIDHRHHAMDAIVIACATRSHVNLLNNESAHSKNKANRYQLSSKLRRQEEVIINGEKRKVFKEFYKPWESFTIDVQKALENMVVSFKQNLRVINKTVNKYEHYDDKGKKKIVKQVKGDSWAIRKSMHKDTVFGEVNLRRVKEVRLGDALSNVKAIVNKELKNKIYELREEGLNDKAIEKYFADNKDVWSECASGKVSVYYFTKETNDRFFATRKVLDTSFKNEKIKSGVTDTGIQKILLAHLEAKGNDAEIAFSPDGIDEMNKNIIHLNGGKKHHPIYKVRVYEKADKFAVGTKGNKSKKFVEAAKGTNLFFAVYFIEKTDKKSGEKQVIRTYATAPLNMVIECQKMSAQKWRDTLDVMLKGKGYVESSAKLLFILSPNDLVYLPTKHELNNGIGEIDKTRIYRFVDSSGIQANFVPNTISKAIFSMTKEDQKKLFGENVYCIQNEIGVGSRPSKNQVAITGEMIKELCVPLKVDKLGNIVRLG

SEQ ID NO: 8760 - protein, 952 aa, unidentified
  REGION 1..952: note = Description of Unknown: Cas Enzyme sequence
MEKIIGIDAGTSSLAVFVRDKEGQLFYQKNLDYDYCVVNTFPSGVGSKKNQEFSYAAQRTKFKSKRKQYRHKRYRKWDLLKLLIENNLCPLTKEELNAWRKYNKLEKIHHHFPINAERFMQWMRCEFSGKVIPPFELRYELATQQLDFSQEENLMKLGRALYHIALHRGFKSCKNDISEEKENNTNILSDEQDVDLSTRMKASEEKKNAAIGNYMYEHRVPTVGAALYLLNQEGIRIRNNNQYQAIRKRNLEEVEHIFKFQKLLDKYSDLYKRLIKDDNNGTIFYQRPLRSQKGNVGKCPLEPTKTRCPISRPEYETFRAWDFINKIRYGEGCNQELSLELKQKLYEKHFVRATNFEFKTIRKFIEKESKTSYVYDEEKASRTINYSDSTPVSACSVTYRLKDLLGDGWVTWQCTTNKIRKTASKNSRHVITYTWEDLWHICFMANDDTAFGSFANKTELDASKLKSLWSAIKMDYASLSLKAINNINRFLTRGYEYSVACLIAKLPDLLKQRWDDAESEILFAVENIVKTNRHEQDIVTIVNRIIANYKMNKECRYDDTLLADLKGEVQEYATEYYGSLWYAKTEDEQQIIIEQVENLFDSFIEDGRGAYIRKPTIESRLGEYLKSKYGIDSKQIYHHSMTKYYPQAPLQRIKNIKNKEAVISKRLLQSPAIASLRNPMAMRVLHTLRKVINELIKNGVIYEDDEVVVEVARELNDANKRWAIQEYNKKRRKENDEFKKIIAEYIPEPNISDDDVRKLRYMVEQYELTDKVKGKKEKEVFIYHEKEIDKLIKKYRLWIEQGCMCIYTGRLINISNLFDGSNTVDIEHTLPRSKTFDDSLGNQTLSYAYINREVKQNLLPSQLNNYNDILQRIKPWQEKVKRLENVCNYWSKRAKSSLDKNAKDNAIRQRHYWRMELDYWRGKVNRFTVKEIPSNYRNNQLVDTSIITKYIY

SEQ ID NO: 8761 - protein, 1356 aa, unidentified
  REGION 1..1356: note = Description of Unknown: Cas Enzyme sequence
MKNEKNYYLGLDIGTDSVGYAVADEEYSLLKYKGEPMWGVHLFDAAITGEERRTFRTARRRLDRRQQRLQLLEDIFVPEIAKIDPKFFIRRKESALWRDDANEPFSVFNDDGFTDKEYYEKYPTIHHLIWDLISNKEPHDVRLVYIAISWLVAHRGHFLNEVSKENMKDVLDINNVYETFYNFFEGEKPWKEIDIQEFGNIIKNKVGITKKYKELCMFLYNSSKASKEITEEFPYSREGILKLLCGGEYSLKNLFGKEEYAELSSINMSMKDEDFANVLVALGDDSEIILNIKSLYDWTVLSDILSEGEYISKAKVSVYEQHKKDLKFLKKMVRKYIPEKYNEVFRAVDSKLDNYASYSGNFKSEDDREKQKKKNKEAFSKYISSLFKNVSVDFEDEEAFSDMTKRLELRTFMPKQVDSDNRVLPYQVYWTELDRILKNAQEYIPFLNEKKDGYTVNEKILSVFEFRVPYFVGPLNRHSDNSWFCRLSEGKIFPWNFSELVNLDESEEAFIKRMTNRCTYLPDCSVVAKNSLIYQKFAVLNEINCITVNDKRLSVSLKQKIYNELFLKKKKVTVKAIKDLLHSEGSYTKEELEKLEGLDTNVKSTLSSYIAFEKLINSNQLSEDDVEKIIERSTYSESKARFALWLDKFYPSISEADKKYIRSLKFKDFGRLSREFLCDVQGANKKTGEVNSIIKWMWETNQNLNELLSENYSFREEIEQRQKEYYDANPKSLSKRLDEMYVSNGVKRPIIRALDIVSDVVKVCGHAPEKIFIEMARGGKEDEKGVRKESRLKQIKDFYAKIDGEDIRELEKTLDAMGDEAHNKLQSEKLYLYYLQLGKCMYSGEPISLSELSSKRYDIDHIYPRSKVKDDSIFNNKVLVLTTLNEEKKDKFPIKAEIREKMQGFWKKLLDNNLITNEKYKRLTRSTPFSEDEEWGFINRQLVETRQSTKVVASLLKEKYPKTEIVYVKANLASDFRKQYDLLKCRSVNDLHHAKDAYLNIVVGNVYHECFTKKWFLENREKYSIKTETLFEYERIRNGKVVWGGKTARDKVENIVRNKNAVHLTKYAFCRYGGFFDQMPVKAGEKLVERKKGLLTEKYGGYNRTSASFFSVVKFKIGKKTDLWVMPVDLLVADEFLKNEEFAKEYAVIQFSKIQSKKVDDVSFPLGKRIVKIGTMFDFDGIRMCLSGKSNQGKTLLMSMMKPLIIGYFWEKYLKSVERFCEKRENNSGLIYSETYDFVSEKKNLLIYDILLEKLKSDSYLKRSANPKDAVEKGRDKFIEADIYKQCKCILQLVAVFGRLSGGCDLSTIGATARAASNTSSSFVSNWKKTFSDVRIIDISASGLYESKSENLLDLI

SEQ ID NO: 8762 - protein, 1496 aa, unidentified
  REGION 1..1496: note = Description of Unknown: Cas Enzyme sequence
MKKILGLDLGTNSIGWAVVNADIENGETKIKSIESAGSRIIPMDAKIMGEFETGNSVSQTAERAKCRGTRRLLERFLLRRERLNRVLNLMGFLPEHYSAKLDRYGKFIDESEPKLPWSKDENGKSKFLFQESFLEMCDEFKRVNTGIKNIPSDWTIYYLRKKALTKPISKFELAWILLNFNQKRGYYQFREEEIDNNKNKREEYYKSQVIKVEKGNEEKGFTWYNMYLENGLIYKRKSKTPLDNWEGKIKEFIITTDLNDDGTEKVDKHGDVKRSFRAPEENDWGLIKVKTEKEINDSKKTVGCFIYDALLQNPQQKIIGGLVRVVERKYYKEEILQILKVQKEFIPELKDKDLLIQCIESLYQSNEIRRNILNQKDFTYLFAEDILFYQRPLKTKKYLISNCPYETRNYKDKDDDKITEPLKCVVKSHPLFQEFRLWQFISNLKIYKKGVIDQDCTNQFLKTEDDIVSLFDFLNNKKEIEQDSLLSAHFKIKKEDKENYRWNYVEDKKYPCNTTHASLLSRLKKIGVSANFLTKEIEEHLWHILYSINDKEEIYKALLKFAKKYGIEDSISFAEELQKEIFQKEYASYSLKAIKKLLPLMRCGYYWKEDDIDSKTKERIEKIITGEFDEKIDNKIREKLEDYTNVSQFKGLPLWLACYVVYGRHSEAKEITKWNQPEDIDEYLKQFKQHSLNNPIVEQVVTETLRVVRDIWKQVGTIDEIHVEMGRELKKTNKERETISKQNIENENTNLRIKQILKEFKESYPDIEEVRPHSPSQQTIFRIYENYALANLSKTDKDYKEIIDISKKANPTSNEVARYKLWLEQKYQSPYTGEMIPLSKLFTSAYQIEHIIPQARYFDDSFNNKVICEAEVNGLKDRMLGYEFIKNNGGSIIQLSGGKTVKIFTDEQYVDFVNKYYFNAKKKNLLLTDIPDDFINRQLNDSRYISKLVKNLLSNIVREKLENGEYEAEVTSKNLITCTGKITDRLKQDWGLNDVWNRIILPRFERLEELTGKEEFTTYNEEGHKIPAMPLDLQQGFKKKRIDHRHHAMDAIVIACATRNHVNLLNNESALSENKANRYQLQYKLRKREKAKINGEEKEVFKAFYKPWDTFTQDAEQVLRNIVVSFKQNLRVLTKATNKTQYIDKKTGKVKFKPQEKGELLAIRKSLHKETVFGEVNLREIKDIKLSEALNKPQSIVDKELKAEVYRLKALGKDDKAIIKHFKDNKDIWNSEIKNDKVKVYYFTKETNDRYFATRKAIGDIVSKKEDIKSITDSGIRKILENHLEANDGNIEKAFSPEGIEEMNKNIYELNNNKPHQPIYKARKFEKADKFAVGNRGNKNKKFVEAAKGTNLFFAIYELNDKRSYVTIPLNLVIDCQKRYKNNWKEQLDSVLKEEKYVKDSKAKLLFVISPNDLVYLPTQAESKTKQYAFDRNRIYKFVSSSGNQAFFVPYFIANAIIKTTELGANNKAERAWSGEMIKETCIPIQVDRLGNIKPL

SEQ ID NO: 8763 - protein, 1238 aa, unidentified
  REGION 1..1238: note = Description of Unknown: Cas Enzyme sequence
VVRCRTYDTNITKIIGAQRLFPKFTKILFGMEKVLGLDLGTNSIGWAIVQHNDDSSYSLLDKGVNIFQDGVAHDKSGEKPMVSERTAARSSRRHYFRRRLRKIELLKVLVKYDLCPYLSEEELSEWKNHKKYPLKDEFLEWQKTDDDLDRNPYHDRYVCLTQDLDLSVISNRYMLGRAFYHMVQRRGFISNRKETKKDDEGKVKDSIKSLTKAMQENGCDYLGEYFYRLYEKGGKIRKNYTDRVEHYKKEFNAICEKQHLDVELVKALENAIFYQRPLKSQKGQVGHCTFEKNKTRCPISHPRYEEFRMWCFINNIKVRTWNDDDYRPLDSNEVEQIIPLFFRKSKNQFEFDDIAKKIAGKGNYCDKTDKAEKAYRFNYKMFTSVSGCPVTAGLRSVFGDDWLNQICGVYSLGEGKTQDQILNDIWHVLFSFADEDKLKEWAKDKLQLSDEEAEAFEKISVPQGYASLSLNAINKILPYLRKGYRYDEAVIMANLPAVMGSDAGHLPAEVAENIAIIMEDHVSNPLEKKKSIHQSVTEYLRDCHNVDCKRIEKLYHPSMIETYQAALPVDGIYKLGSPRTSSVRNPMAMRALFRLRKLLNELLRDGKIDSDTLVRIEFARGLNDANMRKAIEIKQREQKRLHDDYSAKIKEQMGDDYAPSDDEILKYQLWEEQKHRCPYTGAQIGLEDFLGASPKYDIEHTVPRSRGGDNSQMNKTLCESQFNRDVKKGMLPAELANHLEVMANVDSFGWQEEIDSLRERLERTRGYSATKEEKDRKIQDRHYLKMKLDYLEGKLKRFAMTEVPEGFSNRQGVDVGIIGRYARMYLQTVFKRVSTVKGATTAEFRKMWGLQDYYSKKERVSHAHHCVDAITIACIGRNEYDRWAQYMRDEERYRLSAADRPHFPKPWETFTEDVLSVSDSILVPHYTPSNLSKHTKKRLRVRGKLQYGPNGERLYVQGDTARCSLHEQTFYGAIKKNDEIKYVVRKSLDSLEPKDVDKIVDDVVREKVKSAIAEKGFKKAMSEDIWMNEELQIPIKKVRIYTPTVTSPIKLKCHRDRSVHEHKRYLHVKNDGNYCMAIYEGNNDKGKVIRSYKLVNNLDAVNYFNGKTGLDNLVPYSDEKDLPLKCILKTGTMVLFYEKSPRELYECGVEELSKRLYKVTGMSSMTIKQGDRSYVYGTIECRHHLEARRSSDLKSKSGAWKNGETYRSVISLLHSQLNAYVEGYDFDITSSGQVKFKH

SEQ ID NO: 8764 - protein, 1075 aa, unidentified
  REGION 1..1075: note = Description of Unknown: Cas Enzyme sequence
LDLSVISNRYMLGRALYHIAQRRGFLSNRKENKKDDDGKVKDCIKSLTKAMQENGCAYLGEYFYKLYAEGGKIRKNYTDRVEHYKKEFRAICEKQHLDVEQIKALENAIFFQRPLKSQKGQVGHCTFEKNKTRCPISHPRYEEFRMWCFINNIKVKTWKDEEYRPLSHDEVEQIVPLFFRKTKSQFDFDDIAKKIAGKGNYVDKTDKSEKAYRFNYTMYTSVSGCPVSAGLRGIYGEDWLDQICGVYSLGEGKTQEQILNDIWHVLFSFDDEEKLKEWAKEKLQMSSEEADAFEKISVPQGYASLSLCAINKILPYLRKGYRYDEAVILANLPAVVGCDVRELPKEVVENIAIIIEDKLYNPLEKKKSVHQSVTEYLRDCQNVDSKRIEKLYHPSMIETYQAALPVDGIYKLGSPRTSSVRNPMAMRALFRLRKLLNELLRDGKIDSDTLVRIEFSRGLNDSNMRKAIEIYQREQKRLHDDYSAKIKEQMGEDYVPSDEEILKYQLWEEQKHRCPYTDAQIGLEDFLGVSPKYDIEHTVPRSRGGDNSQMNKTLCESKFNREVKRGLLPAELAVHSEIMANVVSFGWQEEIDSLKKRLERTRSYSATKEEKDRKIQDRHYLKMKLDYLEGKLKRFTMTEVPEGFSNRQGVDIGIIGRYARMYLQTVFKRVSTVKGATTAEFRKMWGLQDYYSKKERVSHAHHCVDAITIACIGRNEYDRWAQYMRDEERYRLSAADRPHFPKPWDTFTEDVLSVSDSILVPHYTPSNLAKHTKKRQRIRGKLQYGPNGEKLYVQGDTARCSLHEQTFYGAIKKNDEIKYVVRKSLDSLEPKDVDKIVDDVVREKVKAAIAEKGFKKAMSEVIWMNEELQIPINKVRIYTPTVTNPIKLKGHRDKSVHEHKRYLHVKNDGNYCMAIYEGNNDKGKVIRSYKLVNNLDAVNYFNGKTGLDNLVPYSDEKDLPLKCILRTGTMVLFYEKSPKELYECGVEELSKRLYKVTGMSVSTITQGEKKYDYGMVTCRYHLEARRSSDLKAKKGEWKLGEDYRPVIELSHKQFNAYVEGYDFDITSSGQLKFKH

SEQ ID NO: 8765 - protein, 1207 aa, unidentified
  REGION 1..1207: note = Description of Unknown: Cas Enzyme sequence
MKKILGLDLGTNSIGWAVVNEAENSEERSSIVKLGVRVNPLTVDESQNFEKGKSIETNTARTMKRCARRNLQRYKLRRDELIGILKENGFIKDDSILSENGNRTTFETYRLRAKAAVEEISLEEFARVLLMINKKRGYKSSRKAKGGEDGQLIDGMEVAKLLYDGEMTPGMLCLQLMNNGKKKMPDFYRSDLQSELDRVWEFQLSFYPSFLTDDVKEEIKGKNKSQTWAILQKYFVWSESVAEWNSAEAHTYNVERDFKLVGLKRTTKGFEQKQENYVWRTLALTERVDPEVLAIVIQEINGEINSSSGYLGAISDRSKELYFNNMTVGQALMRSLEENPHVSLKNSVYYRQDYLDEFETIWEKQAEYHPELTKELKRDIRDTIIFYQRRLKSQKSLISICEFEREDKVITKDGKTKTVVIGSRVIPRSSPLFQEFKIWQTLNNIVVSVSDAKGKRRKRNEKSLFDEAADIDLLEVEGYRFLTVDEMQILAEELSVREKMSKTDVLKLLFGNSSGLDLNYKDIEGNKTWAELYKAFSDILELSGHEPLDLKNGASNVKANVYEVFSALGWNTSVLDFDSSLPLDIQDSYKLWHLLYSFEGDDTITGDGKLVEKISALCKCDKEYAKVLSGVTFVDDYGSLSAKAIRNILPYLKDGCSYDIACGKAGYRHSASSLTKEEIENKELKKFLEILPKNSLRNPVVEKILNQMVNVVNELIRTYGSFDEIRVELARELKKSQKEREDLSRALASATREAESVRAILQSEFGIQHPTRNDVIRYRLYEELKDNGYKTLYSNTYIPREKLFSKEFDIEHIIPKSRQFDDSFSNKTLEVKSVNIKKGNKTAYDFVLEEYGEKELEEYVKRCEALFKGKRTKLRNLLTEEKNIPDGFVNRDLRNTQYIAKRALAMLNEICRRVVPTTGSVTDQLRNDWQLVDVMKELNWEKYKALGLVEYHEDRDGRLIGRIKDWTKRNDHRHHAMDALTVAFTKDVFIQYFNNKNASDKPNSNEYAIKTAYFTSGRAVAPMPLEVFRAEAKRHLDCILVSIKAKNKVVTNNVNKTRSKKRGGNTKLQQTPRGQLHLETVYGSHQEYVVKEEKVGAAFDEAKITTVCRQDYREALLWRLHDCDGDAKKAFTGKNSLEKNPIWLNEQKTKSVPLKVKTVELSTVYTIRKPIAPDLKIEKVVDAGIRQLLTQRLQDCGGDAKKAFGNL

SEQ ID NO: 8766 - protein, 1023 aa, unidentified
  REGION 1..1023: note = Description of Unknown: Cas Enzyme sequence
LYISNEAYRHSISNRDFTYLFIDNIIFYQRPLKTKKHLIANCPYEEHEGIDKNTKIYRTYGVKCIAKSHPLFQEFRLWQFISNLRIYKKGGVNDEDLTDKFLTKEEDFVDLFDWLNTKKTINQKSLLSYPKFNLKKDSTNYRWNYVEDKDYPGNETRAQLLTYLNKANVKPEFLTKKIEEELWHLLYSIEDKLELTKALNKFAQKHSLGNEFQEVFQKFPAFKKEYGSYSAKAINKLLPLMRMGEYWSIENIDETTKSRIEKILSGEFDEKIKDRVREKSLSLTDINQFKGLPLWLVCYIVYNRHSEAKDIAKWQSPADIDNYLSTFKQHSLRNPIVEQVVTETLRTVRDIWKQCGHIDEIHVEMGREMKNTAEDRARITLQNIENEHTNLRIKTLLAEFKNPEYDIENVRPYSPSQQEIFKIYEENALGVEYKVTRNKDTQTSKIDVAYKNVSEEDSDIIDIVKKMNNRVQPTHAEFLRYKLWLEQKYRSPYTGQIIPLSKLFTEAYEIEHIIPQSLYFDDSLSNKVICEAEVNKLKGARLAYQFIKDCTGQKVELAFGKVVTLFTEEQYKEFVKENYSRNRTKMRKLMMEEISDEFVARQLNDSRYISKLIKGLLSNIVRKEGEEEATSKNVIVCTGGVTDRLKKDWGVNDVWNKIILPRFVRLNEITDTNQFTTYTTNGHLVPSMPLELQKGFNKKRIDHRHHAMDAIVIACASRNIVNYLNNESASGKAAISRRDLQVLLCDKVKNQVQGNYQWIVRKPWNTFTQDVHQTLDGIIVSFKQNLRIINKASNNYTILKNGKKTLEKQEGTNWAIRKSMHKDTVYGEVNLRKIKTVSLNDAIKNPSRIVDKEFKRELLGQLSFGKNVKQIKSYFETNKDVWKDINLSKISVYYFTKETKERFFATRKPLDTSFNKKKIEESITDTGIKKILLRHLELNNNNPEIAFSPDGIDEMNKNIVTLNDGKFHQPIIKVRQYEKADKFAVGEKGNKSTKFVEAAKGTNLYFAIYETNTENEKTGEVNR

SEQ ID NO: 8767 - protein, 1110 aa, unidentified
  REGION 1..1110: note = Description of Unknown: Cas Enzyme sequence
MNPHFTPEAQSSLEFWNNDPFYAPETVVLGLDIGIEGIGITVRRGQEWLYSKTLLVDLPEAEALAERRAFRASRHARKNRKTRMRRLKELFVKHALPWVDDDIMSRSDPFKLRYRAITGTLASKEALSICIRSCVLRRGYDYFAMNDDESEVIGEMPWGAENSLSEAKKWLSSNYVDAPLRDLLLSLTPLLTHNKKELKEEQIKEWQDGVEQRFKTAEKEGIPATLQAYVKNNLSERKARGRNYPRNHVEEHLRCIIQRHQHLIDSPEEFISALFHPNLTWHDKQVSIFHYNRKTPAEAKRHFAKKVKECPYCTWLGIPAERCGVKGDINIRKWKLIDFVSCRTFECQSLSKIPLGRTTLPAEAVQSLMSAIAENTKTWNEAKKPLEATLKKKGLKLSTGEWNKTQLEQLKDIVTPSTGTRQGRANMSVSAAKLMVAKATNNDSCFEPLALETWKKDSNLYTHRAEIDANGGIYPQVQTLLGTLRKKKDEQPVSFATEGFLHRLFRELSRKHGINPIPDYCVIECVKNAATTKKRKDEITKEIADNKKKRQKWAEDFGKPNATRADFLRMRLFCEQGGSPKTPATCPFTGQELHVADLFTAKLQLAHIYPDSKGGLYMAENLVLTTQAVNLAMADRTPKQAAAAGLPGWLSWDNMLKQSAKFHWGKMKKGLFAHDMEKDPFPDFDNTTRTAQLAAELRNLAAVWMGINHDAELLRTRIGNPAGIYTAAARRGMLWPEYSKNRADNNHHRWDAAVMTCIPPTGINDVRCRGIFHSILNEKRNRTLISLEGLPTPDFNELKHDGGECPIVTINSRSKYKSLGDSTFWGVDKEGITHQRTPLDPSKLKAKELFDTLSNMGIPSNQIPSQNKLERWLTDCQAATKDDTIDTLPLKLNNGTPIRNIWKFSSKGNIDKSPIGWNGIISPDGTFDQLRSLSASNDRLELWLGWNMKKKRWEYYKRIIPTKAALDGIKRMGLPWRGTKDAPPYLLKLLKQNKAKDLHQLICGQLPPYAIKVATFRKGDIFLLDFELNQKYIDKLLKKEEKVDMLEYPQKLQTWGRITAIGSAPYIEFRSLTHKDRKSKSLKQADEYAKLKGLEAAAKEASRRKLTPPA

SEQ ID NO: 8768 - protein, 1215 aa, unidentified
  REGION 1..1215: note = Description of Unknown: Cas Enzyme sequence
MGKIIGLDVGIGSLGWAVINEDKRRIEDLGVRIFESGEEGATKSADRVSQKRRAYRSTKRLNKRRNQRKIALKKIINELGIITPEEIDIAYSTKGFNPDVWKYRVEGLDRKLDPIELTAVLINFANYRGYNDFYADSEEDKEGKLTEAKNAISAKYENDCNQLKKYRTIGEMIYLDKSFRDSKGRLEIRNNAINKDGKKETHFKYLIDREYLKKELRILLNKQNEFGYKQLTPDACNVIEYIIFKQRDFEDGPGPKNNPVKYEAMKNANRGNQHYSGFDELIGFCPFYPTENRGYQNSLIYDMYVLINELSQLHFYNSDNEEICCPETMVTEMFLMMFENEGVLKYKEIEKLAKKNKVGYDKPKGITKKQITGKYIKFLMKENNFTDTLRKEFAMTHYDDQDSLAEKIGYIMSKYATPSRRKDELQKEFDKRGLKPEFVKMNYGKAIKVEKMGGGASVSFKYMLEAIRAYFDGVKYGDFQAKTNEKADDRKKYKIVSSTGKILPIMDKDMVRNPVVYRSLNETRKIVNALMRQYKDVTAINVEVAKDVGQSFEQRAETKKYQDKNAEKNEALRNKLYNEMINKGYNVPMSDMVIARYTLWESQKKMCIYSGKEITFDQVIRGTTVQVDHIIPQSIVLDETLNNKVLVLTTENQKKGNKVPLEYMDKEQAEEYKNRVLNLYRTNDISRIKKEYLLLPNLNDSEVISGFVDRNINDTRTISKYVAVLLDKAYRGKGIKVNVIKGSVTSRFRRRWLGRRTRINLPTSVYGLEKKTRDLHYYHHAIDAAVVANLTRKYIELGQDYEKISSIRKEYDYHSKNGNSAHAKTLFDSMNNEIEKTVKKMHDQYHMSEDYVRNCLDYAYVPSIVDNFRKEIEVRVPLVIDMKVNEYERDDKNYKELKRLLGRALSQLKSDNDAGEEFLLISPTLVEQINERLSYYDSKLAAISEKGELIKCDGDRVEESTKGNLTDLKEYIKSMKEPELKNYIKDIHFCFEEEYSERVMDYYDDKEFASKIKVPYVSFKINRRYRGSMVASDVPVSLKKTGCATIKQLEEKLKELKCPYYVRVNSKNGEKLNFTIYDARSYYCIEVYVDENGKYQVRGIRYVDLVHKPKHQKLVLRKPLPEGCVHVAYLFKNEYIKVTDKKGKLKNNGFGAYRGVENINRNTGKIRLFSNLDLNKRDVVINLSGEIIKVEIDVLGHVQGESKCGDQSLFIVENT

SEQ ID NO: 8769 - protein, 1002 aa, unidentified
  REGION 1..1002: note = Description of Unknown: Cas Enzyme sequence
MVKPYLVLGLDPGIASCGFALIDMNNHEILEMGSHLFDAPQEDKTKVSLAVARRAARSSRRNNEHTKNRQKHCLELLISAALIPEGADKQWLQSRKGDRPLLELRAAGLDRLLTDREFAQVLYCLSARRGYIPHGEGRIGKGAVDTKDASDAETGKVLKAIAENNKRLASGQYRTVGEMLYAAGKSRNAGGAYENCVLNEQIQDEVHALFAAQRSLANKKATEDLENNYIQNLVWEKKSLEHDAKVYALVGRCSYFPEEKRAALADLSSELCRAYERFGHIRIVDADGGEQPLSSAKIEHYISILFSPVGLKNNKTCKVTYALIRKDLDLSAHCVFKGVEAGKEKDREPFAPKAWRNMRSHGMPEELLERMLENRHLADAICEALTYASSEESLLERLATLDLSDSERDAILSLPFSGKVYKGYGSRSLTALELLLDSFEDPNVLTLTDAERASGLLGKRLADENVRFTLLPSYDYYDKECNNPVVLRAMGRMRRIVNSIIKIYGVPDEIHIELGRDLKRSKREKDIILKRNRENEAKNRQWRKDAAEVLGIDPDEVPGKLLKKMALHEEQGGFDAYTGDPIVFDRMIREDRYCEIDHVLPYSRTCDDSQNNKVLVLSKSNQDKGGRTPYEWMMEDAGNGAPSWDEYRARVLANREVSYRKRTYLLNTDLSPEKQAEFLSRNLNDDRYMSRAVKNYLESMLQFPDNGRKKHVIAVAGGATAALRRVWGLNLGVMDTKDRQDDRHHAVDACVIAACSESTLQKVATVRSLGRETFKRMREDRLSSTQPWETFAVEVLARREFVVPTRMVSHGVTGRAFEDTNYRFYGFTEDKKKLALLKGNGKLVKKGNIVIGKDGNAHLVDGMAFLRLWLDPTAKNGKGKWYAEPVYYADIPAIKNGTYVPKAGERGISRATWKPLPQSATVFEPITLFRGDVLMANNSVARFWRINISTISLIMQPLIPGKPIGDFPSLGKWDATTRVRVIREDCLGHCYNGIGFQSSSED

SEQ ID NO: 8770 - protein, 1401 aa, unidentified
  REGION 1..1401: note = Description of Unknown: Cas Enzyme sequence
MAKILGLDLGTNSIGLALRNTDNGDSIKDQLELFTSIIFKSGVGTAKTGEFSYAAERTKKRSARRLYQSRKYRIWATLELLIKEGYCPLTIEDLDKWRKYDKEKGLKRQYPIHAKEFEQWVRLDFNGDGVADYSSPYQLRAELMEKQFDFSNQTDRYKLGRALYHIAQHRGFKSSKGESISEQKQSEVGEEFDVTELKKSEIKKSGELVKIMQENNLLTVGCALYDLEKRGERIKASKYQAVRSQLKDEIIQIFKFQKGLDENTNLYKRIISDKKGEGTIFYKRPLRSQKGNVGKCTLEPNKPRCPISHPEFEEYRAWSFINNIKYRENENELSLWQTLPLELKQKLFKEKFLRVKTSFKFEEIRTFLEKELGIKLVCNKTTGTINYKDNTSVSACPVSARFKNLLGENYQQWTFESEKCRVNHKTGEQHRIKYNYLDLWHICSTFDEVEYIDGFAKEELGFDDKQTKQLATIWGNIQQGYGSLSLKAIRNINKFLKQGFIYSNAVLLAKLPDIFKTKWEKVEIDVLSDLQKIIDGSKYQKEIFEITNKLIANYKSLDLEERFAEHNREYKLQEQDLKDVEDAVSKHFAGKSKINILQIEKDVKELYQKFFSSSKRDYYHLPKLSESLAEYLIERYSYLNKEDLKKIYHHSMIDIYPTAKETLLEDGRYLKLLDSPVIGALKNPMAMRVLHTLRSQINDLIKQGKIDEQTRIVVETARELNDANMRWAIEQYQRERENLNKEIEKKLKEENITPTDDAVDKVRILVEQQDILDLENDVKKTKNKEDKELYYNKYIKKYLLWKEQEYRCIYTGNIIKLSDLFEENKIDIEHTIPRSISFDDSLSNLTVCYANFNRNVKKKQFPSQLTNHAEILQRIKPWIEKVEHLEERINHWKEESKKATTKDRKDECIRQRHLWEMEYEYWKKKVDAFTIKEVSEGFRNNQLNDTRTITKYAYHYLKTVFNKVDVQKGKITAEFRKIVGVQSVDEKKDRSKHSHHAIDATILTLIPNAEKREKLLKLFYQKEEDETNKALYEAEIKKILKSFVPKDSVIIKDFIESNILVNHISKDQSLTPARRRKRIRGKIVPILDKDGKKILETNEDGSLKRDKYGRPIPKAKQWIKGDSIRGELHKDTFYGAITRNKDFENPIYVVRRELKHKKSEQDTGFKNWEELEKVIVNKDLIKMMKEQFPENTDFKTAVEQGIYMLDKNGNKVNQIRHVRCEVPSVKNPLKIKEQTYKSKKEYKNTYNVVMGDLYAMSRYESEDKKKIEYKVWSLFDISKNRKSIGEDIPQLSNGKTLSHILTRGDLLLIYNTSQQELYSMDNIQLQQRLYVVRGFENDGKRIILTKAINAQQDKDLGKGESVKDFNKMPEKIRQGINGLNYLIKGKDFDLIGGEIVFLNKK

SEQ ID NO: 8771 - protein, 1209 aa, unidentified
  REGION 1..1209: note = Description of Unknown: Cas Enzyme sequence
MKRILGLDLGTTSIGWALVNEAEHESEQSSIIKLGVRVNPLTVDESSNYEKGKAVETNQVRRQKRSAHRNLQRYKQRRDTLLSILKKHGFITDDTLLSENGENSTYETYNLRAKAVTEKISLEEFARVLLMVNKKRGYKSCRKAKSGEDGKLIDGMTVAKKLYDENLTPGQLCFQILSDGKKALPDFYRSDLQEEFNRIWNFQTQFYTSVLTAELKEALAGKNASQTWDTLSKHFVWTEQRQSWNEELAQNEVIDVVFQLTKPNRKVKGLELKKENYAWRNKALSEKMHPEELAIVLQEINADINKSSGYLGAISDRSKNLFFNHLTVGQYLLNRLSKNRHNSLKNLVFYRQDYMDEFEAIWESQARFHPQLTPELKAEIRDVVIFFQRRLKSQKSLISICEFERKDQEVVLRDGKKKTIVVGSRVIPRSSPLFQDFKVWQSLNNLEVIVVDDSGKKKRAKKNVASPTNATEASEALELEGRRRLTQEEKEILAEELSIKTELKKAQILKLLFDKTDALDLNFETVKGNTTGHLFYQAFSAMMDLSGHEPLDFKKPSTELKNQAHAVFKSLGWNCEILDTQVYLDQPLDDQLSYQLWHLLYSFEGDDSATGDSKLKEKLTSLCNCPTDYVSPLIDLVFEDDYGSLSAKAIRNILPYMKEGCGYDIACTYAGYRHSASSLTKEEIEQKELLDQLELLPKNSLRNPVVEKILNQMVNVVNEIIKTYGRPDEIRVELARELKKNQKEREQMTKAISAATKQQEQVRELLQKEFGIANPSRNDIIRYRLYEELKGNGYKTLYSDTYIPREKLFSKEIDIEHIIPQARLFDDSFSNKTLEYRDVNIKKGKQTAYDFVREAYGEEGLKRYLSACTSLFSQQKTKLKKLKMTEAEIPEDFIERDLRNTQYIAKRALAMLHTICRRVVATSGSITEQLRKDWELIDIMKELNWDKYAALGKVAYHQDRDGRQIGRITDWTKRNDHRHHAMDALTVAFTKPAFIQYFNNKNAAQQEGTELYGIRNAYFHNGRAIAPIPLHTFRTEALRQLAQILVSIKAKNKVVTLNVNKVRKPKGGTFTKVQLTPRGQLHNETIYGSRREYVTKEETVGSAFDANKIATVCKAIYREALLWRLNQFGGDPKKAFTGKNALDKNPIWLNEAHTKAVPSKVKTVSLDTTYTIRKDVSPDLNVAKVVDVKIRKLLEARLEAFAGDPKKAF

SEQ ID NO: 8772 - protein, 1017 aa, unidentified
  REGION 1..1017: note = Description of Unknown: Cas Enzyme sequence
MGYTLGLDLGVASVGWAVVNDEYEVVDSCSNIFSSADAAKNKERRDFREKRRTKRRCRTRISDFKILWEKSGFKVPDTTRNDVLKLRIKGISEKLEEDEIYAVLLNNLKHRGISYLEDAIEENSEGDYAKSIAYNEKQLREKLPCQIQYERLLKYGSYRGNRTVIPEGESDSIILSNVFTISAYRKEICLFLDKQIEYNSNFSHEFKNLYLDIFNRKREYYVGPGNELSRTDYGRYTTQIDYVTGKYITEQNIFDKLIGKCSVYKDEKRAAGASYTAQEFNALNDLNNLLVNERKLTEEEKRKIIESLKTAKVVNMRNIISSTMGEKIEMLSGARIDKNDKEIYHCFEAYNKIRKSLEALGVDIASISTDDLDIIGEILTLNTEKDVILSEFDRRGIELSAEVKECLIDVRKKNGKLFSKWQSFGLTIMKELIPEMYSQPKNQMQLLTDMGYMKTSNEKYRDCKNIPYEYIVNDIYNPVVCKTVKITVKVINAIIKKYGYPSCVVIEMPRDKNSEDEKKRITDIQKNNEKELQTIIDKIKKENGISITDKDFINHSKLALKLRLWNEQKGICPYSGKYIDIQNLLDDPFKYEVDHIIPLSISFDDSRSNKVLVYATENQSKGNRTPFAYLSNVDREWDFDEFMNYVLTTYKGKEKSKKRELLLYTDDITKISVLKGFINRNINDTRYASRVVLNNLQAFFKAKDVNTKVKVIRGSFTHQMRLNLKLEKDRNESYRHHAVDAMLIAYSNMGYEAYHKLTEDFIDYSDEEYIDKDGFDLILNKDMAYKENMYQKKWMDIKKNINSANVKYWYQVDKKCNRGLCNQNSRGTRIIDSKVVKINKLSIRTDDGIKNFNKLINSGKTEKLLIFKNNPKTFDYLMQIYKQYADSKNPFLEYEKDTGDKIRKYSKKHNGPEINYLKYEDGEVNSCIDISHKYGHKKDSRKVILESLNPYRMDVYYNINDDLYYFVGVKQSDIKCVDGKHVIDFEKYTNNLIQEKIIDKGDDYTKLEGKGFRFKLS

SEQ ID NO: 8773 - protein, 951 aa, unidentified
  REGION 1..951: note = Description of Unknown: Cas Enzyme sequence
MATKKILGLDLGTNSIGWAVVNAETTDNGLQPTSIANAGSRIIPMDAKEMGDFENGKSISQTRERTQARGTRRLYERRALRRERLNRVLNLMGFLPEHYTKHLNRYGQLNKGQEPKLAWCPDENGKMQFLFRSAFNEMLEEFYTLHPEFRNGQKKIPYDWTVYYLRKKALRQAISKEELAWLLMMFNQKRGYEKLRGEDEEQLDNKLQEYLVLHVVNVEVIAKNQHKITLENGWEFLSKERYANQWKGTTKEFIVTTTIDQDGKPIVDKEGYIKRTFRAPDENDWGLLKIKTEKQIAESGKTTGEFIYDTLIRKLDTKVLGKLVRVIERELYKEELVQILNTQKQYIAELQDAELFTSCVEALYPNNPAHSNALLKKDFVHLLIEDILFYQRPLKSKKSSISECPYEYVKNENSGEKVYHKCISKSHPLYEEYRAWDFLSNLQIYNGSIMQNVTTEYITNKAELVEWLLSRHEITQEVLLKHIVEQKQKLSQDKVNTKSIKDEIAQKQLTWNYPADKKLPMGSTTSRLMKCMLEYAKPTTENIDEESKKNILYAQYLEPLWHIMYSISKPLELEKALTKFSQQAKAPIHFDIQLVEKLKKVKAFEKQYGAYSHRAIKKLLMLMRCGKFWTLDNINPKNLWEIQVRNRVERIITGEEDKNMSTWIREKCKEMHELSDFQGLPKWLAESIIYNQANKEKWNSPEDIDQYIQDFKIHSLNNPVVETVVLETLRVVRDIWKQEGQIDEIHIELGRNLKQNAEQRKRTLANQMENEKANLRAKLLLQAFMNPEMDVEDVRPYSPSQQELFRIYEEGVLSAHKANDDINRIIQSLSELKQPSLQDVKKYRLWLDQKYQSPYTGQIIPLSKLFTPAYQIEHIIPQSRFFDDSMSNKVICEAEVNARKDRMLAHEFISKCGGETITLSGGKVVTVLTTTEYEHLIKELFASNKSKHEKL

SEQ ID NO: 8774 - protein, 1176 aa, unidentified
  REGION 1..1176: note = Description of Unknown: Cas Enzyme sequence
MKRVLGLDLGTNSIGWALVNEAENKEERSSIIKLGVRAIHFDTFVSSDTGKEVKGDPSDFFKAGKGVSPNAGRTQKRSARRNLQRYKLRREMLINILKESNIITDDSVLSEQGNFSTFETYRLRAKAATEEITLEELGRVLLMINKKRGYRSNRKAKGGEEGSLIDSMDIAKKLSDEKITPGEFTYEILKQGKKHIPDFYASDLQNELDRIWHFQQQYYPNTLIESLKQEIIGKNASQTWAILAKHFMWCETITEWDQDNAKNVTKEVNLRLKGIKRSTKGDALKLENYQWRTKALKEKMPLEELAIVFQEINKQISQVNGYLGAISDRSKILYFNKLTVGQYLLSSLNDNPNVSLKNMVFYRQDYLDEFNRVWETQSKYHRELTDDLRKKIRDEAIFFQRRLKSQKDLISYCEFESDVKEITTPDGNIKKITIGSKVIPRSSPLFQEFKIWQILNNIEVFGSNNRKKKKQIKQESNLFEETEGLDPLVIGGRRRLYPEEMDVLAKELSFRKKLTKQEALTLLFDDPSGLNMNFKTLEGNQTGAELFKAYSDILELTGHDPITTKDCYDSALSKIESVFESQGWNTDFLTFDSNKKLDTQKYYKLWHLLYSFESDNTITGNGNLIRKIADWTGMPKEYTSILANITFLEDYGSLSAKAISNILPHLKDGNQYDVACEYAGYRHSKHSLRKEEIENKILKDRLEILPKNTLRNPIVEKILNQMINVVNAIIDTYGKPDEIRVELARELKKGAKEREALTKSIEQTTKLHEEYKKILQNEFGLTHISRNDIIRYKLYEELKDNEYKTLYSNTYIPREKLFTGEFDIEHIIPKARLFDDSLSNKTIELKSINIEKGKMTAIDYVREKYGDEYAEEYIRKCETIFGKDGYRSKLKKLLMKESDIPDGFIERDLRNTQYIAKTALQMLNEICRRVVATTGAITDKLREDWQLVDMMKELNWKKYEELGLVEYIDDRDGRRIKRIKDWTKRNDHRHHAMDALTVAFTKDVFIQYFNHINASHTADSSEYAIKSKYFHNGRALPPIPLDEFRSQAKKHMQDILISIKPKGKVVTNNLTTNGKEGQRFIQQTPRGQLHLETVYGKRKRYATKEEKVNASFTRDKINMISKKAYRIALNNRLDEFAGDPKKAFTGKNSLDKNPIWIDDMHTHKVPEKVKLVFFEE

SEQ ID NO: 8775 - protein, 932 aa, unidentified
  REGION 1..932: note = Description of Unknown: Cas Enzyme sequence
RSDLVLEFNRIWYFQMQFYPQFLTEELKKELENKNRNQTWAICSKPFSLVGIKRTTKREEQKLENYEWRVKCLSEKVDLEVLAIVLQEINGQINNSSGYLGNISDRSKELYFKKLTVGQYLMEKLSANPHFSLKNIVFYRQDYLDEFERLWEVQSQYHKELTPDLKHQIRDIIIFYQRPLKSQKGLISLCEFENRTIEINVEGKKKTKTIGLRVCPRSSPLFQEFKIWQVLNNIQVSGSIIPDVQKDLFGETKEYKYGKRFLYQEEKELLFKELNYKEKLSKTEILKLLFKNYKELDLNFKENIEGNKTNAALYNAFQKIIDITGHGEYNFSKMQADEIISIVEPVFKGLGFDTSILHFDASLEGRDFEKQSAYQLWHLLYSFAGDNSKSGQDTLVNKICERFGFDKECAKVLAAVNLQSDYGSLSAKAIRRILPHMKDGLEYSAACEYAGYRHSKHSLTKEELQNKELKDKLELLPRNSLRNPVVEKILNQMINVVNNVILTYGKPDEIRIELARELKRNAKEREEMTKAINAATTEHENYRKILQDEFGIGNPSRNDIIRYKLYLELKDNGFKTLYSNTYIPQEKLFSKEFDIEHIIPQAKLFDDSFSNKTIEVRSINIEKSNATAMDFVEGKYDEKEVNIYKIRVEELYKNGVISKTKHDKLLMREKDIPTGFIERDLRDSQYIAKKAREILEDIVRVVVPTTGSVTDRLREDWQLVDVMKELNWQKYDKLGLTEIREDRDGRKIKHIKDWTKRNDHRHHAMDALTIAFTKQSIIQYLNNLSARSDKSSSIYAIEQKELYRDQHGKLRFYPPIPLDEFRDVAKKMLEQILVSIKAKNKVATRNINTTKTGNGKRNKKVQLTPRGQLHNETIYGKIQQYVTKEEKINASFNAEKIATVANQRYRLALFERLNEYGGDAKKAFTGSNSLAK

SEQ ID NO: 8776 - protein, 1118 aa, unidentified
  REGION 1..1118: note = Description of Unknown: Cas Enzyme sequence
MSYKNTIFALDVSATAIGWSVLQGRLNLNEQVIPERFIDGGVRVFPTGRDPKSGDSLAVARREARSARRMRDRFLQRKKHLLNHLIKFGFFSQDPAERKRRLREAQSSKERPFGDIWNLRARALTEQLPLYHIGNVLYHLNMRRGFKSNRKTDNKDNEKGKIAMGIEELRAQLQLTNSPTIGVYLAKRHNEGRVVRLRQDSEAYIGEKQDNYLFYPERSMLEDEFNQIWAAQKEFYPEIMTGKARRVLFKIIFHQRPLKEQKVGRCAFNPDEERLPKAHPLFQEFRLYKELNELTIELAENVNGRKLTLEQRDTLAAILRAQKKMAFSAIRKQLGLKGTTFKKEKNAREGLIGDEVFAEMVNQSRFGQAWGDFSRERQWEIINQLREEPNPEKLDRWLAGQFPELDEEQRQAIADTKLPEGYGRLGYTALSNMLEELKAEVIPEAEAAARVGYDHALLGGDREALDRLPKYQAVPNVARSIPPGEGGRAVPENDPDYDKIMGRITNPTVHVALNQLRLVVNGLIDKYGKPQDIAVKIDRDLSLSEKEKITANKSIKENTQAALARNARLAELGIKESGYNRQLIRFWEELNEDINERRCPYSGELITLKRLFSADVLIAHILPYSRTLDNSNANKTVCLKSWNDQKRGLAPAEAADLIEGWDYPAMLARAQYLPQAKRWRFTQNAMTQFEKEESWIARQLEDTKYLSRLVRAYLSCLYPGREENSAGEMRMRYHIRTISGRLTETFRSIWELNTLLPDATEINDPERPKNRLDYRHRAIDAAVSGITTREQLATIALAAKYSEKRALDNYIKRAFTESLPWADFRTDLQRMLERVIVSHKSEHGTLPTGKDRKEGKDKTVAKLMKETAYGLPVDEKGERLRDEKGNEQVIWRVPLRSLTAKDIAKIRDPYLANELSAHIYTETGALKDGKEFTAALLSFPTVNKPYQGIRHCRMIDVRNTIPVYDKNGRAYKGYWNDGNYRYDIWQTLDGNWHYEVITMYDAHKPGYKSAFHATHPTAKRIMNLHQNDMVAYHDLELDKRVIARVVKFSANGAIVFAPHNEAFVDRRNRDKVDPFKYFTKTANTLRPLRFRKIRVDAIGRVTDRLAAPLFRDILKVKP

SEQ ID NO: 8777 - protein, 1119 aa, unidentified
  REGION 1..1119: note = Description of Unknown: Cas Enzyme sequence
MNWRLGLDLGTNSLGWAAVELDEAGFPFRFLAAGSRIFGDGRNPKSGASLAVNRRDARAMRRRRDRFKQRQAALLKYLERDGLFPSDPAARKALAALDPYMLRARALDDVLTLPEIGRAIFHLNQRRGFQSNRKADRGKDEDAGKIAVGIDRLVDAIDAAGARTFGEFLHLRRAAATDRNAIPSVRVRLRAETGDEAKGDGYDFYPGRNLLSREFDAIWEAQAPHHPQVMTDEVYTHLHEIVFHQRPLKAPRIGMCTLVSGEQRLPKAHPLFQRRRLLEEINALMIVQPGEVAERLTPEQRDLLLLKLKDKRKAGFESLRKLLKLDPAARFNKESEHRTELKGDEVAAEMAGKGKFGTLWLHLSPDRQWEVLVRLQGLESEADVAAFHTWLVGEHGLTSDQAKAVSGARLPQGHGRFGLTATTALIDALTEARTPDGRTPAAPAITPGRVVVYSEAAAIAGYHHSDHRTGEIFADAQGRPALPYYAVPLERHILPGTADPDEPDEALRLGRLTNPTVHIGLNQLRRVVNRLIRAYGPPAEIAIELARDLKLSEDEKKRRNQENSRNRLDAEKRSTKLEELGEADGGANRALLKLWEELNPDNVLDRRCIYTGQQISIDMLFSGAVEIDHILPFTDTLDDSNGNKIVCLREANREKRKRSPYEAWGHTDRWDEIAERAARLPRNKRWRFEPDAMQRFAEEGGFLARHLIDTQYLGRLARDYLTCLYPETGEGSGNVRVSPGRLTEMVRRKLGLNNLLGDHNLGADQPKNRKDHRHHAIDAAVVAILDRRQLNRIARASGEGSSYDDIQKIIVPAPEGWDRFRDDLKDVLDRVVVAHRADHGTVSKGRLRRGRDQTAGRLHNDTAYGFTGDTDAQGNSIVVHRVPLGSLKKPADIDRVRDPVLRAALSDFTLGTEGKAFERRVAEFSRLGPLDYRGIRRVRITEPLSIIPIHDAAGKAYKGYKGDSNYRYDVWEMPDGKWLTHWTDRDGRECSSIVSMFDAHQSGGQSRPHPAARKVLSLHQDDLLLVDPEGGEKRVMRVVKFGQNGQVTLAEHQEGGDLKKRDATDNEIDKFKYISPTAGGLKKARARQVRVDELGRLLDPGFPARKSVRVTRTRLHAKE

SEQ ID NO: 8778 - protein, 1172 aa, unidentified
  REGION 1..1172: note = Description of Unknown: Cas Enzyme sequence
MSTIWAFDLGKASIGEAVWNTEMKRFDHVASLLIPAEFASTKAAAARRRMMRTRQAHKAREAWLEEVWTQAGLTPLHGRKVGKVSGQWQLISAGDEKLEREFPAPGDGTCYTSCLLRIKLLRGERLEEWQIYKALRSAIQKRGYGRVPWAARDVKKKDLTEEELQKELEKQEKDLAKKDPMYRAAIEAWPHYKETHDPRFHYPCYYDADKQKLWNQEAPDVLKFVVDHLAESTRQVRFDREDVEKEIAELARQAAKQIPALASAFAKWQTQGWTVPHRETKKPQTFAVRATDMGAFLVHGPAGEPTDDAKMDFAQFIAFREEAGIHVGSHDDWMGATGQKTPRFDNRIVNDCAVMTGMKVCKVDVRFDSKTGKPWPDSLLPAEVTFLMKLKNTLVQEGYSQRKLSPQELRSLFAQACKKLDAIKPDTKNRSEKATKCFSITQAAWGKEKGIKELSLRPLPGHEEVKPPKFEGRSRYSRPALKLIRALILSGQAPSLFLKRLESREAALLDEIGMDIYDADPTPVVAGQKQKHALARPYLLMSHLKFLRDLAATNDTWEGIYIPEQKMDALEAKHRDEDGQVDAASAIKELIASNNDPIVRHRLEVFASRLAELESVHGAPSEVVLEFVRTDFMGEDAKRDLAKFQKDREKARQEARSVMMENHIDDRSAPLKYELLLQQRDLCLYCGDNISMDQIAEDKVDIDHIVPRSKGGPDAMVNYVLAHRKCNAMNQGKGDQTPFEWLHGKPGWDAYVDRVNKCATTLRNKKVQLLLREDARTLVERYTALAETAWISKLAKKIVSLHFGWKNGVDDSGDLRVTVVSGGLTGRIRRKYKLNGILNPNAESEEEAEKKNRKDHRHHALDAMVISQLPNWMGDKKKEKFFRFEEPIAKNPRGFFASEIERVMPEALAYEQATLADTTYARRWEDAQGKVKVIVQRTPLIDLAMKPNARGEANYDLTYLEKNITTIRELKVKKDGKLVDGPLVMALKDLLNTRPSQHEWEDFCAEYRKPRKDGSNGPRVIQVTVLAGEPTEYREMSKDRTGAWRKGGGNHQGQIIYHHTDGNPKVHPVYVHASIPQEIKKLKDAGYLVQGFFQSGCIVKTMQVVTAAEYSHVIRNEKDEKRRVAATAPLPPCLMTLRNIITKDMVAELTLADNTRIVAKIDVWVKAGITRI

SEQ ID NO: 8779 - protein, 992 aa, unidentified
  REGION 1..992: note = Description of Unknown: Cas Enzyme sequence
MQAKELVTKWSKHEFYQNALVLGLDIGIEGIGVWLRKGRECLWARTYETTIPESAPLMGRRLKRSARRCRQSAKHREVLLRAFCRRYDLPWADINSNPFKLRLRAITKHLASKQALVICLRHIIRHRGYDFHLTNEGNYPWGDDLDLNKALAWAKSTSCNSSLAEKLRYELSSVGLTKEKLAGFFAALDKSEADYAKQPIRKMLEAHFAEKSHLRPPARQHNFPRELVKEHLKEICRRHPHFFGGPDKLEAALVELIGDKDHPDCILDYHRKEPGALAARMVKTCPYAPHLFTGEKLRCDANSELPVRKFKLVEFLASRTFVSEDGTRLPVTAPLFDWLANVLTQDAAALTAKKPRPATKDLRKDFAKLASVKLASDKLSHNGDFFEQLKDLLSPKMNVLKARASLSAKAAHRLCELALTDGFQPERIQHHLKDYYGWRLDTQRGYGVYPQVEFLLGRRSKKDKQAVPGKLRRILARPEIQARLDGKSVPDYVVIECVGDIPRHRLDKLEIQAEQKSKRAFKEALFAKHGIQSNATDSVRKRVLLYDQQGGSRGEAICPYTGKSLGDNPLSPKLQIDHIYPRRDGGISEMVNLVLTHTETNLAKGKRTPWQAYSKSWDAVLANLGKMQWNKSKKALFGRTDTDCPDWKNMTRMSQLARQLKDEVAHWLGIKGQPLELARRIGTPSGFLTSVCRQSWQEKLPVKNRANQRHHLWDAAVIAHIPPGLGLNQAQYGGIFYQERGEEPGQIAWQALPDLGPDVLAFEQAHAADCLVEKPRQKRAKSSRAEETIYGMDAAGQLWARKEILNEGKPREGVERILEQAGFPTSPKDLLPRKRIKDWLSGHQGKPLRLANKTEVRRVPVTAGEESPTALIPHKNDQGEIIGYKKAKETYWRCEIWQEPGKDKKGKPIYKRRLIPHPRGLAAMRKRGLPWKQKAKGATESLRQQVCGKLAPFSKKVGSFAKGDLVRLPLDANGVICPPTAKPFCWLWYQVS

SEQ ID NO: 8780 - protein, 1210 aa, unidentified
  REGION 1..1210: note = Description of Unknown: Cas Enzyme sequence
MSKTETVWAFDLGKGSIGEAVRVALDFPHKESLLIPAELARRGPATVSGTPASRYRAMKTREAHHERERWLEMVWASAGFAPLRAREVWENPATGKWELKHAADYRLEREFAPRVGEKTKDGAPSDDVGARVCYTSCLLRIRLLQKDSTLVEWQIYKAIRAALQCRGYGRVPWAAREARKQGKSPEELHQEEEKKLQQADPRYREAVGKWPDYKHSVPLEFHFPCYYDALRMRLWNPSNPNALLERGNHLADSTRNIRFDRADVRAEIIKLGDMAATLLPALGNAFALWRRVGWKYRHPISGVELTYPVFAKTFGEFLCDGPAGKPDETSFEAFLSQRQKAGLRRGSFEEWMAALGQKTPSFDNRILNKCVLIPRFHVCKVDVRYETDKDGKPTGKLIPESLLASEVTFLLKLKNLLVAAVPSGQRKLTPAEIQNIFEYAHRQLKSLKLLTTEGELTKNWPGKVADCFSLSQSEWGKVKALGKLRLRPMPGHEEVKAPKLSGRSAYSRVALRILKELILSGGDSPSSFHSKLLRRDSELLGKLGAAPDKPLALFDDSTATDAEARKREDDANRQRGLLISELRFLCRMRKDFADADSDSWENLFIPSQTLDALQQRHTNNGKLNTDAAIRDLLGTINDPIVRHRLEVFTKRLKKLQHGDRKEEIPPFGIPDAVVLEFVREDFMGEKARRELKDFQNKREAARKLAREETQKAGATGTSAALKYELCTMQGSLCLYCGQTFSLAKLEEYAIDHIVPVGIGGPDAMVNKVLSHCECNENKAKQTPFHWWHYNSSSKPPPISWDGYKALVEKHATTLRNKKVQLLTREDASELVERYTALAETAWVSKLAQTILNLYFGWTNGYDNKRQKRVIVVSGGLTARVRRKYRLDKLLYSDVTDPEVLAKKVKNREDKRHHALDAMVLTFIPQWVRDSSKEGFFKFPDGVNQDFFRPHVQQVMPRQIAYEQPALADTSFGFRRTNGKPVIVKRVPLFDLAQEPAGAPGKTKFSLRYLTKKIESVRDETIRRRLKEEFLDNTPDEATWKTFCESFAQRRKDGTPGARVIKVLVDVGEPDEYKDLSKDGTGAWRKAKGDHQGQIIYTDAEGNLAVRPVYAHASIKQEMQALGDKSQVHWFVRSKCLIRLHNELAQADYKLVIKNEQKKKRRVPAKTPLHPATFMLNNIITKSMDVEFTAASGQRLVAPLRVLINAGFAPV

SEQ ID NO: 8781 - protein, 1035 aa, unidentified
  REGION 1..1035: note = Description of Unknown: Cas Enzyme sequence
MKKTTLGLDLGPNSIGWALIEENDADESASLVDAGVRIFQEAVESKTKTPKNQLRRASRSARRLLRRRKMRREYLLSLLQGHSMAPSEAAAFERWASLLNPYELRRRALDERLTLEQIGRCLYHLCQRRGYWSNRVSERGSKKEKGEVLSGIASLKAAIEASGSRTLGEYLAKEPSQRRRFTERDMYQTEFKAIWASQALFHPEVLTPDLRAKIFKVIFHQRPLWGQAIRRRDAEGKLLQPPARRKFIGKCTFEPSRKRAPKASPTSQLVRILQELNHLEIRNPITREWRRLTTEERSVLFRRLQSHKSLTWDAARKLLGLNSGETFNLEWGKRKKLDGNKTACDIREIIGAAWDGLGHSGQEQLVVDLLTITGEEGCLRRLKKHYGLDQDAAQKMAELELEKGVARLSIKAMRKILPHLEEGLRYDEACAAAGYVHSNPNTILHRLPRLPAPANIRNPVVEKALWEARRVINEIIVAFGRPSVIRLEMARDMKETKRQREETNKRNRAREKDNERINDLLRRNLGIAQPSRADRIKYQLWEECGGICVYSGLPISERMLFSGEVDVEHILPYSLSLDDSMMNKTLCIAKENREVKRNRSPYEAYSGNPERYNEILLRVRKLPKPKQSKFEQKEIETDEFVARQLTDLRYICVEVKDYLQQIGTPVEVSKGAATADIRRLWGLNTLLAPEGEGEKNRADHRHHAIDAIVIALTSRSLFMKLSRLSQTNYMGLSPSERGFSIPAPWPNFRRDIEDHLRRMVISHSVNHKISGALHEETAYGMTSLPAAKGRRMLVVRKRLSAFDKMKQIEDVRDAGVRGLILARLEECGGDFKRAFNDPERPLLHKDGRTPIQSVRVLVPMRERGLMGIPDEGGQPYKFFALGSNHHVEIIENIRTGRREGRFVSTLEAARRARIAKEPVVKRDHGPEWRFIAALHINDMVEIEGKIYRVQKMSDPSITFRLHTAATLDDSEEGFRRSVNTPMKFLEINALGKIIAINGVRNGQAPRRDRESGEPAPAARPTDGESRGKTGDLFTD

SEQ ID NO: 8782 - protein, 1589 aa, unidentified
  REGION 1..1589: note = Description of Unknown: Cas Enzyme sequence
MAIILSLDIGTNSIGWALIDDVRKRILKVGVRIFPEGVDQINTSKEKTRNAARRIARGMRRANYRYKLRRKRLKKVLKELGMLPNEDYDTIVNDVSKEKNYFGKRLYRLRKDALDIPLNPEDLGRIFLQINNHRGFKSNKKEDADKEFGTKKDADKINTLEQKTDTLLALKRDIEKIEKEIKAIRYSGKKDSKKRIDIRIKKIQGKNKEIEKVNSIKTLQEKLNDAKAQGRIKYGTLGEYYYSLIERNKNSHNPNSPYLNKNNGGGRLRNNDDGEGEYTTREIFENEFELIWSRQQELNKNNPNLSLILDEANKKRIKEECIFYQRDLRSQKHLVDRCNYEYTTYFTYKFNNNDILNQLSKLRYLKIDSILSNDQKEKLFKQLKNKSGTTVGEIRNLLELKTLPVYLELNNYQKNSLAERLKNNTTITVAEIKKLLNLKDEQNSTLLILNLPDDKTLERDYLRCCHKSSLEFQEFRIWEQVNNLRYIDEEDLEHSLTIEQKNILVNKLFAVKELTIETHNKSSNEEKEDVAELKEAINLPLSHKFKEIKKLKGNVTLYKLIDALGEDYWDSISIKDNIPQKEVLDTKTGELITYQETIYSSKQRQLYNNIEFATSFIKSIDWLKGEGKSNHWKESIKKLGLTPNQLIAYSKITFEPDYCSYSLKAIKKLLPWMKQGIDVTNAAEKVGYEMASDERRNENYLHDFLPTLKNNALRNPIVQKGAAETFRLINIILKEELKNEKPDKIHIEMARELKKPKEARVKQKMQNDEKEKERKQWADFLKVDVSSSILTKFELFLELEQVKENFEQLKNDISVEQFVQFCKNVLGKEIKLNADKFNQLKVKLNSKTVAEEDDNTDSDSKESKKEEKAQLLLLKYRLWLECGRILPYTNEVIGLSRLLGEDSDIQVEHIIPYSRCMDNSFLNKTLSTTAFNTKKGNLTPLEYFANDEKGKKAFMKRVGKIDNEEKQKRFLIDSEEALNTFRNSQIRNTAYIATEVKKHLLTTFRRDDIEMTNGQITALLRKIFGFDTILNPPINVSDKYQPGKYWAILKKDNEPELIRLTKESAIPTKENDSDTIIEGTVANGRFYPKKQRNDHRHHAIDAIAIALSSKNIIQIIERNTEGYYVKNGKRLNAFEKDAIWVSKFDSYGQFTKDVFTDIKEEIKQAMNFPRLWPKAFDSIENLLISYNNKNLVTSSGKKKVYKNGKVFYSGGNVARGALHEDAIYGKTENLKDNEFVKRIKVSNLTWSQILNIADSKIKSILIKDVSKYAQEKFNQDKIQTPSIETFALTFEELVELDMKKTFYEEEIKVLEEIGELSEDEKRDKKVLSNQLEEIKRKLNPDKERNKDKKGKRYKDYLEKGFKEAMKVGFFIENNSKKKDEGIIREPIPIKRVRVKYISNSVEKYKGDTYNGKAFIKPGENFCMAIYGDDIVKTGDSRLFDTITLFKAASIEANNNQIRKQNIVLKSKGLAPRKLQPLFDKNLNGKKLLTYFSKKDMFLVYEQHPEEVNYLIDKIGLSGEEEELLFDRLYRIVKADINGKIGLAKHNMSGVNTDYPKRYPKGTVIKCNWNTFKGIKVIVDHFGKIHKAEL

SEQ ID NO: 8783 - protein, 1172 aa, unidentified
  REGION 1..1172: note = Description of Unknown: Cas Enzyme sequence
MKTILGLDLGVASIGWAIINEDEKQQKLILSGVRVLPMDNETVSNFVKGAAYSKNQERRQGRSARRNNHRYKLRKYFLNKFLGENGLLPIDEALFKLSPIALYGLRDKAIREQVSLQELARIWYHLNQKRGYIDSRKGAGEDEKDPKYVENIKNRSKHLYDNYETVGSYFYHKLLENPIYRIKSGNDKENIFLVDDYKREFDLIWNEQAKYYPALLTDTNFDVLRNKIIYYKRKLKSQKHLISECRFEKYHKCMPVSSPIADEIRLWQDINKAMIVDKYNQREELSAEEKVDLFNYLNNNEKITEKEFLKRYSKDRHSKNDKVNFEKQIRGSIFKVRLLNLLKKYNHDESIFEDFDALSENFIEHPLYKIWHLLYATEDVNDIRKTLSEKYFYTDEDLISEILKLPIRNDFAALSSRAARKLIPFLRKGMMYDKACKAAGYNHSNSLTKEQNAERTLVSIPDLQHIKQNALKNPTVEKILNQLINLLKALHQDGYRFDEIRIELARELKKNAKQRKKITEQNRENEKLNAEILEKIKEHIKNPTQRDIEKYKLWIEFDGVSPYEPNNRILLSELFDKAKYEIEHIIPKSRYFDDSLNNRTIARVQINKEKDNATAYDYMISKSPEVFQQYIERVKNTKLSSAKRRYLLMGGKDIPDDFINRQLNETRYITAETLKLLKSICREVVSTSGSVTDYLRHHWGYDNVLMNLNFERVSPQEIEIKEINGQLRKVIKNWTKRNDHRHHAVDAIVIACTKRSYIQQLNTLNATYDQAEDLKSLAIKHRVPFSFEEVKENVANILVSYKAGKKVGTKKKIGKDRWHKTPGNFGQVMIVPRGQLHEESVYGEVKRYAGPVDISKLKNVDECAVGWQKNAIIKHIGKYDNDLAKALKNIKKDPVIFEDNKVLNEVVVFVRGNVKKYDLQYSTLNKFDKKAAAFIVNENVKKIVLARLNEFDNDPAKAFKNLNERSDKNPDGNPLYFNREKNIVIKSVRCFTGGSDYPALHVSEKGKTLNEKQSRAFNNAVPVDFVKGGSNHHIAIYRKENGEVVEVCVTFFEAFNRMVNEQEVIQKDHPLGYKFVASLQRNEMFVFGVEPSELEQLIDQNELDKISKHLFKVVDIAPGQYRLLHHLDTKLGDNNFKSYLRNMNRFIQKSASSFSGIKVRVTNTNKIFICND

SEQ ID NO: 8784 - protein, 896 aa, unidentified
  REGION 1..896: note = Description of Unknown: Cas Enzyme sequence
MPYRLALDIGANSIGWAALALSPDGHPVGLADAGVRVYPDGRNPKDGSSNAAARRAPRAMRRNRDRYLQRRTNLLNALTRFSLMPADPDARTKIAALDPFALRAAALERRLLPAELGRAIFHLNQHRGFQSNRKTDRGDNESGLIKDAAANTAAELARTGHLTIGSWLAARHLRHAGVRVRLAGRGKLAAYAFYPTRDMLKQEFATIWAAQSAWNPALTDAMRDTLHGIIFHQRPLKSPPVGKCWLEPDQDRAPRALPTAQRFRLAQTLAHLQLGQPGHPTRAFNAKERELLLGILHRGSDLTFDQIRKKLGLSAETDFNSREDKIPGCAAAARLGAKKNLGATWHALPLATQDAAVNIILDAETDAAAIAALIALGLSPADAACANAINLPDGRAALSARALGKILPFLEAGEIYSTAVQSAGYTHHSDRRTGEIRDRLPYYGEILHARIGTGTGEATDNDEKRLGRAPNPTVHAALNEIRRVVNAIVERHGPPAEIVVETLRELGRSKLQRQAKDKEIATNRAANDALRDELVRLGFPTTGRNQMRLRLWKEQAADPRDRCCPYTGTNITARTALSDAVEEDHILPFAVSLDDSTANRILVTREANRIKSRRDPFAAFGHTPEWPEILARVANLPEQKRWRFQPDALAKFAANGDFLARHLTDSATIARWAVEYLDILAPEKVRAVPGRLTALLRNALGLNSETVLGKGRAMKDRTDHRHHTIDAIVVGLIDRSMLQSVTAAAQRAADAGRRLLMDVAEPWPNFVADVAARVSRVVVSHKPDSGWQAALHNDTAYGEIPNAGPKDPNVVVRRTIDVLADKSPDDIRKSVRDFMLAAKIAAAVEGRDPTARKVALADLTHTGGHPVRRVRMVERLDSVQPIADRRTGQPYKLVKR

SEQ ID NO: 8785 - protein, 1061 aa, unidentified
  REGION 1..1061: note = Description of Unknown: Cas Enzyme sequence
MARIKYRLALDMGANSLGWCVYRLNEHDEPDKIIRVGSRIFSDGRDPKTLASRAADRRLARQARRRRDRVLKRRQKLMQGLIRFGLMPSDEAGRKQLQALDPYELRARGLNQPLSMHQLGRALYHLARKRGFRSSRKDARDEETAKETGKVKLAIAALRERVAAAGCCTVGEYLARQHAERAPVRARRSSDGGYVLYLQRAMVAEEFDALWSAQQAYQPQALTNDMRNELRDIMLFQRRLKPVEPGRCPFEPDEYRARLCAPLQQRFRMLQDLNHLRVREGIGDRSLTLDERNKMLALLEKDAGPKPVSFTKLAKAAGLRDAKSFNYGRDAKRTGFKGDAVGARFAAPDAIGETWHALNPQQQYALAVLVEQADQVEPLVAALLALPESSEVANDILKGIFDPTERAAIEAELQTLPIRLEEAQAQKLASFNLPDDYGSLSLKALVRIVPELEREVITYDEAVRRAGYASHSLLHTGEFFQRLPYYGEVLRGYTTPTPTARDEGEHRYGKIPNPTVHIGLNQLRQLVNALVKRYGHPHQVVIELTREFGASGEHRREIQKQQKDAQDRNARYDAQLAELGVRVNRENRQKLQLWEELGKDDAMDRYCVYSGQRLSKALLFSDEVEIDHILPFSRSLHDGIGNKILCTRQSNRDKGNRTPFEAWGHTGRWNDVEERAERLPEHKRKLFREDALKTFLGERDFLERHLNDTAYLGRAAKQYLTYICPMNKVWVSSGKLTGLLRGKFGLAKLLWKDGLKNRDDHRHHALDAAVIGLCSRSLIQRMATAAANAEEHGENRLLEKLELPWPTFRDELKACLEAIAVSHKPDHGKQAALHNDTNYGWRGNVDKRGTPLVGRRKPLDSIKNASEAASVASEALREEVVRLLTPLSTAKDVKAALLAYSERTGIRRVICEERLSVIPIRDRRTGEPYRYVKGDGNFCYEIFRTPHGRWGGEVVSSFEANQRGFAESTATAQNGLPLVMRIHRDDVLAVDVNDGRRLMRVAYFTAGMIALVDLYEANADARVRAKSLKYFFKSPSTLKPLRARLVGVSILGYVNDPGFRE

SEQ ID NO: 8786 - protein, 1423 aa, unidentified
  REGION 1..1423: note = Description of Unknown: Cas Enzyme sequence
MEKILGLDLGTNSIGWAIRDTSETENQIIDKGVLTFDKGVGEGKSGEFPLVQKRTESRSKRRNYQAEKYRKWALLETLIEQKMCPLAIEELDEWRKYKKDVGRKYPQSNDFIQWLRFDFDGDGKPDFERLGFSKHESYYLFRMLVVSDEEQHKKIFQDNPHILGRVLYQLVQRRGYRGRDDEDEEAKTILKGSAKTGTKGAEDIIPLIQEYKTLGSALYHLSKDKHERIRKRYNLRTDFEHELKEICRVQNLDDLLFKKLWKAIVWQRPLRSQKGLVGYCTLETPAKNESNKFIKAGKKRCPVSHPLYEEFRAWVFINNLKIKLPENIDKTTALKENIYPLFYKSSRDFKLSSINKELRKLGGNILSKHSKGTKNKEDDTKVVSCTLLNSFKETLGDDWKEKYGWEEALFDKTKPCKYSFEDIWHILFTFDSKEKLKEFAVEKLGIDEELAEKFSKIKLQQGYATLSLSAIKKILPYLYHGFIYSEAVYLANLHKVLGKDIKIEDGLIKTFSSEIEKIIKQQNCDKQLINIVNSLISDQINSGFAFSTDTDYQLNDDDKDEIERKIISVFGASTWNDKTETEKEETIEYISKQYLAFLQSYRTKERTETYLKSERLHDKIFDYLQDTYGIAEENKKHLWHPSEQETYEEATTKNNIPVLGKPQPISNGFKNPMALKTLHKLRGLMNYLLQEEKIDEDTRVVVEIARELNDANRRKAIEKWQRDREKENNEYKKIIDEINQECQTSYDREDKALIDKIRLWKEQEMHCPYTGDMINMCDLFNGVKYDFEHTVPASISFDNELKNLTIASSKYNREIKNNRIPFDCPNYTEEKTILGITCKPILSTLELIFGNIMIEEKIGNGENKRMVTSERTDHINRQIDFWINESKKASSKERKDYCIQQRHLNKFELDYWRKKLETFTIKEYKAGWRNSQLKDTQVVTKYALPFLKTVFKKVEVQKGSVTDDFRKIYKIQPRLEKKKRDKHSHHAIDAVVLTLIPPAAIRDKILFRYNEANDNNLPYHESVRQWDNFNGQSIKKWIEDETLINFQSEYRTITNTYKNVRKRGKQQFVKEKREDGRLHYKIDESGKKIPIVAKGDTIRGQLHKETFFAAIKQPQYKELNDKFIPETDGKGNFIFQQNQKRGDDIFIATKVLLSDFEKLEDLEIIIDPNLKQYLKKEIQTRINEGKTFTQATENLFAFGKKTDKNGNKINPLRHIRCKVKSGGGGFLNNPATIKPFKAFISKQPYKQHIYAQNGETSICAFYQSMVNEVLVREIHPYSILDISKVKDKTNLDDAVEKNLEKIIKKQKHLIPLYTTLKINQKVLFYENDMEELKTLSHKELSTRLYLIIKFEDGRISLKHHLNSMSEEDLKKEMKKLGLADVGASSFSFSNPIPKLRISKSSFNFSIEGKHFEIKPDGEINWIF

SEQ ID NO: 8787 - protein, 1149 aa, unidentified
  REGION 1..1149: note = Description of Unknown: Cas Enzyme sequence
PQLLKNEKGEDKLVPYDWTIYYLRKKALTEKIEKAELAWLLLHFNQKRGYYQLRGEEEEENPNKLVEFHSLKVVDVQADEPQKGKSDIWYSLILENDWIYRRSSKTPLFDWKDKVRDFIVTTDLNDNGSVKKDKEGKEKRSFRAPGEEDWTLLKKKTEQEIHKLQKTVGAFIYDALLQNPKQKIKGKLVRTIERKFYKDELKKILEVQKQFHQELQSEDLYNECVRELYRNNESHQLILNNKNFTHLFLEDIIFYHRPLKSKKSSISNCTLEYRKYTDADGKGKTEYLKAIPTSNPLYQEFRLWQWIFNLKLYTKDDDSNVTNEFLNTIEDYENLFGFLNNKKEIKQDILIKHFLEKKGLKGKTLSNEFAKYRWNFVEDKDYPCNETKALITSRLSRVENIAQDFLTNEVEQQLWHIIYSITDKMDYEKALKTFAKKHKLDEESFVENFRKFPPFKSEYGSFSEKAIKKLLPLMRLGKYWNWSSIDKKTIERIGKIINGEYDEDIKDRVREKAIHLNEENNFQGLQLWLASYIVYDRHSESASACKWNTVGDMEKYLDEFKQHSLRNPIVEQVVTETLRVVMDIWKYYGSGTKDFFNEIHIELGRDMKKTAGERKKISDQVTENENTNLRIKALLAEMMNDKDIENVIPFSPMQQEALKIYEDGVLTSDIEIPEDIQKISKIAQPSSTELQRYKLWLEQKYRSPYTGEIIPLNRLFTSDYEIEHVIPQSRFFDDSFNNKIICESAVNKLKDNQLGLEFIKNHHNEIVETGKGKTVKIFNEEEYKEFVTLHYAKSRSKRNNLLLEDIPEKMIERQINDTRFISKYISSVLSNIVREDKDDDGINSKNVIPANGKITSELKQDWGLNDVWNDLILPRFVRMNHITNSATFTTYNQKYKKHLPTVPLELSRGFQKKRIDHRHHAMDALIIACATREHVNLLNNQYAKSPKRYDLQRKLRKFEKVIYNDRKRNEVIEREIPKEFIKPWKNFTVEAKNALEKVVVSFKQNLRVINKTSNKYEKWTYENGKKEKEFVKQCKGESWAIRKPMHKETVSGLIKLRKNKEVSLNTALDNHLNIVDKKLRQEVETLIKTGYDKKKLVKHFKKLKNGDKDISKVAVFYWETDNVASRVSLDTSFTKNRIKGITDTGIQKI

SEQ ID NO: 8788 - protein, 948 aa, unidentified
  REGION 1..948: note = Description of Unknown: Cas Enzyme sequence
MTRDEALARLRAQVAAGKPIIGAGAGTGLSAKCAEAGGGDLIIIYNSGRYRMGGRGSLAGLMPYGDANEIVVDMAREVLPIVKETPVLAGVCGTDPFRLMPVFLAELKRIVIEQRPLKKPPVGRCTLMPDAGEVERHELRVDEGERAPKGHPLFQRFRILQDVSQLRISRPGSNERRLTMQEFRAASAKLMDAGGSVVDFAKLRSAMKLPDDTRFNYELSGRKGFPPDQTAVKLSDKRAFGKTWRSLARDRQVEIVERLLATEDAGLLQDWLQDSCRLTAEAAEFVSEVRLPQGYGQLGRAALAALVDIMERESHADPTTREVVDAPMTYDEAVARLEAGLHHSDFRPEVKGRLPYYGEAMPRHVIAKPDAPPGSQEKIGRVPNPTVHIGLNQLRAVVNALIETYGPPAEIVVELARELKLNQERKDEIQRENRDNERKNQDRREHLAKLGVADTHSSRLMLRLFGELPADEKVCVYTGASLSVERLFDGSVDIDHILPYAATLDDSAANKALCTRRANRFKGKRTPGEAWSGAELQEIVERAERLFPRKAWRFQPDAMQRFAERGDLAARHLTDTQHMARLAKGYLEHVCEQVWASQGRLTAMLRGKWGLNALLPDHNFSDVNQPKNRKDHRHHAIDAFVLACTDRGMINRIARASGEAQDLDLGRLFPRGGFPEPFEGFREALREKLDAIVVSHKPDHGLAAVGRGGRATSGKLHEETAFGLVQEEIEGKPYNLVRRKPIEALTEKLIGQVRHPDLRAQLEAVARAAKAEGRPLAQALAHYGEHSGVRRVRVLETNKSARRFAHGGGRFEKAYIPGSNHCIEIYQTQDGKWRGEGVTTLDANTPGYRTRWREEHPHARLIMRLQQGDLIEADNGRGRKVYRVSSLWIEQGTIPLAEHNQTGDLSARHKDPDDPFQWWYSSYSGLKKAGARRVRVDPIGRVSPAVDK

SEQ ID NO: 8789 - protein, 1387 aa, unidentified
  REGION 1..1387: note = Description of Unknown: Cas Enzyme sequence
MKKVLGLDLGAASTGWAFVHEAENENEQSAIIKLGVRVNPLTTDEKDDFSKGKPVSVNAGRTLKRVARRNLQRYKQRRQNLINVLKKAGLIDADTILAETDENSTHQTYALRSKAVTERIEKAELARVLLMINKKRGYKSSRKAKNEDEGQLIDGMEVAKKLHKLNLTPGQLSYQLLQEGKKSVPEFYRSDLKAEFDKVWQCQSQFYPEIFTEEFKKDIEGKGQRATSAAFWTRYGFNTAENKGNWQDRKLRAYKWRSLAVNTQLTAPEAAYVITEINNNISNSSGYLGEISDRSKELFFNNETVGQYLYKQLQQNPHANTKNKVFYRQDYLNEFEAIWENQAKYHPELTPELKKEIRDIVIFYQRKLKSQKGLVNFCEFESKVVEYEKDGKKVKYQMGAKAIPKSSPLFQEFKIWQNLSHLQVQHKKIKQPEFLSPEASELLFAELNIKGGLPKDEILRLLELNSKEWELNFTAVEGSRTNQLLYDAFFKMMELEGHDEIDWIKLPAVEIKNIIREFFASQGIDASILDFDALQTNSSIEQQPAYQLWHLLYAYEGDDSPTGNEKLYALLQSKFGFKKEFGQLLAKIGLQTDYGSLSAKAIKRIFPYLRENKYSEACMLAGYNHSHSQTAEENAARELKPKLELLRRNSLRNPVVEKILNQMVNVVNAIIADPALGRPDKIRIELARDLKKNAKERAVATLQINKTKAEHESIRALLIKEFGVKNPTRNDIIRYKLYDELKFNGYKDLYTNDYISREELFTAKYDIEHIIPQSRLFDDSFSNKTVVLRTINIKKGNATAFDFIKDTYGDAALGEYKSRLEAFIKFYPERKAKYNKLQLEGAAIGEGFIQRDLRDTQYIAKKAKAMLHEICRSVVTTTGSITDRLRDDWGLVNIMQELSLEKYRMRGLTEMLEMKDGNLKEGIIDWSKRHDHRHHAMDALTIAFTKHSYIQYLNHLNARNKEDEFTESVLRIQAKETKIGTDGKRRFNLPVPHFREQAKEHLEATLISIKAKNKVITKNKNKIKTAKGEKLQTTLTPRGQLHKETVYGKVQRQVVSEEKVSTKFTAEIIARVTNKAYRAALLNRLNENGGDPVKAFGGKNSLAKSPLYTDEVQKITVPEKVKLSWLEDDYTIRKDITPDNFKDIKSIDKIMDGAVRNIMLKRLDEFKGNHKEAFSNLDKNPIWLNQEKGISIKRVAISGVKNAEPLHFKKDHLGKPIIQNDKPVPVDFISTGNNHHAAIYRDEEGNLQDEVISLHKVITERVNTGSPIIDKGYNQHLGWRFLFTIKQNEYFVFPAADFDPTEIDLLDPANNTVISKHLYRVQKFSKLTYGNSAVREYVFRHHLETSVDDKKELKDITYKNIKSLPYLERIVKVRINHLGQIVKVGEY

SEQ ID NO: 8790 - protein, 1013 aa, unidentified
  REGION 1..1013: note = Description of Unknown: Cas Enzyme sequence
MGTTILGLDIGTNSIGWALLDCDDTEKARGLLASGVRIFQEAVDAKTRAPKNRARRTKRGMRRNLERRRRRVGKVRRLLMRNGFLPSTPDLGPMEAEVLNEIGDPYVLRARALTGSLSSYEFGRVVLQLAKRRGFLSNRKTKLKALLEDPNLAQKIESGEGDPAVDERLSDEEKKEQKQIAGEIKYIREEMKSGKFRTLGEYLASQRAHDPLRPVRRLHPGREMYEEEFQHLCEAQAPYHDLLRDPDFRVALHQAIFYQRPLRSQKFLVGKCQFEPTRRRAARARLDVQESRLLQDVNNIQVCDRSTGAYRTLDADEREKLLSFLRDRLKPTWTAVRKELDIHKNQPINLEESEKDLRGCSTQYRLRKILGDVWDSWTMDKQESLVEDLLTIGDRKALLRRLETAWEMPSAIAFELATLDLESGYGSLSVKATRAILPYLRAGRNYHDACQDAGYLRPDQRPKTSLDKLPPPPQTRNPVVQRALHEVRKVVNAVVRKFGKPAIIRVELARDLKLTAKDRERILKQNRENERLNKRAAEALAARGIHEPSHEDLLRYRLWVEGKETCPYTGRAIGIEQLFSGEVDIEHILPYSRTLDDSYMNKTLCFAEENRLRKKNKTPFEAYGSDAAAYEQILQQARSLPAPKRRKFEDRGPIEIDDFVARQLNDTRYASVAARDYLTLLGVRVQVGKGGATALLRTKWDLNRILSNDSSKNRGDHRHHAVDALVIALTDPGSLKRISSLSAARDVAGPWDRRLKVSEPWPGFEKEARDVMRAVIVSHAASRRLSGAFTEETAYGPTNEPGTFAYRKSVESLSEGEVERIRDPKVKERVQARLAEYGGVAKKAFTVPLFMTDDSKVPIRKVRLETKLSASAVCAVTDASGRAFKYLKLGNNHHVEIFEHVETGKRRGEFVSTIEAAERARRRKEPVVRASADREWKFVMSLAINDMIQVGIGADAQFYRAQKLEATNNRVVFRAHTAALLTEKSEGLVLSLGKFDCEKVVVDLLGEVTPSRN

SEQ ID NO: 8791 - protein, 1605 aa, unidentified
  REGION 1..1605: note = Description of Unknown: Cas Enzyme sequence
MEKILGLDLGSNSIGWSIRNAENSEIVDYGVVVFKTGVGTNKDKNESRAKERRSYRGKRRLYNAKRYRKWALLKVLIKNKMCPSLSETELRLWSIGEWTEENGRKINKGRKYPMNEEFLLWLRMDDKYFGNKGISENGKEIRKSPYDLRCELLESFIEKDIERNYRIGRALYHLCQRRGFKSSRKGGKSAFKPDETFDKAVKENANVTPAQIWNKDLEEKNIRIRGRGKIDREEFVKEFRAICEKQHLEKELSEALYNAIYFVRKLRSQKGLIGKCTLEKGKPRIPISHPLFEEFRALQFVNNIKKRSAGRDEEFESITMDEKKKIFSEMFFKKSRIKTPNFKFEEITNKFSEKGKYEFNYERKNPSVSACPFIAGLMDVLNEEWSDKFITDENRFGINWSGLQLKYKVAYGNQQDKERILKIDYFKNDESLWHLIFDFVQTQDNDEKLLKFLTDVVGLNIEKAKCFTNIKVAQGYGSLSSSAIRKIIPYLQDGYIYSEAVSFANLKTVLGEENFNKNKDIAKSTIAAVICRMDEEKEKLNIVNGLIQQHYAITKSNKAPGLTDDIKEQAIKDIEKKFLQYFGETNWNKFPDEKKKQYQDFVTKKYCNFLDGKQQPVEKAAYKPNKEEPPTDYYRLPRLDKAIKDALSNEPFNATKENLEKLYHPSDIEIYPPASEKEIIDKSTGEVVKIKELPQPMPPSKGWKNPMAMRTMHELRTLVNYLLSRKDKEDKPRIDEETKIVIEVARDLNDANMRKAISDWNDDREKENEEYKAAIAELYQITSPSNDNYDKFRLALEQIEKIEIDENKESSFKKKYDEFVKTYITGEIKKEIDEDAEIVQENSESDKKVNTKISDEYLMYMILYRERFNQLLNYKIPNSRKFIKQIIKPVKDYKKRRDDLKEMLLKYRLWKQQKFQCFYTGRHIPLTDLFTEKYQIEHTIPRSISFDSELRNLTICNAEYNNYIKDNGFPTDCLNHNPHQKNSKTVFKLDGKEVDCGYIIDRVNRFLKPKVDELEARIKNLKYAAKSIPDWETERKNANIRLRHYLEFEYGYWKKKYDTFTIERKDWKDKMKNSQLVDTQLVSKYARAYMKSLFNRVDVQKGEVTAQYRKIFGLPKKSRENHAHHAIDAMVLTLIPGSAHREAILKTWYELQECEKSVKSRHEKQARIDILKKQLEEELNSYNLPYIREKNKQIKSNVIINHVSKDRTLIHTKKKARKRGKIDFIRDKKTKAIQYEIHAQGNFIYQTNKKGEQILQKDKNGNLVTIRKKKTKYIQGDSVRGELHQQTFYGAILKRPILNEKGRPVKELKDVERKNKKTGQIEKLKLEVYKFIELKEPAYTLKTEISKLTDTSKIVDPVLIDTILNQIENENKKLGKDDFYYLGNKLRHIKIFANASEPIKVRKHIFISEKNTERKEHKHWVYATNRGNYCLCIYRGKINEGTKKEKIETIVDLHTIRELGKQIKASELKNIKIDLLVEQNKIVKNELITIYHILKTGDKILFYQGEKKEAKEAYNKGKNLLQKMLYRVTDLETKPKNIKLKQCIESRENKNIKDKEGKEIKGTSNFDFSNPPALWRGVFDTLEKNAMFERLDFEIKPDGEIEWNF

SEQ ID NO: 8792 - protein, 1439 aa, unidentified
  REGION 1..1439: note = Description of Unknown: Cas Enzyme sequence
MEKILALDLGTNSIGWAIRNTAKINENQIEKFGVLTFKKGVGIDKTGEYSYAAQRTTKRSTRRLYQARKYRLWKTLEVLIKLGYCPLSEENLDKWRKYNKQEALKNKNAGRVYPVNDILFESWIKLDFNNDGKPDYTSPYQLRKELCEDKIDFENIENKHKLGRALYHIAQRRGFKSSRKGADDIKEKESNDILEVELQYSEQKKKEELKKQFPDYDETKPICYLLADQENKGNRVRLDITQFLVREDYKNEIKAIFKKQNISFESELYKDIIESGNNKNDGAIFYKRPLRSQKGLIGKCTLEQNKYRAPISHPSFEYFRAWSFLNNVKYKTNEEWYSLPLELKQNIYDKLFFRKSKAHFHFSEIIDFANKEIKADKYNYNFKTTVSGCPVSARLKEIFGEDFTNLKIKKEKTDKSNNDSYTIEDIWHILFSFEDQEYVEEFAKNKLKLNDIKIKEFVKAWNVTPVGYAMLSLNAINKINPFLAKGLIYTEAVLLANIPTIIGKELWEKNEKFLLDEISNIIENNRFQKRIVSIVNDLISKHKNLEPHEKFGGNDYSLVNSDFKDIETACNESFGEKTWEKLESEKKQLISNIVKDCYQGYFKVIGFERKDFNDERFRIVETNSIKFYKADSDFYRMPKLKDTLAEFLTNNFNITEKQIQKIYHPSEINIYPPAKEDKKDGIIKLGTPKTGSFKNPMAMRTLHELRKLMNNFIVTNEIVPETRIVVEVARELNDSNKRWAIETWQKRREEENKEFALVINELLNQNNNLKIKDNNEDIDKVRLWYEQNEKDLEVIPPLVESKKEIKGLDWRSAKKDSYKEIIAQKSQVEKYRLWLEQECMCIYTGKIIKLTDLFDENITDFEHTIPRSKSFDNSLANLTVCFSDYNRNIKKNQIPYNLDNYSTTATIKGKQYTAILPRLEKWIEKIKRIEQQIEFWKGKSKRANTKEAKDDAIRQRHLWQMDYEYWKNKVERFTMKEITSGFKNSQKVDTQLISKYAFHYLKTYFNKVDVQKGSITAEFRKIYGLQIADEKKDRSKHSHHAKDAAVLSLIPIAAKRDEILQKYYEHKERFENYTDSPYKGFRREHITEIDNTILINNIAKNQTLTPANKKVRRRGKEVIIEGTNKTKLATGDCIRGQLHDETFFGAIKLGIKDETGKLLKDENGKFIQDEKVNYVLRVPLKFKKNENDSGFKTIDEIKKVIVDKDLFHQIEKQATENGGLREALEKGIYMFNKKGEKVNKIRRIRIYKDVTEPLQIKKHTYLSTHKHKQHYYASNSSNILYGLYKGFVKGKEKVSYEIINLFDVAKLKSFSSNKNEFFPDKGEDIKLYAILEVGQKVIFYKNNIQEIPELSKRILSDRLYKVEGFEKDGRIRFKHHMDALSDKELKELEKKYGKGIHQGFSLLNDEFPWPKLKLSMGNLKMAIENLDFRVNINGEIEWI

SEQ ID NO: 8793 - protein, 1106 aa, unidentified
  REGION 1..1106: note = Description of Unknown: Cas Enzyme sequence
MKKILGLDLGTNSIGWALVNEAENGEEKSSINRIGVRIIGYDNFVSRETGKEIMGDPADYFRAGKGVSPNAARTKSRTMRRNLQRYKLRRENLIEILKANNFISDETILSENGNGTTFETYRLRAKAAMEEISLEQFARVLLMINKKRGYKSSRKAKGKDDGQLIDGMEIAKTLYDNNLTPGQYCLQLLKSGKKYLPDFYRSDLQAEFDKIWTCQKGFYPEILTDNLKEEFRGKNEKATWAVCEKPFGIVGIKRETKGENLRKENFAWRVEALVEKMELEELAVVLQKVNGQINGSSGYLGAISDRSKELYFNHQTVGQYQVTILDKNPNASLRNMVFYRQDYLDEFNIIWDTQTEFHKELTYELKQEIRDIVIFYQRRLKSQKGLISFCEFESRQIEVVVNNKKKTITIGNRVIPRSSPLFNEFRMWQMLNNLEVSGKGWKNKKKQQNSTQGLSTEQVDPHEFFCKRELNQEEKELLAKELSIREKLSKSEILKLLFDNPKELDLNFPSVEGNRTCTVFYKAFGDIIDRTGHKIDFKKSASEIINTVKEIFTSYSWNTDILQFNSNAKDLDNEPMYKLWHLLYSFEGDNSNTGNENLINKLTDLYGFGKEYAAILANVTFQDDYGNLSAKAIRKILPYLKEGHKYDIACKYAGYRHSKNSLTSEELCKKVYKDHLDVLPKNSLRNPVVEKILNQMINVINTIIDVYGKKDEKGKVIEKPFDEIRVELARELKKNAKKREELSIAIGKTTAENEEYRKILAQSPFNLTYISRNDIIRYKLYKELEQNGFHTLYSNTYISPIALFSGDFDIEHIIPQTQLFDDSFSNKTLELRSINLEKGNKTAFDFVIGKYGETGNENSLDNYLNRVESLHKQGIISKTKFKHLTWKESEIPEDFLNRDLANTQYISKYALAMLNTLVPRIVATTGSITESLREDWQLVDIMKELNWEKYKKLGLTEEVTKTDYNGNKVRIQRIKDWTKRNDHRHHAMDALTVAFTKDAYIQLFNNLHAAMIPNSATYALKQLYIENGRVKPPIPLNEFRAEAKRQLENTLISIKAKTKIVSQNINKTKKKNGINIKVQLTPRGQLHLETVYGSQLQYVIKEEKIG

SEQ ID NO: 8794 - protein, 1059 aa, unidentified
  REGION 1..1059: note = Description of Unknown: Cas Enzyme sequence
MKRFSFDIGTNSIGWAVMEPNEDDSKVKILDIGVRIFSDGREPGRAGQPGEPLNQTRRQKRAMRRILERRKRRKQAMYRFLSINGYVPLEAAAHAEWVKMDPYRLRAEALQRPLNSLEMGRILMQLSTRRGFKSNRKTDAKKEVSEFKEKINALGQILGEKTLGQYLWEKKQTIDAKFKDSHIEYPKTIKERLRFRPGTQHYPNRLMYEYEFKKIADFQKTYHPDLDFNKAYRIIFFQRPLRRPDRGSCTFFPDECRAYLSQPSAQLFKALQDINNLRYMTQKDHELTIDQKRIIFAALSTRGKLEFNKIRTLLDLPSDAIFNLEKGTKDRIEGFSTDIEFSKFIHNWPEFSLEERDSLVEIFIIEDNDDIIIEKFKQAGVSEEGIKNALKKIDLKVGVGSLSAKFMRECSSIMVNQWIRYDQATEAMGFKHSDPSAVQFQENLPYYGSVLSYTTVAPKRKSATEDITNLSDEEIYGKISNPTVHIALNQLRKLCNALIDRFGKPDEISVEIASELKLGKQRITRLIQEQRKNRNENERISNEISSIMGNEQNLKIAGMDIQKYRLWEELSENAAVRLCIYCGKPISAHQLFNGDAEIEHILPFSRTLKNARNNLTVAHKWCNALKANRTPFEAFGNNPQNYCWQEIEERVNDVYKHNFAKRAAFLNKDLETSLAQDSQFLESQITDTAFIAKAARDYLACIIPRNKIVVTPGRLTALLRAKWGLNSMLSASGNEKNRSDHRHHAIDAIVIGLSTRKTLQRFATANALGNAEKILPPPFPIDRNWIERRLKSMLVSYKPDHSTGGQLFDETAYGFNIKSLENGVIKEFFVRKTLASLTWNIIDNKDITNAMVQNEIDQYLNDRNLNSKNSDNRKLSQTLSEFSQQSGIQSVRIRAKNAEGYKLLFAGANGRQGHKAYQKSDIFCVDIWRLPKKVKGGYEFRGTFTSRADAQAQKGLILKNRPHSAAKWLMRLHKNDIIAMQFDDRNVFARIAGFSSTNNRLDIRPIYASQDISQWITSTNRGFLDPFWKPINATQNHVSIDSLFHTSLCKYIRHVNRGS

SEQ ID NO: 8795 - protein, 1070 aa, unidentified
  REGION 1..1070: note = Description of Unknown: Cas Enzyme sequence
MKKILGLDLGTNSIGWALIEQDFEKKEGKISGMGSRIIPMTQDVLDTFSGGKPLETQTAARTSYRGIRRIRERHLLRRDRLHRVLNVLGFLPEHYANQIDFEKHFGQFVNGSEPKLTYNNRNFILTDTFDEMLSDFKQLQPQLFYTKPNGKETKIPYDWTIYYLRKKALSQKIAKEELAWIILNFNQKRGYYQLRGEEEDRIDTNEYCALLKIVSIEKGVKDKKNEKKTWYKVTFDNGWEYSATFTVEPNWLNTEKEFLITEELDEDGNIKIVKDKRLDTTGKEKRRITPLPSFDEINLMSKKDQDKIYKKIKARTEITIKNSNKTVGTYIYENLLQNPTQKISGKLVRTIERKFYKEELIAILKKQIELQPELFTDNLYNDCVCELYRNNEAQQLVLSKRDFVHLFVEDIIFYQRPLRSQKSLIGNCSFEYRFYKDKDGKNIKQYLKTISKSHPLYQEFRVWQWLSNLKIYRKEDDADVTTEFIKNTEEVVNLFELLMTQKEIGHIDILKRLIIPVLKEKFPNAKPAAFNKEVDKEIAKYRWNYVFDDSKEKEEDKSKKYPCNTTGYEIRRRLAKLENVPANFLTFEIEQHLWHIIYSVTDKKEYEAALKSFANKYKLDGNSFFQEFKKFPPFPSEYGAYSEKAIKKLLPLMRLGKYWSWDNIDTKTQSRIEKIINGEYNENIKNRVREKAINLTEKNHFQGLPIWLSSYIIYDRHSEADIAGKWDSVNDLEKYLEDFKQHSLHNPIVEQVVTETLRVVRDIWKQYGQGAKDFFSEIHIELGREMKNTADDRKYLTEQVTNNEATNLRIKALLAELKENSDGKLPIENVRPYSPTQQDALRIYEDGVLNSTTELPEDIAKISKSSQPSKSELQRYKLWLEQKYRSPYTGQMIPLGRLFTEDYQIEHIIPKSRYFDDSFNNKVICESAVNQLKNKQLAWEFIKNNHGEKVECGMGKLVEILSEEAYQAFVKEHYAKNKTKRQNLLLDEIPEKMIARQMNDTRYISKFISSLLSNIVRANKDDDGVNSKNLIPGNGKITTVLKQDWGLNNVWNELVLPRFIRMNELSKTNN

SEQ ID NO: 8796 - protein, 1853 aa, unidentified
  REGION 1..1853: note = Description of Unknown: Cas Enzyme sequence
MKKILGLDIGTTSIGWAIVEASETKKINERTNEVPETDINNDRIGIHKDAVGVRIISQDATNLQSFNKGEKLVKGSTLTPTANRRVKRGSRRLKSRYKLRRGKLENVLSFLGITKDEKYYTNERKNDVLGKRIKRGQNNDIGKAIYELRDRAIREKISLPELGRILLHLNQWRGYSSDRFAIKEKKFDYNVCEITNIDWDYRKAIYDKNDKEKKEPKYYEVTINLKFEDSIKVNYEIENNGTKEEITTSINEVSNGIIYLKKELKVGTHITVKVPKYTEVKDKKGNITNRYVKIEKTEPDPEDTDYQRIIFNKTLSDFCNTGGTVGSYFYKKHYIERVENSRIRNNIVDRDWYEQEFDKIWKFQFENHKDFFEKINIDEVVKIAFKDYQAILNEIKKNNDIQEQLKCLIKDKIIFYQRPWQQAKNKGQCKFEFVPDVQPKKDETGKIVYDAKGKIIFEANKKGKRVLDKNGNEIFLKGRTVIPKSHPLYQEFRIWQKINDCRIFLNTPDETINLFATPKIFEEIFNKNIETVKNDFFYKLQNAKSASWLSFAKDELGVRDFIIDEVKDLKKGYYQFTNKETGEIQNAFFTVNFRKRKKDGSYDDIKLKGNCTKKTIKDVLVNFLKKEKYLITELDKQGKEVIKEDKADDWFNKIHTVSKSQNITNLQLLWEIIYDISETKTEKIAATICKDKDGKKNFPELAEYADSLSKIRFDDTGMGDISAKAIRNILPLMSNGNNITPKAEKRIQSLLALNNIEKEKTKDEDEKLSGLKNFISDKKSRIKLSKLNSENDFKYLSYTEAAAVVYGSHSTKNTQTQSEIVKVKQHSLNNPIVEKIVNETISIVNEIYNRYAEKDSDGNILIDENGKPKMGFDEVRIELCRELKSSMDERQQMDEAMRNNAKRNELAKRMLRELFNADISINNIDKLKIYEDEAKQMTKERFEELKNKGEIKKETDFEKFEDIAKKLNLKEPSKADITRYQLWLDQMCQCPYTGEIIRLSDVFTSKYEIEHIIPKERYLDNSYSNKVITRKIINKWKDNRLAYEFIIQEGGKTKKDNSDNKELKILELDKKTNEGSYKELITRLFSKGRKLQNLLRKEPPEDPINRELKDTQYINKKLKEKLAELVGESKVWTTTGSITDILRESWHLNDVMKELLRDRYKDFKITLGSGKEPTYGQFCYEDTKTNKKTEKEEPIEIFPGYSKRLDHRHHALDAFIIACTKQWHIQYINTMNAANSADISIEEDKKNKAVWLKHQVCKKNDQGDYKSSDFIYPWEEYNKSQIGNLLKEVVVVHKNTNTLISQSKHRIKKNGEILTVKRKDGSIDRPISIRGQMHNETIIGKRKFYNPEKKTIEKIIEEIFSKRQSARNNLKPVQSFDELIEQIVFKEKFQKKLKEIFKINLTNDEYELQQKIKQFVRENKKDLFDWATTINFLPVKTGTDKQGGIDKIDVNNVTDLRIRRYLKYRKDLITSIEEKKELLRKEKSPDEEIKKWEAIEKDVKNFTTYPIYYNAIYDVRIPSIDRINPWVPLEKLTADLILKIEYIEKRNSSKNRTDAIKQIATNYLNSKQTDSILNKIEYLIYNPLFKSLKTIKIPIKKASIFNKTKEETLYPIRPGAFVELANNFMVYMFEKSDNNSKERAWNLLTIIDALHQKLGSTEKINNENLFPNELIPQGFHQIFTLSKKEIVFIPFVKGKIEKEYSKEELSKLFDWTVSDINTASLISEKKKIVVSNLWQVSQFSKTSTGSSINFRRINTAKEISIPIIEIKTDKGNLTEDAIKKIEKTKLIFSTSADSKKKKENSTIDEDIIPYDQILFQNCVKVFTDKLGKKIVPYWEFKNGCWDRERAKELGIIV

SEQ ID NO: 8797 - protein, 1459 aa, unidentified
  REGION 1..1459: note = Description of Unknown: Cas Enzyme sequence
MKTILGLDLGTNSIGWALIDKDNNKILGMGSRIIPMGQDILGEFGKGNSVSQTAERTGYRSIRRLRERQLLRRERLHRVLNILGCLPQHYAAKIDFEKRLGKFKEDFEPKLAYEEIFDETTSKNNFKFIFKKSFEEMLHDFREKHPQLLENNYKVPYDWTIYYLRKKAITKKIEKEELAWIIFNFNQKRGYYQLRGEEEEETPNKLIELHTLKVIDVQADEPQKGKKDIWYSIVLENGWIYRRSSKTPLFDWKDKVKDFIVTTDLNDDRTIKTDKEGKEKRSFRAPSEDDWTLLKKKTEYEIDKSKKTIGEFVYENLLQNPAIKIKGKLIRTIERKYYKEELKQILQKQSEFHAELKNDNLYNDCIRELYRNNEAHKFLLSKRDFIHLFIEDIIFYQRPLKSQKSSITNCSFEYKKYIVNGAEQTQYLKVIPKSHPLYQEFRLWQWIYNLSIYKKDDDKNVTSEFLNTTEDYEKLFEFLNGRKEIEQKPLIRYFIEQRGQKGKALNAESEKYRWNFVADKKYPCNETRTLITSRLAKVKNLPENFLTNDIEQHLWHIIYSVTDKIEYEKALNSFANRHRIDKDSFVSNFLKFPPFKSEYGSYSTKAIKKLLPLMRLGKYWNWDSIDVNTKNRISKIITGEYDADIKNKVREKAIDLTSEEHFQGLQLWLASYIVYGRHSEASKAYKWDSVLDLENHLKEFKQHSLRNPIVEQVVTETLRVVKDIWLFYGQGSKNFFDEIHVELGREMKNTAEDRKKISEQVVENENTNLRIKALLSELKNDPDIENVRPYSPMQQEILKIFEDGVLSSDIEIPDDILKISKTAQPSSSELQRYKLWIEQKYRSPYTGEMIPLGKLFTTDYEIEHIIPQSRYFDDSFNNKVICEASVNKLKDNQIGLEFIKNNHGATVETGMGRSVRIFEVNDYEDFVKKHYTKNRSKLNKLLMEDIPEKMIERQLNDTRYISKFISSILSNIVRSETNDDGINSKNLIPGNGKITASLKQDWGLNDIWNDLILPRFERLNKLTNCTAFTEYNTKYQKYLPSVPIELSKNFQKKRIDHRHHALDALVIACATRDHINLLNNKYAKSNTRFDLNRKLRNFEKVVYNHPRSGERIEREIPKEFLKPWDSFTLDAKNYLDKIVVSFKQNLRVINKATNVYQKWVETDDCIIKKEVKQSGTNWAIRKPMHKETVSGKVELPRIKVPKGKILTASRKNLDTSFDLKAIESITDTGIQKILINYLAAKENNPEIAFSPEGIEDLNNNIILYNDGKFHQPVYKVRIFEIGSKFPLSENSNKKAKYVEAAKGTNLFFAIYQDENGKRSYETIPLNIVIERQKQGLSSVPETDEKGNRLLFHLSPNDLVYMQTEEELINQSPIDFSNLSIEQRNRLYNVNDFSSTCYFTPNTVAKAIAPKEIDLNYDIKKNKISGSFDIKTASLNGMQIKEHCIKLFIDRLGNISISKK

SEQ ID NO: 8798 - protein, 1029 aa, unidentified
  REGION 1..1029: note = Description of Unknown: Cas Enzyme sequence
MGKILGLDLGTNSIGWSLIDSEHYSIIDMGVRIFEEGVNNMNTSKEESKNAKRRTARQIRKLNRRRKFRKLLLFKKLVELNMAPAKNIEPFIEINPYKARRDAVNKQITLMELGRALFHICQRRGYKSNRKESIDDKEKGKIFEGDAKAEKAGISELKIEMLNGNYKTIGEYLFSLNPHEKRIRNRYTERKMYFDEFNAIWDFQQKYYPDLLTEENRVIIRDRIIFYQKPLKSQKQTIGKCIFEKNKRRCPKSHPVFQEFRMLQQVNSIRISGVKRITEEQTMLSMEERDVLIKYLSENKELSYKIDKKSIFKVLKLDLNKFYRFNLKDQGKIDGLKTIHALKSALGKDYSNFDENEILKMWNTLHFAEDDEWLRDYAQKTWNFTQEQAQKFAKIKLEPDYANLSLKAITKMLPFMRDGLMYHLAAQSAGYHHSLAEDVIEKTEYLPEPPGIANPIVTVALHQLRKVVNSLIDYYGSPDAIRVELARDMKNSRNDRLEMLRSNKERETINKKISDKLINDNIIESPKRNDIIKYRLWEECNHICPYTGKSISLHQLFVTGEVDVEHILPYSRTLDDSYNNKTLCFRSENELKGNRTPYEAYSSDESKYNGILDRVKEFSHSKARRFKLKNLDALDDFIERQLNDTRYISREAKKYLAHICDKVNVSSGQSTAILRHYWGLNSILKESQNPYLKDKEDDAKSRDDHRHHAIDATVIALTTQSFIQMLSTHHRKYGTLEDKNIEKFPFPWENFRSDVLNKIDNILISHKANKRVRGQLHEETIYGKLLNQDGTQRMNEGGIPVYAIRKPLESLTGKQVKGIIDPVVKNLVFERLRSLGVNTDEEKFDVPRNSFNEPLYMVNKTGLKIRIKSVRVAMPSAAMKNIRGYNAWVETGGNHHIVLFSDESGKIDGRVVSLFDAVLRKRDGLPVIDRELEPGLEFICSLHRNEMVIAGDLPEDFDYLDKSTYHLVFKQVFRVQKMVFDKRLMFRLHFVTYNRDLDNRGVLRRGPATIGKFSKLLINPIGYLEFCND

SEQ ID NO: 8799 - protein, 1042 aa, unidentified
  REGION 1..1042: note = Description of Unknown: Cas Enzyme sequence
METVLGLDLGTNSVGWALVRHRDDAEVPEISAGVYVFPEGAKTEADGTRVSERLKRGQKRRQRRNLRRKRDRMRTVLRMLVTHGLLPADPAERAELMSSDRAGAARPYHPFVLRKKGLDEPLTPHEFGRCIYHIAKRRGYLSTRDLIQRTFERRLQLEAEGAPHFAEEPSDEEQETKKDEEAKERSKLLARLSEVRTMIESGQARTIGELCADRLLHPEHGPQGVRAGGKRRKGRQEKKDPGWRADRMLYEDEFELLWDVQARYLPQLLTRPLRDALRHAIFYQRPLMSKRGLIGGCEFLPNRRRLPRASLLAQECSVLQDILNLKVISVPGLPERRLRPEEVQALAAELDAKDSLTWDEAREVLGIGSDARFSAEPATAGARARRGKSARSKPALVGNRTMAAMRRALGEDRWKSFSKEQQREITDRLIFAFYPHNVIGGLVRDFGLTTDEVREVANVHLPEGYTNHCHKVWAALKTHLLKGRVYSEACEDAGFRKPGESTVKQPEVILDRLGGLPDLRSPVVQRSAKMAFRVINAVIDHHGKPDRIRIEMPRDVSRTNKQREEMWKRQDENYRERQRAEKCLLDNNQPLGRNKENVTKVVLWEEAGRRCPYEPDVEVSLPQLVHEYTIEHIVPRSRCWDDSWINKTICPMGENLKKGNRTPYEWLKGTHQWDAVERYVSHLRTMAFPKRQRLLRKEWKNEEFTNRALSDTRYISRVILTEVAKLGVRVEVFPGALTAELRRLWELTGCVPEAPEEREKLEEWLGKPVKKQPKPRYDHRHHGLDALVTALTDPSTLQRLSAWYQAREKGTRREEAPSAKPWPSIREDVSRLVAAMPVVHAPNRGVSGGLNEDTAQPPPDPSLVRAALDALPPRRKGRPHEAAVVGSQLVRVAPDGTPLAAYDLGNNHHAVIWEKDEPEPDGSRRRDMTVVSMLEAARRATLGKPVFDRTPPADGWHFVMGLCKDDVVAWTGERAGLVRVANFTRGTNEIEIRLRPRTDAKASQQTHIRVRTAKALCQIAARVCLDPLGEAVAWEPPDADRR

SEQ ID NO: 8800 - protein, 979 aa, unidentified
  REGION 1..979: note = Description of Unknown: Cas Enzyme sequence
MAVKTTGPLTIGLDIGIASVGWAVLAPSRIVALGVRAFDKAETAKEGDSLNLIRRTARLTRRRLHRRAWRLTKLARLLKRQGIIDDAQLFQPKHPFSHSLWRLRVEGLDRQLNNEEWARVIYHLCKHRGFHWISRAEEKKAEADTKSEGGKVKQGLAATKRLMQEKGYRSAAEMVLMEFPEAQRNKQGDYGKSLSRVSLGEELADLFRRQRELGNAHADAELEAEILGTGDRKSGLFWAQKPALAGKDLLKMLGHCTFENAEYRAPKASYTAERHVWLTILNNLRIAVDGTTRPLTEQERRIALPLPYGQAGDLTYKQLRAALVKAGIAVEGFRFARFSYAQQPDGKTKDPETAVLVKLPAWQELRLTLKKAGLETEWRGMAGAAVDGRPELLDQIAWVLSVFKEDEETASELQKLSLPGAQKMIDALLDLRFDKFHSLSLKALRKIVPHMEEGLRYDEACERAGYHHSQLHKAGEGNHKYLPPFYSGRDKTGRMVFSEDMDIPRNPVVLRSLNQARKVMNALVDQYGAPHAVHIEMARDLSNPLDERRKIEKDQAEYRDQNEKDKARFAEHFSRMPEKNEFEKWRLYREQQCKCAYSIEPIDLGRLLEPGYVEIDHALPYSRSFDNSKNNKVLVHAAENRNKGNQTPYEYLRGAEDSPRWRMFVAFVESNKAYRLAKRSRLLRKNFGENEAKEFRERNLNDTRYICKFFKNYVERYLQLAEDSEARRCVVLSGQMTSFLRARWGLIKVREDSDRHHALDAAVVAACSHGMVKRLSDYARRKELIQVREGFVDVETGEIVNPAMYQQLRQHFPDPWPNFRHELEARLKIDDPAIMRTTIEQLGSYPPEALNALRPLFVSRAPQRRNGGAAHKDTVYGQPERLKTQGGVTQKVPLASLTLKDIENLVDPHRNEKLYAAIRSRLEAHGGKGDKAFPAGDPLRKPDRNGNPTGPVVRTVTLVIDKLSGVPVRGGIAKNDSML

SEQ ID NO: 8801 - protein, 910 aa, unidentified
  REGION 1..910: note = Description of Unknown: Cas Enzyme sequence
ENRNEKVILNIVNCLISKFKAEGLRRDERYILTDKDIEAINVEIINTYGEKTWGKIDKYNQEKILNTVKFLYQAFFSSGFNVRYIKERKYLEVNFQNKTFLKDAMTHYFKLPHLLDTLKEFLITNFTIDESKLDKLYHPSQINIYPHAKRDPHDNKFYLQSPKTGYFKNPMAMRTLHELRRLINYLIKSDKIDEETKVVVEVARELNDANKRWAIEKWNKRKQEENEIFKSLIIELLNDNGNSQNINTQAVNEKDIEKIKLWVDQLDSPIVPIKLPKKITDKSELDKDWNNIRIEFLLKIINEKNLVDKYRLWKEQDCRCIYTGKAIKITDLFNENIIDFEHTIPRSKSFDNSLANMTVCFADYNRNIKMNQIPYNLPNYSCNAKIGEKFYTAIEPRLKKWELRCEEIKRYIEFWKKKSRMALTKEMKDNAIRQKHLWQFEFDYWNDKLERFKINEIKSEFKHSQLVDTQIISKYAFHYLKTAFDQVEVQKGSITSEFRKIYGIQPKNEQKIRDNNTHHAIDAAVLTLIPNSAKREEILKKAFEFAEKTKLEGKSKQYHVKPYTSYEPEQIMKIMDKLLVNTVSKDRTFAPATKKIRKRGKIIKFKDLNGNDKTLIVTGDSIRGQLHLDSFYGKIRIVKRDENGKPLRDEKGNWMFKEKKDEFKFVKRIPVTELKSLEDIVDPYLKKMIEKQLNGRNLKQAFNEGIYFLDKTGTPVGSKIRHIRCFVKIVDPIGIKLQTNLSQYEYKQHYWAANATNYVYILYKSISGNNIKYHHEVINLFDASQIFHKLGKFQFQEKVIIKNEIYTLDMVLKVNNKVFLYKDSPSELEELSLEDLQKRLFTIIKFEKDGRVNLKHHLSAKKIEDIDEFSDVDFNDLKQRYRLSRTKLKFIVEPKEFEIKPDGTIVFKIK

SEQ ID NO: 8802 - protein, 1059 aa, unidentified
  REGION 1..1059: note = Description of Unknown: Cas Enzyme sequence
METVHQKYTLGLDIGIASVGAALLAHDHIISLFVRTFDKAETAKEGESLNKIRREARLTRRRLHRRAQRLLKMRRLFKRFGLISKQNELFDHTVPLSPWQLRAEALDRQLPPLEWATALYHIVKHRGFQSNRKSELTSDNDKKIGEMLGGVAANHNLLQQYRTVGEMVWKDERFQDAKRNKGGDYSHTFARADLATEMMVLFERQRQHGNRFALPDFEEAVFELLMERKPMQNILHLVGKCTFETKELRTPKASFSAEKFVWLTKLNNLKISGIGTTRFLNQEERELLLQVPYSQAKLTYKQTRKLLDLGEAEKFVGLDYRGDKDPEGTTTLFEAKVFHELRRTYEKAGLDLVWQRDSRDVSRLNNLGYALTVFKEDNETREWLLKQGVEAEIIEAVLGLSFTNFIRLSLKALGKILPYMEAGLRYDQAVLAAGYAHHSQIQTAGKTRTIPEISREDIANPVVFRSLNQARKLVNAIVQKYGAPQAVNIELARDLNKPLKERQQIKKEQEKYRDNKEKDVEQFVQTFGVTPKKDELLKWRLYREQNAQCAYSQTAFDLNELFKAGYAEIDHALPYSRSFDDGMNNKVLVHTKENRDKGNRTPYEYLGGPEDSMEWQRFVAWVMGNKSYRLAKRQRLLRKDFGGAESEKFRERNLTDTRYACKKFKQLVETHLQLADDSESKRCVVVSGQLTAYLRARWGLVKVRADGDTHHALDAAVVAGCTHGMVKRLADYARRNELAMIRGDFIDPETGEILDSESLARAEHHFPQPWEGFRAELEARLSPNPAAWLPTLVNVPPIRVSRAPTRRGMGAAHQETIRSARRLDEGISSVKTPLTTLKLKDLPNIAGCGDPRNRALMDAIEGRLRQHGDNGEKAFKEPLRKPSAPGKEDAAPIVRTVRLNVTQKSGLSLHGRGGGIANNGDMLRVDIFTKGGKYFAVPLYVADAVKKDLPNLAVVANKSESEWTVLDESYPFLFSLYSNDWVKVSFKNEPPKEGYFAGLDRSTGAISIWTHDRNKSVCKDGLLRSIGIKTALSLEKCHVDILGGLHRVRSEIRQPLWRT

SEQ ID NO: 8803 - protein, 1029 aa, unidentified
  REGION 1..1029: note = Description of Unknown: Cas Enzyme sequence
MAESKKLRLGLDIGTNSIGWALVRLSTEGNPIGIENMGVRIFSDGRNPKDKTSLAVARRAARQMRRQRFRKKQRQKRILNALIRMGLFPSLKGQQESLKNKNVLEIRSNAVKGRQLEAFELGRAILHLSKSRGFKSGRKDTSDKSDTKLTAAITALNEKLIQHSVLSYGDFLFQRMQSGLSTAATILAGFYPSRAMIEHEFDLMIEKQKGFYTNISNENWAQLRNHIFHQRPLRPVEVGKCSLYLEQTRTFQFMPSFELYRLLCELHNLRWFDSNFKEQFLSVAQINTCVEKLGLKKEIKYSEIRKAANLDIEMKFSIETAASREKIKGCPSAYFFGEVKKGVINGQWQKLTLKQRDRIAESYFLASDEEFVAQINSLDFLDESLKQKLIMTEVPNYSDATCAFSIQALQEIVGHALTDGESPLLVVDKLRKEETMEKQVGLLDYYGKAIPGSVVPIPSHILKYNQALNVNERMYGKIANPTVHIGLNQLRILVNQIIKTYGKPENIHIEFARDLKLSRDKKIEISKKQKANRAINDKVKEFISERRQEDTPFNRERVKLWFEMENRLECCCIYSGRKISQAMVLSEAVEVDHILPFSRSLDDGINNKVLVLAEENRKKGNKTPFEAFGNSQDWPDILIRAKGLPEGKKWRFSENSMNSFLKQNDFLARQLTDTSYLSKIAKKYLGTVLPPNNIVASPGRLTALIRGKLGMNKLLSHDGTKNREDHRHHAIDALVISLVDRKLLKQMARASEELRQRIIVEEPWAAFHSEAKAKVDQIIVAHRVDHGINNAFLAQTAFGLRRQTSDHQKANNYSLVTTKFLDAIKDPTAIVSEELRSEATKNGVNHLSQIGVKKLRVFEKCNEEFEQIGGPKSYIAKITHGKNCEHHACYVKEGIESLTIWRVPLPKGQLTKKGEDFKYEFVFNYYFDAMRAYASKAKNSSKPHPAAKLIMTLHNGDSVAIEADGAIGYYQLITIGKASSRAGFVPLNETQGQQSPNFFYKSINGFRALKIRKIHINSIGKILDGGPVL

SEQ ID NO: 8804 - protein, 1018 aa, unidentified
  REGION 1..1018: note = Description of Unknown: Cas Enzyme sequence
MMGGLTLGLDLGTNSIGWALIDFDNNQQPQQLLACGSRIFQEAVEAKTGTPKNHARRAARAARKLVARRKQRRTKLLNLLVRHGLLPQDETKRHALLLDNQANNPYQLRKLGLDEKLEPFSFGRALYHLAHRRGFLSNRKAASEEDGKVKTAISALRSEMQGRTLGAFLADQPTQRRRYTDRAMYAEEFEQLWEKQATFEPEQLTRALKVEIKNSIFFQRPLKSQKHLVGKCTFEPTRKRATKAILLAQRFRILLDVNHLAVKNPITREFRPLTQDERDKLADALDQQKSMTWGAVRKVIGWNKKDSMHEGETFNLEEGKKDKLIGNRTACDLRGALGDRWNALTTQQQDDLVTDMLTIDNPDGFLKRMKTHWSFDADTAEALATIELEPGYARLSAKAMRAILPYLEQGMIYSEACKAAGYDHSNPNQRAITDKLGLPSNVRNPVVQKALFETRKVVNAIVRKYGKPAVIRVEMARDMKLSKRQKEELQKEQNKQKKANDLATEILRKEFGIQQPARADIQKYNLWLECKEVCPYTGTVISREMLFSPEVDVEHILPYSRSLDDSYMNKTLCIATFNRQVKLNNTPYEIGQGDPLAYAEIFQRIKTLPFPKRRRFEQKEVETDKFIERQLNDTRYICVEVRDFLQQLGVPVEVSKGEATAKLRGRWKLNTLLSPDGSNEKNRADHRHHAIDAVVIALTNRSLFQKLSRLSAQSISLDKSRFDVPLPWDAFYDDVYEKIDKVIVSYAPARKISGALHEDTAHGYSEAEKCFVYRKTLNKDFTFSQVAKIRDAEIKKLVIAKLKTIEPAIEKVWDKSPPQNDEDKQRIKKDKEALKKREKEIIKQAFGNPISPLLHKDGITPIRAVRIKDNSTKEGALAIKNKDEKEYKYHPIGNNHHVEIFEYPESGKREVRFVDVVVASRRARIDKTNIVQKGNGDTSFMFSLCANDLVEIDGINTAPYRVQKFSSGKDFEITLKKLNDALSDLNENTVRIRNEKDLTRIRRKLSVDPLGNLAQCND

SEQ ID NO: 8805 - protein, 1131 aa, unidentified
  REGION 1..1131: note = Description of Unknown: Cas Enzyme sequence
MASKQNNLGPLTFGLDIGIASVGWCVLNETHIVDLGVRCFDKAETAKEGESLNLARRTARLLRRRLRRRAWQLTKLARLLKREGLIADVNILKQPPQKGFPTPNLWKLRVDALDRKLEAEEWARVIYHLCKHRGFHWVSRAEAKAEDDGKSESGRVKKGLAGTKKLMAEKNYRTAAEMVLAEFPDAQRNKQGDYSKALSRALLNDEFTELFKRQRELGNPHTGAEFQALILGNGDKNSGLFWAQNPALAGNDLLKMLGHCTFEKNEYRAPKASFTAERHVWLTRLNNLRIVVDGTTRALTEAERRVALPMPYQQAGDLTYKQLRTALTKAGHLPDSFKFTGMSYPSELKPDDKKKDPETAVLVKIPAWQELRKTLEKKGLGDEWQKLSSAALEGNPKTLDDIAWVLSVYKDDAEVETELGKLGLPNAAKMIDALLDIRFDKFSNLSLKALNQIVPFMEQGQRYDEAVANIPEYGHHSQLHPIGAGEHKYLPPLYSGRDKDGRMVFNDDMDIPRNPVVLRALNQARKVVNALIKQYGSPHEVHIEMARDLSRPLDERREIEKLQKEFRDNNEKLKAEFASTFNVVGAVKGKEFEKYQLYREQQGKCAYSIEAIDLHRLFETGYVEIDHALPYSRSFDDSKNNRVLVFAKENRDKGNRTPFEYLGGKNNSERWRQFVAFVESNKSYRLAKRSRLLRKDFGEKESKEFRERNLNDTRYICKFFKNYVEQYLQLHSDSEAKRCVVLSGQMTAFLRARWGLVKVRGDSDRHHALDAAVVAACGHGMVKRLSDYSRRKELELVREGFVDTDTGEIINPAMFEQIEKHFPNPWPHFRNELEARLKLDDPALLRAEMQCLGTYSEEALKIVRPLFVSRAPQRRNSGAAHKDTIYAQPERLKAQGGVTQKVALTSLTLKDLGEVGNEESTCKLVDWHRNKQLYTAIRTRLEQHGGKGDKAFHPSNPLHKPDSAGSPTGPVVRGVTMVIDKLSGIPIRGGIAKNDSMVRVDVFTKAGKFHLVPVYVHHAVAKELPNRAIVAFKDEEEWTLIDDSFGFCFSLYPNDLVRVKLKKETREGYYASTHRGTGCINLWAHDRNFNIGKGGSIEGIGVKTALSIEKFNVDVLGNIYPAPPEKRRDLA

SEQ ID NO: 8806 - protein, 1161 aa, unidentified
  REGION 1..1161: note = Description of Unknown: Cas Enzyme sequence
MKKILGLDIGTNSIGWAFILEDEQGVPETQIAKLGFRIIPMGAEQQEFESGNAVTKNAERRIKRGIRRNNQRYKLRKRLLIAKLSEMGIFPFSEYGNRLREEIELKANTNSLIFDLRAKALSEKLTLQEIGRIFYHLNQKRGYKSNRKTNEQESASNEDSYLGKIDALDDYLTKNNLTVGQYFAAQFDDNPYTKVKENIFLREKFEEEFDKIWTKQKEYYPEILNDQNYNSIKNEIIYYQRKLKSQKNLVSDCLFEKGHKAAPKSSPVFQVYRIWQMINNLEITHKTGDQILLTQVQKEFLFSELDITKTISSSNILKKLNISPRDEYEVNFEKLEGNYTKADLLKAFSEANISRPELLNFDPLDDNFDKSDYYQLWHLLYATEEINDVINTLQKKYDFTAEQSAVLAKISFKSDHGSLSSRAMRKILPFLIQGYNYSDACQKVKEAGKGKNNQYDHSESLKQFPNVDTKTGEILFPELNLLFPNSLRNPVVEKVVNQVINLVNSIIHSSDLGRPDEIRVELARELKMNIKKRKDLFSKNNERNRDNLRIEKLLQQELGFRTVSRNDIQKYKLWEETEGTSLYTGKKIEISKLFDTSLYDIEHIIPKSRLFDDSFNNKTICETSINRVKSDLTAFDFLKSRSEDEFNDYIERINRNRKLSPRKRNYLLMPENKIPLDFVERQLKETQYINKEVIKVLRSATSKVTSTTGSITDFLRYNWGLNTILEQLNFQIYKGLGLTEEITSKGQSKEVIRDWSKRSDHRHHAIDALVVALTKQSHINRLNRLNQFVKNQAELKEKARHIEPPILNITSKTMHAIDELLISFKKNNKVISPKRNEIKKVGIVQETFVPRGHLHNETIYGMIKTVNNINVKKALENSDNIADPLIKNRIKERISAFNGDTKKAVKSLKESPLIINGKELQTVPVYETTFAIRKQLDGNFKQADKIIDPVIKEIVNQRLNEFNNNPKEAFKDLDKNPLWQNKEKGIKIKSVRIFENASDLQPLHENEKGEPIDYVYTRNNHHIAIYENEDGTLSEEVVTLWDAVERKLNGLPVINKTPNDGRKFLTSLEKNEMFVMNLDPNEIDFFDRKNYSLISKNLYRVQKLSSKDYCFRHHLDTSPDKVYFPFFIRIQSFGDGKTGLKSYNPVKVRIDNLNRIVKVGE

SEQ ID NO: 8807 - protein, 904 aa, unidentified
  REGION 1..904: note = Description of Unknown: Cas Enzyme sequence
QEFKIWQILNNIQVNDKASHAKRFLEQEEKEMLFSELSIREKLLKADALKILFKNHKELDFNYKDIEGNKTQAALFNAYNDIIELSGHEKIDLSKCPATEIVNSVTEVFTTLGINTEILCFNSLIERDKFDKQPIFQLWHLLYSFEGDNSNTGQDKLIETLSARYGFEKEFAKRIASITFQPDYGSLSTKAIRKILPYMKEGNEYSVACVHAGYNHSKSSLTKEELDKKELKVMLDILPKNSLRNPVVEKILNQMINVVNAVSESYGKPEEIRIELARELKKSAKEREDLTTTINQTTAEHEKYREILRREFGLSHVSRNDIIRYKLYLELEPFGFKTLYSQTYISPDKLFSGDFDIEHIIPQSRLFDDSFSNKTLETRSINLEKGNDTAVEFIEKKYGKEELANYIARIESLFKNNPAKQGKLKKLKMKGEDIPDDFINRDLRDTQYIAKKAKSILEEFVRDVVSTSGSITDRLREDWQLINVMQELNWNKYDKLGLTETIIGREGQEILRIKDWTKRNDHRHHAMDALTIAFTKRSHIQYLNNLNARSDKAGSIYGIEQKELYRDNKGKLRFKPPMPLDEFRFEAKRQLENTLISIKAKNKVTTININTTKKKGGTNKKKQLTPRGQLHLETVYGSMQQPVIKEEKVGGNFNGAMIAKVTKPAYREALLKRLQGNGNDPKKAFTGKNTLEKNPIYLDELHTIKVPEKVKTKDVETIYTIRKDISPDLRVDKVIDKKIQKILQNRLTEFKNDPKKAFADLDLNPIWLNKEKGISIKRVTITGISNAQALHDKKDKEGNLILDKDGKPQPVDFVNTGNNHHVAIYRDEKGNLQENVVSFFEATERVNQGLSIINKEFKIKEGWKFLFSMKQNEYFVFPNAETGFSPNDVDLLDDEKYSLISPNL

SEQ ID NO: 8808 - protein, 1011 aa, unidentified
  REGION 1..1011: note = Description of Unknown: Cas Enzyme sequence
MQNFLGEIIMNSYTLGLDIGSNSIGWALLQTHPKPTIIDIGVRVFPEGVERDTKGLEKSKNATRREARGARRIHQRRNQRKEILKRILQYATLLPNDDSALQSLFQTNPYQLRKKGLDEKLELNEFGRVLYHLSQRRGFKSNRKSGKAKEDGVVIKGASALQKEIDTNNCRTIGEYFASLNPDEQRIRGRYTFRSMYEQEFDLLWAKQKEHYPNVLTEDLRKKMDENIFFQRPLKPTDELIGECELELGEKRCPRGDWYARRFRLLQDVNNLKIQNPDGTEKVLSADQRKIILKELGQKDKLTFDKIRQILGLMETQIFNAEYKVSRSGKTVESMKGDIFVHAMKGKSIFGTKKWDMMNEQEKMKLNEWFVELEDDQLRKKIKNEYNLESKQIEAALKIPLPRGYMSFSRKAIIKLLEFMEQGAITSEAKAVAYPDRQASTPGNDTLSRLSLPEDLRNPIVNKALFEVRKVVNAIIREYGKTTRIKIEMARDVQGSRQQREELHWKQRENMDRNEDARKRLREDIGIDNPTRDDVIKYNLWDECGKVCPYTGKHISQQALFGQNPEFQVEHILPYDRSLDDSFMNKTLCEVHENIHIKRNQTPFEAYSHNSERYEQIKQNIKVLPWPKRKKFLQEEINLDQHITRELNDTRYICKEVVKYIKQLGAHVTGTRGKITNELRHQWGLDNIFDEIGTRRDDDHRRHAVDAIVVAVTETEHLRKLATSKYSITCKSFEPPWLNFRDEVREKVSRINVSHRVQRKISGKLHEETNYGRTGLMDEKDQEYFVYRKALKDLTLPMVEKIVDPVVHEIVRERLRQKGIESDATSRKIPKDAWSEPLYMRQTKSDKKVQIKKVRIQDVRNPENMFSLNDKDGNPYCAVDPGNNHHIEIFEYKDSKGRIKRDGLVVTMLEAVRRSQRSEPVIQKDHGPNNKLVCSLAINEMFMLKLDDGNEVLHRVQKIDQNKRIILRPHTYAGKLSDSDSPPLIQRKSASTLEGYKVTVDPLGRIWPAND

SEQ ID NO: 8809 - protein, 1136 aa, unidentified
  REGION 1..1136: note = Description of Unknown: Cas Enzyme sequence
MNNERIILGLDIGVGSVGWGLLKLTEEKYTEKNPDGTIAERYRITSGEIIDTGIREFQLPQDRQKKSLAAKRGQARRSRWTIRRKARRLKQLIKLSEKFGLIEKNVNRDEILKPKKGDNKKEKWDIWRIRKEALERKLTDEEFFRVLYHIAKHRGSYFHTKAEFLSEEEEKKLKKNKEQEEEKSEEEKVKGKVKKGLRKIQKLLNESKYKTIGALFYETFKNKRKRNAPDKYEHSILRELLRDEIKKIFEEQHKFGNEKARPELARQYIEEILMKEKDIDEKKLQKMMSRCEFTGEICAPKESYTAERKMLFDRLNTLELVDTQNKDRHIQLDKDQREKIITLAYKNSKVKFSQIRAELEELQDKLHLRFNLCSYREKNPEFNKKLECKVKDGKLQYEDKHKVLIVNINTGEVQSLYEKIKGIFEKRKETWKKAKNLYIYYSDIRKQLNVPDDFRFESIEKDKDKKKRYTKSAAELGGEAKYIKQFEDDTFVELKGYHKIKNAIEKTDGKWGQIENDHDKLDTIAEALTYCKSDKTRAEYLQQHNITDKDVIDAVLTINMKKLATYSKEALSNLLKYMDRKENWMLFKDAKRECGYGKIDLKKQAILEPYGGFFEKNPVVARVISQTRKLINAILRKYKDKCRIDQIHIEVATELANSKKRKAEIAEGQQRYKEEKERAEERCREKGLNPEDGQNLLMFRLAEQQRQLCPYTRKHITFQPTGASDEVYILDCEIDHIIPMSRSFNDSLNNKILCAPEANQNKRDRIPFEWFEDMYGKDSVQWRDFENTVKTMYSVPYPKKKNLIRKSWTDEDKEKFLNRDLNDTRYAARHIADYLRKYFDFSESQRDDIKEVRRVKVRSGGITAFLRYMWGLNKDREANDLHHALDAIVVACATDGHVYLVSNLSKEIERKGKNWYKHFDFIRNKFKPWTTIREDIQTKVNHVFISRMPRHKVTGSAHDDEIWSFDEEIRIKKAQKKKKKISSIPKDTGKVIITNKGYAKIGEMVRADVFTDDKGKNYVVPIYAFDIFSKKPLPNKYLHKNDAPYETWPRVEENSLKFKFSLFKDDLISIDGEMYYVNFVQGTRSKINVRSIDGSIKEKELGYKNAHLKKYSVDMLGNYKEVVHEKRQGNKLKKSL

SEQ ID NO: 8810 - protein, 975 aa, unidentified
  REGION 1..975: note = Description of Unknown: Cas Enzyme sequence
DLKAQARHQIIHQLDQEFLAKYGVEPLASKKLPYLLRAKALKHKLEPYELGRALYHLGQRRGFLSNRKATSKKDEKFGKVKTGIETLAGKIEEMGANTLGEYFSRLNPEEERIRSRWTSREMYDKEFNQIWEAQAKHSPKILTDELKKKIWKAIFFQRPLKIQSHLIGKCEYEKGRKRAPLAILDYQRFRTLQQINNSYLISPDGEILEFTQEQRTKLLLELEKKTEISFKRAKKLLGLSDGYRFNFEKPDGKGEFLGNDTAEKLIKVFKEERWNKFSDQEKNQIVEDLLSIQHEKGLIKRGKEKWGLDDESAKKFAEIELEDGYGSLSRQALKKLLPLMEKGMKYMEAVKEKYPDRFKGDKLDSLPRVIESMPELTNPVVKRVLTELRKIVNGIIKQYGKPDEVRIELARDMKKTREDRKKLWKKNLENESRRQEAAKIIKEANEKPSRGNIEKYLLREECNGICPYTGKSISIKQLFSGEIDVEHIIPYSICLDNSFVNKTLCFHDENAKVKNNKTPWQAYGSNEKKWNEILDRVKRFQGGLAKEKLKKFMLKDLDELEDFISTQLNDTRYASRLAKKYLGLLYGEEALSKVQATKGGITGILRRDDVWALNRILGKPKEPDAQEPGTRKSRDDHRHHAIDAICIALTDRSTVKKLSQASGRSLKDRGKATGFAKVEMPWDGFFEDVKKAIDQTMVSYRVSKKVNGPLHQDTFYSPPKEENGKTVCKVRRPLSKITKSEIEDIADEHIKKLVKQKLEELGGDIKKFNDPNNHPFMTAKDGRKIPIHKVRIKKVMTPLEIGETPDPKKKRYVATETNHHLEIYEYKDEKGRTKWDGAIVSQFEAMRRLRAGEPIVKRDFGEGKKFVFSLALNESVKLNDDKGNEIITVVKGISQLASGWIIITLRHNSDARPTSEYQNQIKQRKELKKKYDEKLAKEIDKQLPVFIFKGPDSLREANGQKILIDPLGNIRWAND

SEQ ID NO: 8811 - protein, 1001 aa, unidentified
  REGION 1..1001: note = Description of Unknown: Cas Enzyme sequence
MPGYQGESFVLGIDLGPNSIGWAVVGMADDRRELIDCGVRAFEAGLAGLEQDGKGKSWNAERRLARQTRRLLDRRARRMLKLAHALQRAGLLPPGALDDPADKHEYFQKLDRVLDTPYRLRALALKRKLEPFELGRALYHLAQRRGFLTTRKAPAKDQDEIGIIESGFNSLQTQMDETGARTLGEFFAQLQEDNIRVRERYTSRKMYQEEFNLIWDAQTQYYPGILGDELKDIIHHIIFHQRPLKSQKHLVGKCELELGKRRAAWARLNTQRFRYLQTVNNLTIVDESTGEIIDLDGQSRSVLISALETQGDLTFPKIRKLLDLKRTTKFNLELGGEKRVPGNRTAAKLIGIAGFENWTALTEEQQDAIVDDILSIVKDDTLKHRAQKVWGLDEEAAEKLSKVSLEDGYCNFSAQAIARLLPHLKNGVKLETARRELYPEKWDRMIKPFDQLPAVDSGDLPELRNPIVQRTLTELRRVVNAIIQHYGKPAVIHIELARELRSNAKQREKIIRQNKANERAREKAAQKILAEVGIQNPKPNDILKVLLAEECNWKCPYTGAQIQMTALFGDHSQFDIEHIVPFDRCLDNSFMNKTLCLAEENRAVKHSKTPQEAYSGTDKWDDIIRRVSGFKGDARREKLRRFRMNKHELQEFLDGFTSRQLNDTRWAAKAAKRYLGLLFGGADADGIDASGKRRIQATTGPITAYLRNEWGLNAVLGDGPGKSRDDHRHHAIDAIVTALTTSGIVKTLNDAARRASQYHRRLFDQLETPWPEFLTDVREKIAGMYTSHRKSNRVRGALHQETFYGKMRTGKDGKQYVHQRRYLTDLADKDVKDIVDPVIREAVRRKVDEAGGNPKKAFPSRVDCVNVEIGNGRTVPLRRVRVRENLEAVFMVGEGARKRLVKSGNNHHMEIVAVLDEDGKEKKWEGHVVTMYEAYRRLKAGEPVVQRDFGPPRQFKFSLSCFDVIELDDAAGSKQRSLFIVRTVPQSRQIRFVAINDARKI

SEQ ID NO: 8812 - protein, 1413 aa, unidentified
  REGION 1..1413: note = Description of Unknown: Cas Enzyme sequence
MAVKNILGLDLGTTSIGWAHVREGETAAESEIVSIGVRVNPLTNDEQTNFEKGRPITINADRTLKRSARRNLQRYKLRRANLLEILIAAKLLKSTSEIVENGPNSTFETWFLRAKAAKERIEKDQFARVLLAINKKRGYKSSRKAKNEEDGELIDGMEIAKKLYDNNLTPGQFVLQLLEKGVKSTPSFYRSDLQAEFDRIWKVQQAFYPDVLTFNLYQELIGKGQRATAAILYNSEHKIFTAENKGTPTEKKTQAYQWRTLALTTKLSIEEVAYVLADINNSIKNSSGYLGAISDRSKELYFNKQTIGQAITEILHTNPHSSLKNKVYYRQDYMDEFEQIWSEQSKHHPELTAELKHEIRDVIIFYQRKLKSQKGLISFCEFEQKIIEINGKEKRIGQRVAPKSSPLFQEFKIWQILGNVTLRNKLNKQDRALLLSQEDKALLFEELNLKGNLSSNKVLDILGLKPKEWEMNYTTLEGNHTNKCLFEAYLKIIELEGNNIKDLMGISTAKEEVELGDISLSAQEIKSAIKSIFESIGIETGLLDFDAELEGKAFEQQPSYQIWHLLYAYEDDQSASGNERLIRLLQEKFGFKKNEFVDHTALFTGIQFLPDYGNLSTKAMRKIITHIKENNYSDACVLANYRHSAASLTREEIESRELKEELTLLKKNSLRNPVVEKILNQMVNVVNTLLQKNRAINPSFQFDEIRIELARELKKNASERADMTQSMSAGKATNERVAKILNTEFNIKNPSRNDIIRYKLYEELKNNGYHDLYTNTDIPKEKLFSKEVDIEHIIPQSRMFDDSFSNKTIVYRQTNLEKGNQTAYTFIENKQGELGIQAYKERIERLFHLGIKNKEEGISKAKYQKLLKVESEIGDGFIERDLRDSQYIAKQAKNMLFDITRKVVSTSGSITDRLREDWGLINVMKELNFEKYKALGLTEVIEKHGKKTERIIDWTKRNDHRHHAMDALTVAFTKHEHIQYLNHLNARKDESHKEHSIILGIERKLTEVSKDDTGNSKRRFISPVVNFRSQAKTHLSQVLVSHKAKNKVVTKNKNITKTKKGEHTQLALTPRGQLHKETVYGKYAIPMSKMEKIGAKTTLEVIEKVGSERIRKALLQRLNMFDNDPKKAFTGKNSLDKNPIVIDETTKTCVPEMVKLTWYESDYSIRKEINPTNFKDLKTIEKVLDQKIKSLLINRFKASGNDPKKAFSDLENNPIWVNKDKGIQVKRATISGVSNALPLHVKKDHLGQDILDAAGQQIPVDFISTGNNHHVAIYRDADGKLQERIVSLFEAVQLINADLPVIDKTFNQNLGWTFLFSMKQNEYFVFANEKTGFDPNQIDLLDPVNKAIISENLYRVQKLTYKNYYFRHHLETTVEDKKELANHAYKSIRNNKPLEVIVKIRLNHLGDVVHVGE

SEQ ID NO: 8813 - protein, 1156 aa, unidentified
  REGION 1..1156: note = Description of Unknown: Cas Enzyme sequence
MGTKAISADLELAFDVGHSSIGWAVLQSAPSATAQTTSPALLGCGVVTFGADDCLASKRRDYRRQRRHARSTRQRIARMEKLLAHLGVLSAEQLAAKHQPAGGHSAPWLLAARVLASNGAKEQLLDWPTLWDVLRWYAHNRGYDGNRRWSEADSAEAAEDTEKEQHAIALMTENKTETMAETLCAALGLKPMGDQQASQKNFKRLNAAYPRRVVEAEVRRLLDLHAGKLPKLDAAFIKAVMEDWKAIPVVAAVYDRRSPADAERRSQSAATGIQLPARYSGGLLFGQLVPRFDNRIITRCPITGDKVPNKLSPEFLRYRWAMQLANIQVAGSPQEKLHKLSADQRKTLHDLMLAKGALTEGELKKAVRALPGVVRDNLDTMLMHPDAKDALVFDPVQKLLASAELAPFWATLPENLQARFRGKLRHGKAVTLADLRMALADATVFDAELQRQLDAQNTRKAKKQPALSRENFLAQSFDARKALARLSGRAPYARPLLKQAYEQVLAGKDPREDGGCLFRSEEIRQRELQKKLEDQTNNHLVRHRLLILERLLKDLVNAPEFAAGQPERVGQVTIEVNRDLREFSGMTRKAIEMDLGSRLKNFKSVSDKLEKAFDSQTYNGKPVQVTAGLIRKARIAEDLGWECPYTGKPFEPIHLVSCKVDKDHIIPYTQRPSNSLDSLVVTFAEVNGMKQNRTAWQFIQEFGGQPVKGMPNVMLRTPKQFEDFVTKLESFRGHEDDKRRKKRRKDLLLLPKFEDKGFVPRDLTITSQLVRLGAQVIQRFFASGRADLPVGLNPSASASAAMRADIATKAAQQRGPTGSAALPRIISLPGAVTGAVRKGWRVLGCLSQAAPQILEPTGEPKSKTEIRDVTHLHHALDACVLALASHYFPKDGSLWEAMIVRSPNTAQKQLLHATGFYEFNTADKPNLKDLPVELKQQIANRLAEKRVVQHIPADMSGMKVEENTRGIVKVENGRATLRQQKRNADGKLEVKETEEVVGKLVGLSPEKGKGKLTPMKGVRVITDNFGVAILDHATNPDDKFVIIPWHKVWHRIDELKAKNKGKPARVLRIGRLIRVAQPKKKDYQGDWMIRSVKNDQRLGMVVDISHPDLIDYSAPGRADCKRNVSLKSLVEGGLEILKPTLCGVAKPAPVAATESQ

SEQ ID NO: 8814 - protein, 1495 aa, unidentified
  REGION 1..1495: note = Description of Unknown: Cas Enzyme sequence
MSKILGLDLGTNSIGWALRNTDLKENQIEKFGVLTFNKGVGLGKTGEYSYAAERTKKRSTRRLYQARKYRLWSTLEILIIEGYCPLSIEDLNKWRHYDKAEALKNNNAGRIYPVWNLAFDAWIKLDFDNDGKPDYISPYQLRKELAEKKLDFNQEINRFKLGRALYHIAQRRGFKSSRKVLEAEDSKGKEKVDVDADEIELQKSEKKKTEKLKLIFPDFDTAVPVGVFLANKELQGFRVRLDITQYLVRENYKDEIKYIFKFQGIKFEENLYSKLVESGKNKNNGSIFYKRPLRSQKGLIGKCTLELNKYRAPVSHPSFETFRAWAFLNNIKYKENNEWNQLPFDLRKEIYAELFFRKSKSYFPFSEINAFLKKKGKNWQLNYTPKTTVTACPVSARLKDIFGNDYLNIKIKKDQLSKSGKNHYDIEDIWHVLFTYEDQEYVSEFAEQKLNLEPEKIKQFVIAWNALPVGYGMLSINAINKINNFLQKGLIYTEAVLLANIPSIIGEILWKENEAFLLESVSSVIEENRLEKLVLNSVNNLISKHKNLEANEKFGHKDNNYKLVESDFKDIQTAIEEQFGSYKWACFSDEEKRKILSIVQDCYQAYFITTGLVRKDINGERHLEVNSNNKFYYKTDSGYFRLPKLIDTLAEFLQANFEVPDEQLAKIYHPSEINIYPSAKVDKDGILKLGSLKTGSFKNPMAMRALHELRKLINYLIETKQIDNETRLVVEVARELNDSNKRWAIEAWQRQREAENQEFSEAIKQLLTDDSTIKASVDNINDIDKLRLFVEQDTVQNLPPLAEESEDIEGKKKKKTEKDEAVRWSGHGKKLIEKYRLWKEQGYQCIYTGKLIKLTDLFNDNVIDFEHTIPRSKSFDNSLENLTVCYHDYNRTIKKNQLPNQLLNYDKEYDFGGSIGKCSPILIRLEAWKEKVERIKQQIDFWKTKSKKAADKNWKDDAIRQRHLWQMELDYWQNKLNRFTITEITNGFKNSQKIDTQLISKYAFHYLKTYFEKVDVQKGSITAEFRKIYQLQPSDEKKNRSKHSHHAKDAAVLTLIPVAAKRDIILEKYYESKENKTSFITESPFFGFKREFIWNIDDTILINNITNNQELTPAKRKIRKRGKELIINGKTRWATGDSIRGQLHQETFYGAIKPAQKGEEGNLLKDEHGKFIQKDKIEYVIRVPFQYKKDASTPGFKTLEEIKKQIVDDGLKIKIEKQVLENGGLKEAFEKGIYMLDKNGNPHGNPIRHIRVWASVSEPLAIKKQTNLSDKEYKQYYWATNGENVICAYYKKDITDKKGNLKKDRELEIINLFDAAKLKSTGLINTKGEVELYRKDKKNQVIIDENGNKEKPFALLKAGMKVIFYNEKTEELKKIESESVSEYNKRISYNIYKIIKFTGGRITFQHHLDARNDKELEKAYPENIIFKMDEKNKEICFGGRGTSGFTEKVSDALKHNSHNNYEPWPRLLYSVNWLDFVVENKDFKINIDGTIKWIK

SEQ ID NO: 8815 - protein, 1189 aa, unidentified
  REGION 1..1189: note = Description of Unknown: Cas Enzyme sequence
MKKILGLDIGVSSVGLSVVYEENKQKEIKDLAVRIIPEDPNFHGKFYSGNTASKNLDRTTNRGIRRGYQRFQQRRDNLYKELKEYNMFPNDNLFKLSTHDLYKLRANAVTKQISLEELGRVLILLNQRRGFLSNRKSNSEEENSTDYKKRIAELQHELNGKTIGQQLFSEIENTKNSFEIILRERTYLRASYIEEFDRIWECQKKHHSQVLTGGVNEDDNKGTLYNTIRNKIIFYQRPLKSQKGLVSNCPFEQHHKAVTKSSPYFEMFKIWQRLNDLEVTFENGVKTKPTLEQKKELFKLLFFGEKLNNKYKLTVTEIKKVLGLKRNEGYLNFTELDGSRTYSILKNALIKANITTPEDYLFFNLDQNDEKGGLMELWHITYSIPNENDVVKTLVQRFKFTKEQSEIISKEVGYTSDFGNLSTRAIRKLLPHLQKGLNYSEACDAVKYDHSGYKTKIQLEEKLKPKKQNSLRNPVVEQVLNQVVNIVNLAIDKHGQFDEIRVELARELRNSAKTRKNITNLNSKNKKENDKVREMLQKEYGYKIVNGRDTQRYKLWNETDKQCLYCSNPITKTDFLSGNGEIEHILPKSRSFSNNSNNFILAHRKCNSGKEGKNQMTAYDFMESKGKEALEQFIKKVNEFYKDGKGSMSKSKFENLMCKGEDIPSDFVERMKKDSQYISKEAVKMLKNVCENTYTTTGQITDFLREKWELKNVLQEISFDKYKAIGQIETKEYKDGQGNVKTYETIKDWSKRDDHRHHAVDALICALTDQKIIFKLNNLNKIYQYQRDALSNEELDKIKATYDFEKLDIKSFADLIDDYYYSPIKNLREEATKHLENIFISIKKSSKVLSKNINEPKNAKPQTTWTPRGRIHEDTVMGKVKRVAEKKAKLNEKFTIVDYIVNPEIKTLIKNHLSQHQDNPELAFNSKTLKKNPIKYKDQELKEVQVYEETCTKRVPLTENFTPAQVEKITDEKIKNIIKERISKSKNIKEAFSNLKENPIWLNKEKGIQIKSVTVYDESKVEHVRDGYVKTGGNHHALIYRNVDGKFIDKVISFWEAVNIGSLNIQQTGKPYPIIEKRDNLEFGIFQFSMMINDLFVFDLKHSENPTENEINFLDKKNRPIISKKLFRLQKMSKKSNGVFDIHFRHHLETTVERDIPELTWINIQSNKQLSRLTKIRINHLGEIIKIGE

SEQ ID NO: 8816 - protein, 1055 aa, unidentified
  REGION 1..1055: note = Description of Unknown: Cas Enzyme sequence
MQPKMRYRLALDLGSTSLGWAMIRLTKENKPCAVIKAGVRIFSDGRNPKDGSSLAVTRRAARAMRRRRDRLLKRKQRMMDALVRHGFFPADATERKALETLNPYTLRAKGLDEALTPAQFARALFHINQRRGFKSNRKTDKKENDSSALKNAIKKLHEILQANNCRTVGEWLNRRNDSGETVRARYRQERTVKEDGKTKIDKYYDLYIDRAMIEHEFDVLWSKQADLNPTVFNESARAELKDILLHQRPLKPVKPGRCTFLPEEERAPLALPSTQRFRMYQEVNNLRILRDGLKEAPLTLEQRDTLIASLEENSKCSFTKIKKLLGVGGTVQFNFEDPKRQELKGNTTSAILGKKDLFGPDWFKFDEAKQDAIVMKLVTEESEDMLVRWLQSETGIDEKTAEAIASTGLPEGYGSLSAKALALILPELRRDVVTYDKAVQAAGFEHHSKLGAGAEIPGITFKTEQIDQSTGEIKAFHIHHKLPYYGEYLQRHVGFGSGRPEDTAEKRYGKIANPTVHIGLNQVRLVVNALIRRYGHPSEVIVEVARELKQNQEQRKEENKRQAENQERNKRLRKNAANVLQIGEEQVSRDDIEKMILWEELSHDVADRKCPYSGVTISAAMLLGNEVEIEHILPFSQTLDDSLNNKTVSMRQANRIKGNRTPWEARQDFEAQGWKFEDILARAGNMKKEKRYRFAEDGYQRWLKEDKGFLPRALNDTRHLSRVAREYLTLICPQATRVIPGRMTAMLRGKFGLNTVLGLNGEKNRNDHRHHAVDACVIAVTDQGLLQRFAKASANAREKQLNRLVESMPLPWDSYREHVQRAVENIWVSHKPDHDYQDEIFDQTIYNADGFSKIAAKVRTVIPFNARQGSPSEMRHRDKEGYPKPYKGLLSNSNYCVEIVRLDNTWEGEVIPTYKAYEFVRDFKNQNRGCTEKQAFAALRSPLKSLSGKPLVMRLSIDDSIRAEIDGVIETLQVLKINSSGSITFIRINETNIPCRYNAKLAAQKLAAERKDFDAGALNDEFFQKAVTAGSLRALKARRANISPIGELHDPGFKE

SEQ ID NO: 8817 - protein, 1031 aa, unidentified
  REGION 1..1031: note = Description of Unknown: Cas Enzyme sequence
MPAMRYRLALDLGSTSLGWALIRLNAENNPCAIIKAGVRIFSDGRNPKDGSSLAVTRRAARSMRRRRDRLLKRKARMEKSLIDHGFFPANDAERKALVTLNPYALRAKGLDEALTPAEFARALFHINQRRGFKSNRKTDKKDSDSGALKQAILGLRSQIDPQGQDGKARTVGELLYRRLTNTALPPAQRTVRARYREQRIVKDDGKSKINKSYDLYIDRSMIEAEFDALWAKQASVNPIRFNPSARDQLKDCLLHQRPLKPVKPGRCTLLPDEERAPLALPSVQRFRIYQEVNNLRILREGLKEEELTLQQRDALVASLESNSKRSFMQIKKLLSLGGTVQFNFEDPKRQELKGNTTSAILSKDEHFGKAWFTFNEAKQDAIVLQLVTEENEAKLVQWLQAETGVDERRADALANVGLPEGYGSLSSKALARILPELRRDVVTYDKAVVAAGFDHHSNISPASTGEILPELPYYGIPLQRHVGFGNGKPEDPDEKRYGKIANPTVHIGLNQVRLVVNALIKRYGHPSEVIVELARELKQSKEQRDEENKRQAENQKRNVRLRADIASVLNISPERVRSADIQKMILWEELSNNVADRRCPYSGTQISAAMLLSDQVEIEHILPFSETLDDSLNNKTVSLRQANRIKGNRTPWQARDDFAAQGWSYESITERAKQIPNLAKRARFAEDGLQRWLKEDKSFLARALNDTRHLSKVAREYLSLICPQATRVIPGRMTAMLRAKFGLNEVLSLQGEKNRNDHRHHAVDACVIGVTDQSLLQRFAQASASAREHQLNRLVEDMPPPWGKNLDSYRTHVQRAVQNIWVSHKPDHGYEGAMHNDTAYSLLGNGRVSVHKVVDGKRERIEDNLKVIEFSSAKATARHGLLPTGEPRPYKGYKGDSNYCIEIVRNEKGKWEGEVISTFDAYQLVRTHGLARLRNPKLSASGKPLVMRLMIGDTVRINNDDQLLTGRVTWIKSNTQIALAAVHEANTDARARDKEDSYTYTAKTAGVFQKVSARRVTISPIGELHDPGFKE

SEQ ID NO: 8818 - protein, 1009 aa, unidentified
  REGION 1..1009: note = Description of Unknown: Cas Enzyme sequence
LTLVSDKNVNCRKFRTKQIMKTILGLDLGTTSIGWALVKEGENAEIIKTGVRVIPLTTDETTNFEKGKSITTNADRTLKRSARRNLQRYKLRRDNLIDALQKNNIITSDSILCETNNHSTFETYKLRAEAASNQIKLEEFARVLLMMNKKRGYKSSRKAKNEEEGSAIDSLEITKKLYEDNLTPGQYAFELLRQDKFALPDFYRSDLKNEFDLIWKFQSSFYPDVFNEFNKEKLSNKTKAQTAAICYKEIKMEAVELKGKMSEKKFQRYSLRSRALSEKLLLGELVEVFTEINGNIANSSGYLGAISDRSKELYFNKITIGQYLYTQIQENSTTRLKGQVFYRQDYLDEFETIWETQASFHKQLTPTLKKEIRDIIIFYQRRLKSQKGLLSTCELESEIKEIVVNGVTKTKLIGPKVCPKSSPLFQEFKILSQLNNVEILDEEGKNKLRPLEQEEINYLFEILNNSEKLSSNDINKLLGFKEKYKYNFETFEGNKTRAAFINSGIKIAELSGNDEIEFGKLNGIQKLVTVKEIFKALEIDTTLFDFDSSKTGKELEQEPFYKLWHLIYSYEGDKSKSGIDSLIQILNEKYGLEKQYAVVFANTVLQDDYSSLSTKAIQKILPFLKEGNKYSDAASLAGYNHSNATTKAENEKRILKDRLSILSKNSLRNPVVEKIVNQMINVVNAIVDTYGKPDEIRVELARDLKKSSTERAQMTKSIGDSTRKHEDIVKTLNSEFGIANPSRNDLLRYKLYEELKDVGYKTLYSDQYIPREKLFSAEIDIEHIIPQSRLFDDSFSNKTLEYKAVNIKKSNATAFDFVCSEYGEEGKLQYIERVKSLFNKEGSKTKYRKLLWTEKDIPDNFINRDLGDTRYITKKSKEILEELVRNVHTTTGIITDRLRNDWGLVDVLKELNLPKYQTLGLTEEIENRNGHTKLQIKDWTKRNDHRHHAMDAITVAFTKPSYIQYLNNLNARSDKAGSIYGIEQKELYRDDKNKLKFNPPMPLDVFRKE

SEQ ID NO: 8819 - protein, 1037 aa, unidentified
  REGION 1..1037: note = Description of Unknown: Cas Enzyme sequence
MHYRLALDLGSTSIGWAMIRLDSQGTPCAVIRAGVRIFSDGRRPKDKASLAVDRRAARAMRRRRDRMLRRKARLMRQLVDFGFFPEDAAVRKQLVDLNPYELRARALDDPLTGAEFARALFHLNQRRGFKSNRRTDKKDSDATPLKQAIADTRKILHGDGTAPQARTVGEYLWHRMRDGQPVRARYRELRLTTPEGKARLDKRYDLYIDRAMVEQEFDAIWKAQARLTPALFTETARAALKDTLLFQRRLRPVEPGRCTLLPEYPRAPLALPSTQRFRIYQEVNNLRIVDALLSERPLTLAERDTLVHALERRAKVKFDSMRKLLKLSGDSRFNLEDVKRSELKGNLTTAILAKAQHFGDRWFSLTLAQQDAIVARLVEEESEAALVAFLEQHWQCETGAAQRIAELALPDGYGSLSQQALDRVLPHLADAVVSFADAARLAGFHHSQLQANTAVPGVTIELEGVNLETGELRTWHVFRALPYYGMVLQRHVGFGTGSESDPPEKRYGKIANPTVHIGLNQLRLVVNAIINRYGHPREVVLEVARDLKQSQEERDNENRRQADNQKRNERCRQTVASTLGIPTHAVKTADIQKLILWEELSADALDRRCPYSGKQIGVAELLSDAVEIEHILPFSRTLDDSLNNKTVAFRVGNRIKGNRTPWEARADFEAQGWSHEEMLVRASRMPRQKSYRFAEHGYQQWLRDDKDFLARALNDTRYLSRVAREYVSLMCPQATRVIPGRMTALLRGKFGLNDVLGVTGAKNRNDHRHHAVDACVIGVTDQGLLERFASASASTRQAHLDRLVDDMPLPWPTYRDHVERAVNRIWVSHRPDHSHEGAMHNDTAYGLREGGIAVTHKRVDGKRQKQEQVLSVIAMSEPTQLARHGVLPDGSPKPYKGYKGDSNYCIEIVRADNGKWQGEVVSTFDAYQAVKRAGTTEVLRRKDKSLRGRPLVMRLLINDVIRYNGEDALKTVRVVKISSDGQVTVAPLHESNVAKRNNDPNDGFVLTSKSAGRLQTAAGRLVSVSPIGDLRDVGFCD

SEQ ID NO: 8820 - protein, 1419 aa, unidentified
  REGION 1..1419: note = Description of Unknown: Cas Enzyme sequence
MKKVLGLDLGTTSIGWALVNEAESASERSSIEKLGVRVNPLTTDEQTNFEKGKSITTTAERTLARGMRRNLQRYKLRRSELLSILKEHRIIREDTLLSESGNKVVFQTYAIRAKAPLQRIELEDLARVLLMINKKRGYKSNRKANASEDGQLIDGMDVAKLLNREGITPGQYALRLLENGKRFVPEFYRSDLEMELERIWSFQKRHHSNLLTDELWSKMQGKGKLETSKLIYALFKLDTAENKGTREEKRLQPYKWRTAALTQQLTAAELAFVIKDVNGEVNGSSGHLGAISDRSKTLYFEKKTVGQYLYEQITIDPHTRLKDQVFYRQDYMDEFDAVWAEQAKHHSVLTDELKETIRDGKVVNGRVRGGMFFQRRLKSQKGLIGFCEFEQKPIEVVVDGKRKIKIRGLRVCPKSSPLFQEFRIWQVLNNLELTLKGRKKVRAKKKLNQGSLFDSTTSEQKDFELDHEAKQLLFKELTWADKLSKADALKLLYKNPSELDLNFKTLEGNRTNAALLEVYKRIVEASGHDVDFSKLSPSQSVDKVRDVFGAIGINTSILDFNADVEQSEIEKQSSYQLWHLLYSFEEDNSTTGDANLVQLLQEKYGFEQAYARMVANVAFQDDYASLSSKAIRKILPHLKDGNTYDVACLYAKYNHSHSLTKEERETRELKEKLDVLAKNSLRNPVVEKILNQMVHVVNGVSDAYGKPDEIRIELARELKKSAKEREDMIKNMESATKEHEEYRKLLKEKFGLSYVSMNDIIRYKLYLELKGNGFKTLYSNTYIHLDTSDNGLFSKKFDIEHIIPQARLFDDSFSNKTLELRSENREKGDDTALAFIKRKYGIDKLDEYKMRVESLVRYKENPKENGKSISKTKYNKLLMDNDEIPEGFIDRDLRDTQYIAKKAKAMLEEVFRTVNTTTGSITDRLREDWQLVDVMQELNWEKYKALGLIYYEHNREGKPLPRIKDWTKRNDHRHHAMDALTVAFTRYSHVQYLNNLNARSNKEGIFYAIEQKELTRDDKGKLRFNPPIPLNEFRAKAKEQLEALLVSYKAKNKVVTRNRNVTDKKGGTNVKIELTPRGQLHKQTVYGRNPWTRIALNEKVSKKHIELIADPNIKAMLDEHIAASGGIGKAFTRAKLKDLSYKGKPLTEVIINEPCYTERLDLTKFFTGQSSNSAKEATIESIIDPVVRQKVREHLTNNGGDFKKAFSNLEESPIWMNKEKGIRIKKAIISGISTATPLHYAKDKDGKLVYDYNGKPIPVDFVSTGNNHHVAIYRDEKGILQEQCVSFYEAVMRVNEGLDVIDRAYKADEGWKFLFTMKQNEYFVFPNTEVGFDPTEVDLLSKTNYSRISPHLFRVQKISTKNYVFNHHLETSAVTGCLLKTKKELSGITYQFIQSVPRLEGIVKVRIDHAGRIVQIGEY

SEQ ID NO: 8821 - protein, 948 aa, unidentified
  REGION 1..948: note = Description of Unknown: Cas Enzyme sequence
DRRAAQVFYYRLRARAVEGRVEAFELGRALYHLAQHRGFLSNRKSAKKEGEEDGKVKSDISELKEKMDAAGAKTLAAYFSTLDPEVERIRARWLGRKEMIEPEFDAIRLEQSKHFPQIDRETWDRIRRDIFAQRPLKDQSFLIGKCALEPDEIRCPVAYPEAQEFRILQAVNHLRLSERVGELVLPERELEPNERAKLVDALMASDDLTWPQAKKLLGYKSSEAQFSIERGGEKRLIGNRTEARLMVEAGVEPIWTALSADERRKLVDDLLEYEQEDKLSKRLVKRWGVSPSLAKQIATISLESTRLSFSLTAIQRMLPSLREGKSVQKAKMDAYPEQAGADQPWDLLPPLHPNAVWKEHCSGGRPYNGIEVRNPAVERSLSEVRKVVNAVIRRWGKPEVLRLELARDLKKPRQERKDASDRMRKQEKWRDEARALMIQQGFSTVADRNQRSDVEKVLLWEECGGVCPYTGKPISFEDLFGQSPRFEVEHIIPYSLCLEDGFANKTLCEISENRNRKRRMSPYDAYHGTDQWDAILKRVQHFKGPTASKKLRLFQSVKNGEEIFGDFTQRQLNDTRYASRLASEYVGLLFGGREDATSRQRIFVSAGGATAIVRRKLGIEGILGGGEKNRKDHRHHAIDALAIALTGPKEVRAIAQASADAVARGEAAHRIKLEVPWPEFAADAKRVVDGIVVSHRVDRRLSGPMHQETTYGRPIRALDGHIKDESLRHQRYRLETLAAADVDDIVDGAVRDAVRAKLAALGQTEPKIAFKGDANLPLLKRGDGREVPIRRVRLKVRKTLATVGDGPRKRYVAPGSNHHMAVIERKGANGSRTRELEVVTTLEAYRRKSAGEAIVQSDLGPDRRLLMTIRSGEAVMLLLSDSEVPCVVSSVSDGLVELKTHTDARAATEIRKAGVDGGRLKLTTRGFLNALVGKIVISELGACRSSND

SEQ ID NO: 8822 - protein, 1275 aa, unidentified
  REGION 1..1275: note = Description of Unknown: Cas Enzyme sequence
MKTILGLDLGTTSIGWALVREGENAEIIKTGVRVIPLTTDETSNFEKGKSITTNADRTLKRSARRNLQRYKLRRENLIDALQKNNIITSESILCETNNHSTFETYKLRAKSASEQIKLEEFARVLLMINKKRGYKSSRKAKNEDEGTAIDSLEITKKLYEDNLTPGQYAFELLMQDKFALPDFYRSDLKNEFDLIWNFQSSFYPNELNESNKEKIIGKTKAQTAAICYKELKWEAIELKGKMSEKKFQRYSLRSRATSEQLLLGELVEVFAEINGNIANSSGYLGAISDRSKELYFNKITIGQYLYYQIQENATTRLKGQVFYRQDYLDEFETIWETQASFHKLLTPTLKKEIRDIIIFYQRRLKSQKGLLSTCELESELKEIVQNGITKTKLIGPKVCPKSSPLFQEFKILSQLNNVEIFDEEGKNKIRPLTLEEINFLFEILNNSEKLTASEINKLLGFKDKYKYNFETFEGNKTRAAFINSGIKIAELSGNDEVEFGKLNGLQKLVTVKEIFKALEIDTTLFDFDSSKTGKELEQAPFYKLWHLIYSYEGDKSKSGIDSLIQLLNEKYGLEKQYAVVFANTVLQEDYSSLSTKAIQKILPYLKEGNKYSDAASLAGYNHSNATTKAENEKRVLKDRLTILTKNSLRNPVVEKIVNQMINVVNAIVDTYGKPDEIRIELARDLKKSSDERAQMTKSIGESSRKHEEITKILTSEFGIANPSRNDILRYKLFEELKDVGYKTLYSNQYIPREKLFSGDIDIEHIIPQSRLFDDSFSNKTLEFRAVNIKKSNATALDFVSSEYGEDAKQQYIERVKQLFNKEGSRTKYKKLLWTEKDIPDNFINRDLADTRYITKKSKEILGELVRNVYTTTGVITDRLRNDWGLVDVLKELNLPKYQTLGMTEEIENRNGHTKVQIKDWTKRNDHRHHAMDAITVAFTKPSYIQYLNNLNARSDKSGAIYGIEQKELYRDDKNKLKFNPPMPLDIFRKQAKEHLEKTLISFKAKNKVTTKNKNTTTKKGGVNTKIVETPRGQLHLETIYGATKKYETKLEKVNASFDVAKINTVANKKYREALIHRLAEFENDPKKAFTGKNSLDKHPIYIDKLHTYAVPISVKTVWLENQYTIRKAISPELKIDKVIDAGVRKILDERLKAYNNDAKKAFSNLEENPIYLNKAKGITIKSVKITGVANAIALHTKKDQFGNELLNEDGVPIPTDFVNTGNNHHVAIYKDDEGNLHEEVVSFLEAVTRKNLGESVVRTTNELGARLVFTLKQNE

SEQ ID NO: 8823 - protein, 962 aa, unidentified
  REGION 1..962: note = Description of Unknown: Cas Enzyme sequence
MLSQVKPELSSPRPIPVADTVLGLDIGVSSIGWALINRPWSETGGQILACGSHLFDPGTDGADADRARGNEQPKNAARRTARLTRRQTWRRARRKRKLITLLVSHGLLPPTESRLRSPQEIHDYLAALDRTLRPNWAHSHEDQQRWPYLIRAAAVVRPLPTFEVGRALVHLAQRRGFLSNRRADAGQSDNERSTMKKAIGDLAHFIAAHEPPTLGAYLASLDPDQERLRGRWTSRAMYEDEFAGIKSAQAGALHISEEAWEEIHEAIFHQRKLKSQKHLIGRCSLIPSERRAPLACRLYQRFRVLQTVNHLRLDDGTGVPRFLTHEERTALIDTLCREGDLTWAKAKKTIGMKKGAEFGAEKEGESKLIGHRTDAKLRAVFGDRFDDFTEDERDDMVDDLRSFRLPDALERRGQRRWGLDAESAKSFADIGLEEGYAALSIAAMQRLMPAMETGTPYATVRRSEFPESFTSSTPHDLLPPVLNAVEDLRNPGVVRSLTEIRKVVNEVVRRFGKPGRIHVELARDLKNPPKVRERITRQNRERERERAAIKERIIKEMDYQNPSRADIEKVLLADECGWRCPYTGREFGMSLLLGRTPQFDIEHIWPRSRSLDDSFVNKTLCYHEENRNRKRSRTPFEAYHGSGEAWDDMLARVRAFKGDHRTRTEKLRRFMAESIDDGFTNRHLADTRYIGSVAADYLGMLYGGQVDGEARRRVFVRSDGLTAWLRSGWGLADILGTDEDGSKSRDDHRHHAVDAIVIAMTDERAVQTLSRAASRADELGKRRAFESVDEPWNGFREAVKAMVDQIVVSCRSGRRVSGALHEATLYSKPKQGSRRVSKELDKLTANEIKAGKIVDKRALRAIEAKLSELSLTNPTDKQIKKVFEQPANAPMVKGHNGKPVRLRKVKVEVAAKPTRIGTGASERFVKTGSNHHTVVWEVLDAKGQVVRWEQEPVSLLEAYRRM

SEQ ID NO: 8824 - protein, 1011 aa, unidentified
  REGION 1..1011: note = Description of Unknown: Cas Enzyme sequence
MKNYVLGIDIGSNSIGWAMVTEEPSQDMENIISGVRVFTEGTENTGTNKEASRNKARREARQARRQHDRRSRRKIMVKKILQKYGLFPLVPEEQKEIFRMNPYELRKEGLDEELTEYEFARCLIHLNQRRGFKSSLKGSAEAKKEASKVVEPAISQLEKDMKSAGARTLGEYFCSLLMKNKRVREHYTRRSMFEKEFDMLWAKQASFKPAVWTDELKKEIKEAIFYQRGLKSQKGLIGKCQLEPDEARCPRASWFAHQFRILQEVNNLRIVSHETGTRRLTDEERNILVEKLLRLKEVKVDEIKSKHLKLQGSEFLTFERSRRKSIKGNPVEYELRKIFGKEFGARADELRSVVYESLINDEDEVFLTKARTQWNLSEEQIKAISEIDQTDGYMRFSLKAIKRLISHLEQGEELHDAIKKEYPQARESQQSDFIPPINAEDIRNPIVSRALSEMRKVVNAIIRTHGKPSRIRVELARETKKTIQQRIDETKENRKRNEEHERIRDILNEEGIPPNHDNIEKYKLLLECEEQCPYTGRHITFPHDLYGDNCQFDVEHIWPYSRSLDNSFINKTLCARSENTRKHNKTPKEAYSGDEYLKIINRIRNFPEEKKKRFYQDMPLDFAERQIRDTSYIATEVVDILKTLGVPVEPTRGPITAELRYRWGLNSILNPQGEEFKSRLDHRQHAIDAIVIALTTRSHVKQLSSIYDFIVRRPQFPCPLEPYSMEAFRGLVQSSIDKINVSWRPERKVSGRITAETNYGIRPDGTFVHRVPLQSITENQIEHICDKRIKRLVEERFRTSGLKPKQAFDPEKNPLYLPSRKSPDGKGPVIKSVRIWEVASNFIPLKDIDGKIYRYVAPGENHHISIFEWEENGEKKRDGYVASRFEVLQRVMRNKKHRTAGEPLESVITKVHPDHPEAQFLFYLCKKDMFMLEEETDDGQKREVLCRVQIIEVQKKITLFDARYAGKSSDDDEMKKYRYIKKADIGEGYKMYLKGRKVNVDPIGRITEAHD

SEQ ID NO: 8825 - protein, 980 aa, unidentified
  REGION 1..980: note = Description of Unknown: Cas Enzyme sequence
MDSYTLGLDIGSNSIGWALLDLSEKPTIVDMGVRVFPEEGKGGSVSKGGQTVRVSQRAKRGVDIRTRRCKDRKYRRRQKLVNILTKAHLLPADILSRIKLLNDIDVNGDDASLRPYELRAKGLRERLELFEFGRVIMHLNQRRGYQTNRKGGDPSEDKSVAEEAKKLLGEIDKSGSKTLGEYLYKVAIGQIRDTSGFVPGKIRNRRAFREMYKDEFNKLWESQEKHLKEVLTDDIDKLRREIFDGLFWQRRPKYKEPGNCDLDGQPKALRACWKARHFSLWQKINNLRTEKRFEEPEVLSREHRTKTYELLSTKKRVSFERLRSELDLNDVMFNFEEGGKKKTIGGDEFLCDVRKAVGEKFWDGLEEKDREFIVDLIAKEDDEKTIIDSIKDKYTLEDNHVKDLLKVYIPEGRSAFSEDALGKLLPYIKDGKRTDEAIDLAYTPESKITKEVCKKVPAIAPIENHVVMKAMCELNKLVNCILSRYGKPREIKIEMGRDLNKSRGEKDKIGREIKKNTERNDRVRDKLKDLEREYNLQIPATRENIVKYRLWEETGETCVYCGTKIHPIKLFGQYQDSEVEHILPKKRSLQPKDYNNLTLCHVKCNRLKDNEIPFEAYGNNPEEYQHLLDRVFKSDMPRPKKVRFVRRTLELDSSVKRFLNDARYIARQAQAHLRKLGVNVFGTKGMATGLLREEAGFDTLLESMAVGRKHEDNRNHCIDAVVVALTTPKILGDLGRGYEHGGDFSLAKAWAALRKQLDEKLPKVNVSYRPRHRISDFFHKETAFGLTPDVRKAFSAGKVEKIGNRIWLCRDRLRYIATRDIADTIKKVSDIEDKLQASASNIKKALLKRLEKEVDINDKNAEIPWAKMVSEEEKKGAGFEGDKTIRLFLRSSTSKMIPVRKIRVTEPHSYMVVIGDKEGKPYKAYPSENNHHIEIVEYGKNERRGFIVTQIEAARRWAEKQPIVQKKHNGGKFLYWLARN

SEQ ID NO: 8826 - protein, 968 aa, unidentified
  REGION 1..968: note = Description of Unknown: Cas Enzyme sequence
MSLGKPEKVVLGLDIGTASVGYGLVKLQEEQYLSETPDGEQENKYKIVVGEIIKTGVRTFQLPEDRQKKSLALIRGSARRTRKTIRRKAQRLKQLVRLAKEFKIIGDNFERDSILKPKKGTNKKEKWDIWLIRKEALERRLSDIELFRVLYHIAKHRGSYFHTKAEFLPEEDDKELNKNKKQEESKEVSEKEKVKKGIRKIQKLLEDSKYKTIGALFYETFKNNRKRNAPDKYEHSIRRELLRDEIVEIFKRQKELGNPKAEEELKLRYIDEVLMHEEGIDEDRLKKMMSRCEFTGELCAPKESYTNERFVLFNELNKLKLVDTKNKNSLIPLDIPQRKKIEALAYKNAEVKFSQIRNELDLQDKLHIRFNTCLYAEKNPEHNKKIKYEVRNGQLQFEEKHKIPIIDIGTGEIKILDKEVKDIFQKKFKPNYKHVTLYYSDIRKELQNLDDFKTSDFRFEKFEKDYTKSAAELGGEAEYIKQFEKEDTFVQLEGYYKIKKAIEKIDGRGKWEQISKNSEILDTIAEALTYCKSDETRKKYLQERGITDEKIIDAALTINMKKLANFSKEALTNLLRFMDGDGKSRMLFNEAKEKCGYGRLQYDKQAKLKPYSGFFEKNPVVARVISQTRKVINAILQKYKGKYTIDQIHIEVATELANSEERKYEISQGQRRYKEAKEAAAERCRKWNIDPDEGQNLLMFRLAEEQNNFCPYTGKAITFHSTCAKNEVYVLDCEIDHIIPMSRSFNDSLNNKVLCSPEANQNKQDRIPFEWFEYMYGKDSKEWAEFESKVQKMYSMPYPKRKNLLRKSWTDKDKEKFLSRNLNDTRYAARHIADYLRKYFDFSKSQRGDIKEVSRIQVRSGGITAFLRHMWGLNKDRGENDLHHAIDALVVACSTYGHVYLVSNLSKEIERKGKNWYKHFGKDKFKPWPTIREDIEKATGKIFVSRMPRHKVTAAAHKDTILSLKENP

SEQ ID NO: 8827 - protein, 1181 aa, unidentified
  REGION 1..1181: note = Description of Unknown: Cas Enzyme sequence
MKKILGLDLGVASIGWAIVNENESKQELVKSGVRIIPIDSDTSTNFSKGISTSKNADRRLKRSARRNNHRYKLRKHLLTEFLKQNNLWNLPQEWFVAKKKEKDSEHEDELVLWLYGLRHKALDEKISLQELARIWYHLNQKRGYIDSRKATGEEEKNTAYVEKIKERSKHLYDNYKTVGSYFYDKLKQNPAYRIKSGNDKENIFLVDDYKLEFDLIWNKQKEYYPEFLNDKNYDEVRNRIIYYKRKLKSQKHLIGDCRFETGHKSMPISSPIAQELRLWQDVNKLVITNQYNEIFYPTKEQKQELFAYLLENERISVKDVLKKLDFPSGREGWRINYEKQITGYVFRAKMKTIFKENNLDFSEYETFDSTSKDFANHKFYLLWHLLYSTEEPKDLKKVLVEKWKFDESIADKLMKLALKNDFAALSSRAARKLLPHLREGMIYSDACKAAGYNHSDSITKEENEKRELTPIAKLKPIEPNTLKNPTVEKILNQLINLLKALNEEGNEFDEIRIELARDLKKNAKERQRITERNRDSEKENKTIEEELLKDGFKRVSRKDKEKYKLWKEFKGVSPYEPNTRIELGQLFDKAMYEIEHIIPKSRLFDDSFNNKTIARANVNKEKDNQTAFDYMKSKGEEAFEQFMNCIKSTQLSQTKKKYLRMEGKDIPEDFINRQLNETRYITSETLKLLKDVCRNVYSTSGTVTDYLRHNWGFGDALMELNFDRVGKEEIEIIEREGKKKQVIKDWSKRADHRHHALDAIVIACTKQSYIQQLNTLNQKHNLEKDLKEIAIKHKAPFGYETVKNSLENILISFKPGKKVATVKVVRADKWGKEPGNIGQRTLVPRGALHEESVYGYNKRQKSIDIRKLEHLEKCAVQWQKEAIQNHIAKYNNDLKVALKNLKKDPIKFNDEELKQVTVFINLPVKRYDLQYTPTNKFNLKAAAYIANENVKRIVEARLKEFNDDPALAFKNLNVDGGNPLYFNKEKGIVINSVRCYTKDEESEKSYPALHESANGITLNEKAGKNINNKKPIDFIIEGNNHHISIFEDENGNRYEIPCTFFQAFQRKSQGESVITKEHPSGYRFLFSIQQNEMFVFDMTKEDLQSAIDKENYGLISKHLFRVLNLASGQYMFLHHIETKIPSKTEEKQRAKGLKLMKQCSAGSVSDLKVKITRTGKIELVK

SEQ ID NO: 8828 - protein, 1369 aa, unidentified
  REGION 1..1369: note = Description of Unknown: Cas Enzyme sequence
MNSKKLYLGLDLGTDSCGWALTDDQYHIIKKGNKALWGVRLFDGANTASDRRMKRSNRRRLDRTKFRLGLLQELFSDEIAKIDPYFFLRLNQSFLQAQDKTVGKYSLFNEKEYTDKEFYRRFPTIYHLRSFLMNTNEKPDIRWVYLACHHIIKYRGNFLMENKSISFGGNDVSYIIELLNQAQEIFNELYEEDEITISISSDKIENLLKSIEKEKSSKKIGELLSSGLSIGATKVEKTFVKAISGQYFLLSDLFSNDELAEFDKNKVSFSEEKYDEEDYPLISDYLGDDIEFLNLIKQIYDYFVLWRLLQGKSSISESMVSIFDEHRQDLNAFKRIIRKYFDKEMYSQVFRSNSVKGNYASYVRSSITENKKISVAGCTTEEFHKYIKKVLNTISPSNEDQDFTMIMTKLDNGTFLAKQKSKQNAIFPYQINENELKTILHKAERHYPFLLEKDVNEWTFTQKIVSLLSFRIPYYVGPLNDHHGQISDKYHSWVVRKEKGRVTPWNFEQKVDLVQSEERFILRMTNKCTYLKGMDVIAKNSLLYSEFSLLNEINALKISGEKITPEVKRLLIDKLFMKQKKVTKRSIIRFLKAEGIANLNSEEDITGVDDPIKGSLGSHIVFSQIFGSITDSNRAMIEHIIFNLSIFEDSKTAINRSCREFPSITEEQKKRLKTISFKGFGSLSKELLQDEIYHIDGNGEVHSIISVMRDSSATFMEVLNDPRYRFIEKITSFNEGKEDNSNWKKSIENSYTSPGMKRSIIQAMLVVEELKKITKQPINRFYVECTRERGKKERTNSRKRLIEHLYKNIKIQTDELKQMLVSMKARTDSELRSDKLFLYYTQLGKCMYTGQPIDLDQLENYDIDHIIPQSALKDDSLDNRVLVWGNSNKEKGDTYPISSDVQRKNLHFWMHLSSLHLISGKKLDLLTRQYELTDDEIGSFINRQLVFTNQAVKTLVEVLKKTNPDSQVIYSKAKNVSEFRDQFDLLKSRDINDFHHADDAFLNVVVGNTYHTKFGYDARRVVQKYRLEKESLNTKKLFNRDVIGAWKADGSSIILVRKTLQRNDKLVTRRTYDGTGEFYNATLYPKAEGLVPLKMKEGNPLLLTERYGGYKSLKNSHYCVVSSVDSKGNTQITIEAVPILYSKQFRDVTSIEKHLSQVMGLSSPNVLVSHIGINSILSYDDTLIRIVSSVSGRRLGVNISSQMNSHTFVIGYSRIVSKHKEMITQNESISNYDLSYFVVTKSQDQTQSKDKILTISDNIKYYDIIMNHIKSPLFAGLSNMKSIGDRLFFARDSFIAMNVRIQALILSEMTKLVQNKGNTANLELLPNLAANSGKLMISQNITKNKVKIIDQSVTGYYESVRWSHNPNAI

SEQ ID NO: 8829 - protein, 1074 aa, unidentified
  REGION 1..1074: note = Description of Unknown: Cas Enzyme sequence
HKELTYELKQEIRDIVIFYQRRLKSQKGLISFCEFESRQIEVVVNNKKKTITIGNRVIPRSSPLFNEFRMWQMLNNLEVSGKGWKNKKKQQNSTQGLSTEQVDPHEFFCKRELNQEEKELLAKELSIREKLSKSEILKLLFDNPKELDLNFPSVEGNRTCTVFYKAFGDIIDRTGHKIDFKKSASEIINTVKEIFTSYSWNTDILQFNSNAKDLDNEPMYKLWHLLYSFEGDNSNTGNENLINKLTDLYGFGKEYAAILANVTFQDDYGNLSAKAIRKILPYLKEGHKYDIACKYAGYRHSKNSLTSEELCKKVYKDHLDVLPKNSLRNPVVEKILNQMINVINTIIDVYGKKDEKGKVIEKPFDEIRVELARELKKNAKKREELSIAIGKTTAENEEYRKILAQSPFNLTYISRNDIIRYKLYKELEQNGFHTLYSNTYISPIALFSGDFDIEHIIPQTQLFDDSFSNKTLELRSINLEKGNKTAFDFVIGKYGETGNENSLDNYLNRVESLHKQGIISKTKFKHLTWKESEIPEDFLNRDLANTQYISKYALAMLNTLVPRIVATTGSITESLREDWQLVDIMKELNWEKYKKLGLTEEVTKTDYNGNKVRIQRIKDWTKRNDHRHHAMDALTVAFTKDAYIQLFNNLHAAMIPNSATYALKQLYIENGRVKPPIPLNEFRAEAKRQLENTLISIKAKTKIVSQNINKTKKKNGINIKVQLTPRGQLHLETVYGSQLQYVIKEEKIGTTFNEAKILTVSRHRYRDALLKRLGDYDNDPKKAFGGKNAPSKKPIFTDETKTEQLPEKVKTTTFETIYTIRKEVSPELKLGKVIDVGIRNILENRLKEFGGDAKKAFSNLEENPVWLNKSKGISVKRVIISGISNGEPLHEKRDKDSKPILDGKGRNIPVDYVNTGNNHHVAVYRDADGNLQENVISFYEAVTRHNSGLPVIDKDYKADEGWMFLFSMKQNEYFVFPNDKTSFNPKDVDLIDPENYDLISQNLFRVVRFSKVFYGSSAIRDYWFRHHLETNANVEKVKELRDVSYKVIKSLQYFEGMVKVRINHIGQIVGIGEY

SEQ ID NO: 8830 - protein, 1574 aa, unidentified
  REGION 1..1574: note = Description of Unknown: Cas Enzyme sequence
METKKILGLDIGTNSIGAALINIPKSFDNFGKEGEIEWLGSRILPTDAASLQKFESGGQVETKAANRRLLRGSRRLKQRYILRRTRLIQVFKILGWLDESFPENFKDEIKKDENFKFKMKDYLKFSDKTIEEATKLLGVENKKGELKIPEDWIIYYLRKKALTEKISLKELARIIYMFNQRRGFKSSRKDLKEEKIEEKKWVEILKIDSVEELKEDGIKRKDGKLTFIIKAGKYEWKVNKRRKPEWEGKEFQLLFTEKNGKLNDAPKVPEKDDWELLMTALDNQIGKEFPGKYFFDKLVEDKNYKIRQIAVRREKYKKELETIWNTQLELRKNENKEQEILNENKIEIIILTLYKHNEAKQKELKEKGLLHIISEDIIYYQRELKSQKNSIAGCRYEKVKFKTKEGEEKTTGVKVAPKSSPEFQEFRIWQDIHNIRITENEQIIDGKKKLDVELNIIDNSIKEKLFELFDKTAELTQKNIFDEINKVCGLKLNKDTHKINMFANREELKGNETKEYFRKAFKKINLDENKNKIPYDFKGEKLTATEICEKLISDKVLLQKLWHILYSISSSDKEKSEKGIKTALSNPKNNFNLPEAIIKHLSRLAEIKKQYASLSSKAINKLLPLMRCGTHWNDKEIEQKAKSFLEFKQTAKYKELGEKIKSDLTNLEALEDFQALPPWKAGYVIYGFHSEKESTQKYSSYNEIDVMKLIPNNSLRNPIVEQVIREAMFLVKDICKEYGQPDEIHIELGRELKKNAKEKEKIANRNAKKRDEKDRIKKMLYELMNDKEFEEYNEDEKKVISKFVTKPNPESPIDIEKFKIWKSTAGKLDEEVEKYFTSKDTKEKIPTSAEIKKYALWLSQKCKSPYTGKIIPISKLFTNEYEKEHIIPRSKLKYDAFDNLVISESGINKLKGNLLARAFIQQKGNDKPIMFEGKEYTILTEEKYLSHCKEIFEKTNYKKYKNLLCEEIPNDFISRQLNDTRYITRKLSELLYPVAKEKEGIIFTGGSITSELKNEWGLNKIWKEILLPRFQRLEKITGNTYIINDKDEYGNPIVHIQVKENKDFELKRIDHRHHALDALVIAATTREHIRYLNSLNAVDNDEELKNVKLKLVKGKIREFHLPWKDFTEKAKEKLNETIVSIKANNKVVTKPKNKYLKWKQKEDGTWEKVLFKQEPNKKWMAVRKSMFKEPQGAIYLKDIVTKRFLSTKEKMDIVRLQINRMKVQNTPAQKHTSYIYDQEIREAIKYIIKLSGGDLVAIENYFKKNKIKDINGEVINTVKVAVFNEYAAKRVSLDKSFTHDKINKIPYAENGKSIIGNLLHDHLTEYENYAEKEKELKKKKEDELTQEEKEFLKNPIPEPFAGEGLDRLTKKNKGKPINKVTIYERKDPDDKFKNTYYETDKGGNVFYVMYENENFERDESKSISVLKAIENKIQNKPVYGEDKENHKTIVLSPNDLVYLPTKEEIIKIKNKEENPINWNDKKQIFERIYKVVRSSKKECYFLKHNIAKMIVQYDAKIGYGEIGSQNYSESTINFPKYDKEGNDITETSTSIKDTCIKIKVNRLGNIVEINGKKS

SEQ ID NO: 8831 - protein, 1437 aa, unidentified
  REGION 1..1437: note = Description of Unknown: Cas Enzyme sequence
MKKILGLDLGTNSIGWALINQDVEKNQGNIINIGSRIIPMSQEILGEFDKGNSISQTAERTGFRGTRRLRERHLLRRERLHRVLNILEFLPKYYANQIDFEKHLGQFIDNSEPKLAYDENGQFIFKKSFDEMLADFATHQPKLVAEGKKVPYDWTIYYLRKKALTKKIEKEELAWLLLNFNQKRGYYQLRGEEEEETPNKLVEFHELKVIKVEESSDKKKNEIWYNVILENGWIYRRSSKIPLFDWSGKIKEFIVTTTLNDDNSIKKDKEGKEVRSFKAVNSEEDWIAIKKSTENKIEKSHKTVGAYIYDTLLQSPNQKIKGKLVRTIERKFYKSELQTILIKQKEFHQELQNESLYNTCLEELYKYNDAHKNSINKKDCTHLFLNDIIFYQRPLKSKKSLISNCRYESRSYKKNDGTLGIEPIKCIAKSHPLFQEFRLWQWLKNLKIFLKDDDKEVTFDFLRTEDDWVNLFDWLNNRKEIDQKAFLKYPAFNLKKETDKYRWNFVEDKSYPCNETHAQIKARLIKVKNVPTDFLTKETEEALWHILYSVEDKHEIEKALNTFAIKNNLGYDFIEQFIKYPRVDKEYGSYSVKAIKKLLPLMRMGKYWNEEKIHQQTEERIGKIITGEYDDKIKNRVREKAINLTDIKHFKGLPLWLACYIVYDRHSEEGEIKKWQTVNDIQLLEQHSLRNPIVEQVINETLQVVRDIWKTYGSGKEKFFDEIHIELGREMKNPADKRKRITNQNTENENTNLRIKALLAELLNDKNIENVRPYSPSQQELLKIYEDGVLSAENEIPEDILKISKTNQPTTSELNRYKLWMEQKYRSPYTGAIIPLNKLFTPDYEIEHIIPQSRFFDDSFSNKVICEAEVNKIKDKQLGLEFINNHHGEKVALNFGKTVEIFSIDSYQDFVKTNYQKNRGKMKKLLLEDIPDKMIERQLNDTRYISKVVKNLLSNIVREEEEQETTSKNVLSSNGSITSILKLDWGLNDVWNEIISPRFMRLNEMTNSNNFGYINPNTNKFLPKVPLELQKGFNKKRIDHRHHAMDALIIACASRNHINYLNNEYAKSDKKDIRFDLRNKLRRLENIEITDKKTGERKKIQVAKEFLKPWQSFTEEVKEILQTTLVSFKQNLRVINRTVNNYQKWVKQNDGTLKKENVKQTKGDSWAVRKPMHKDTVYGIISLDRIKVPKDKILTATRKNLDTSFDLKRIETITDTGIQKILKNCLTSRGNNPEVAFSPEGIDDMNKNIFKFNDGINHKPILKVRVFELGSRFPVGIKGNKNNKYVEAAKGTNLFFGIYQDEQGKRNYESIPLNIVIERQKQGLTSVPEKNEKGDSLLFHLSPNDLIYVPKEEEKENKNLNNFSSFAKECIYKIVSFTGKRLYAIQNRIAAPIVDKVEFTQLNKLEFTPEKISIKEVCIKLKVDRLGNIIEANGNKI

SEQ ID NO: 8832 - protein, 1355 aa, unidentified
  REGION 1..1355: note = Description of Unknown: Cas Enzyme sequence
MKKVLGLDLGTTSIGWAYVLEGENQKESEIKQIGVRVNPLTVDEQTNFEKGKPLSTNADRTLKRGARRNLDRYQLRRENLIEVLSKANIINTSTKLTEDGKHTNFQTWELRAKAAKDRIELNEFARVLLAINKKRGYKSSRKAKNEDEGQVIDGMGIAKILYEENLTPGQYVFQSMLSGKKAVPDFYRSDLQNEFDKVWNFQKQFYPEILSDEFYKDLKGKGQRATSAMFWTKYKFNTADIKGLEDDLKNVNTIKFDARTQKKLQAYKWRNDGVSKQLDKEKVAYVLTEINNNLNNSSGYLGAISDRSKELYFNQLTVGQYLHNQLLENRHTSLRNQVFYRQDYMDEFERIWTIQAQFHPELTEKLKEEIRDIVIFYQRKLKSQKGLISFCELESKEIEMDGKKKTIGMRVAPKSSLLYQEFKIWQNLNNILIKKAGSKKRAVKKDNQTSIFEEDKEIFELDLGAKQQIFDELNIKGNLTSKSVIELLGYKPQDWLMNYAQLEGNRTNQASYNAYLKILEIEGYNEDLLKLSDADEINVKDLKTPASEIKMMVKSIFNLLGINTEILEFDAELEGKEFENQASYQLWHLMYSAEDDTKKHSEEDKLVYGNENINLKKQLCSKYGFKPEHARILANITFQDDYGNLSTKAMRKIYSFIKEHKYSEACELAGYRHSKHSLTKEEIENRELKPRLDLLRKNSLRNPVVEKILNQMVNVVNTLIDKENKQLQEQGKEPDFHFDEIRIELARELKKNAAERAELTTNINAAKIAHDKINKLLQTEFGIKNPTRNDIIRYKLYEELKNNGYKDLYTNEYIPREILFSKQIDIEHIIPQSKMFDDSFTNKTIVFRKINLEKADKTAFDYIESKFGEESLNAFQQRIEKLYELGIKNKEEGISKTKFQKLLKRESEIGDGFIDRDLRDSQYIAKKAKEMLFEITRTVVTTSGQITDRLREDWGLINVMKELNLPKYRALNLTEMEERKFGQNVEVIKDWTKRNDHRHHAMDALTVAFTKHNHIQYLNYLSARKNEKHKLHNNIIGIETIETVVKVDDNGDKKRVFKEPITNFRQIAKEHLETVIISHKAKNKVVTKNNNKISGKEKPQEVLTPRGQLHKETVYGRYQFYEQKEEKVGAKFDKTTIEKVANPLFKQLLTQRLEANGNDHKKAFMGKNTLDKNPIYLNEEKTKKLPEKVKLVWFEEDFSVRKDVTPENFKDQKSIDKVIDSGVRKILENRLKEFGGDAKKAFSDKENNPIWLNKEKRISIKRVTISGVKNAEALHHKKDHFGNPILDKSGNKIPVDFVSTGNNHHVAVYRDENGNLQEKVVSLFEAVARVNQGLPIIFNNPLEIIDIVIAKGIED

SEQ ID NO: 8833 - protein, 1054 aa, unidentified
  REGION 1..1054: note = Description of Unknown: Cas Enzyme sequence
MNPVSALLKWSDHPFYKEQVVLGLDIGIEGIGIFVRKGPKTVYARTFIVTLPESAPLAGRRQKRAMRRSRTSARHRDYLFRLWCKEFGLPVVDGDAKARTDAWAIRYRAITKSVASAEAVSVALRHCLSRRGFSYHRDGDAQFPWGDEMDYTPIAKWLNNAFFDLKYANELKWKLDGLDWMATEKKSRVISEAIDACVEKYNAGPLVAHIKAHFDAPIHRRPRAWGIDLPRDLIEQHAAEIIHRHAKFFGGTDKAELARIAYFKILNYARNKPGALAERKVKKCPYLSKLDEGHAGKILCAMASDPAVRRLNLVEFLAQRGFADSGGRKLKANSDVFAALDKHLCDDSEAIASSGTGEKKPRPKLGLVQLKKIFTEAHGVKLEKDAEGLNGYYFEQLKDIVTPRMSTLSGRANLSEMTAKILLERALAHGWDSIDLKDTWGDFFIWRRDVDRGIGHYPQVEFLMGRRSKKGVQAVPGVIRRIFEKLAPELGQDKPDVVIAESVRDVPRNTDHRKARERKMIESREARKELFEKHGLEDGGTDQDRRRVSLYEQQKGLCPYTGRELGSPLNPALQVDHIFPRERGGVSEMDNLVLTFSEVNRTKAKRTPYEARSDFPEFTKFAQSCRWGAKKLELFLRKEADIPDWKNLTRTSQIARELREEITQWLGIKGDAEKIRARIGTPSGLQTAICRRSKAWRAKLPEVDGKKDRTNMRHHLWDAAVLSHIPPGEGTQSVAFGGIFYQEKEDKLGDLGWQALDLGPDLLAFEAATARQCLVEKPRQRRSKQSRTEETIYGMNDQGRLIVRKALIDGLGMVNKNAGKWLEHSGIPAEQLPLRRLENFLEQEADAKRLELKSGSFVDKVRIVAPVESPVSMLPHRNRQGDVIGWKIMGSPYARMEIWKAPDLDKKGRPVFQRRFVPNPRGLAALHRLAKEGKGPWWKQKTAKDKSSLRREVIGDPLAKFSKKLTSIQLGDLLFVPYNGLGESMAPGWNLKMMKFDRPKADHWVWLRVSALKTSGQIETTISEKPAVETIKAIKPSSVSVIAAYRQFALEEKG

SEQ ID NO: 8834 - protein, 1060 aa, unidentified
  REGION 1..1060: note = Description of Unknown: Cas Enzyme sequence
MGLPYRLALDLGTNSIGWCMLRLDMSATPSPAPVAVIRAGVRIFGDGRDPQSGASLAVSRRDARAMRRNRDRKLARKRRVIDALVQTGLFPGDPADRRALESFDPYVLRATGLDRELPPHEFGRALFHLNQRRGFQSNRKTDGDDSDGSLMKTAIKDVRTALAANGYRTIGEWLAARHAERATVRARLRGTTARDKHYDLYFDRAMIRHEFDTLWDAQHGFNPEYYTQAKRDAIAEVLFYQRNLRPVRAGRCSFEPDRERAARALPSVHRLRIYQEVNNLGIDSGTFTYTPLTRDQRDLIVNKLEHQKTLSFDAIRRALKLEGSPKFNLESAKRKDLKGNATSYLLGQDEHVGSTWFSLSAQDQDHIVERILEDEDEEKLCAWLTETHGLTDEAALATAGTRTALTKLSPGYGRLSKEATTRILPHLASDVVTFDKAVVAAGYASHSALTHTAQTGEILSELPYYGQYLQRHVGHGTGLATDLPADRYGRIANPTVHIALNEVRKVVNELIAEYGAPEQVIVEVVRDLKLTADKKADIAKDQAARQTENEAYRAQIKSLTGIDASRPDIQKMRLWVELNPSDPLERRCPYTGEQISIARLFSPEVEIEHILPFSMTLDDSMNNKTVAVTRANRDKGNRTPFDAFGESPAGYDYEAILDRAHLMPKGKAYRFGPDGYARWLRDDKDFLARALNDTAYLSRIAKEYLELIAPGQVWVVPGRLTGALRRHWGLNGILHDDAEKNRADHRHHAIDAVVLGMMDRASLAQYAKASGRGSSVDDDVAKRASMEPLKDFRARVSAVIGSIIVSHRPNHGHQRQMNNDTNYGLRKDGIVATRKPLDGFASPAAIESATFADPALQERLLRHVGSTTGTEFKTRIASFAQEHRTRRARLLERLGVIAIPAPANAMHRSPARSKARDDNSARGVKGDSNYCIEIYTAPNGKWKGDVITTYEAYRIAAEHGDEQLRDPRQTQSGKPLVMRLMRDDIVAVTIDSERQLMRLCQFKAAGQMSFIGLTEANADARVRAGEITYLSKSPGALRDLNAVKVTVSPAGRAKAHRLPR

SEQ ID NO: 8835 - protein, 1021 aa, unidentified
  REGION 1..1021: note = Description of Unknown: Cas Enzyme sequence
GVRIFDSGRKPKDGSSKAVDRRDARQMRRRHDRYLHRRNQYIKSLVSCGLLPESEVERQKLVSLNPWRLRSAAVEIELAPFEVGRALFHLQQRRGFKSNRRVDDAESRETETTGLKGAIHEFAEHLDGRTVGQEIWKRIQNGEPGRARKIGSGQSERYAFYVDRAMVAHEFDMIWKIQSDFKPELYSEEARLLLRDNLFFQRNLLPQVPGNCYFEPEELRMPMAYETAQLFRLYQEVNNLRIKDIKTLKTRPVSRSERDRAIELLLSVKEMKLASFRKKVLGKEFDDFQFTLETTNRPALKGDQTHAILGKNEHFGSDWNALDLDVRDEITHLIAFESNERTLIDTLIDKYGRSIEEAQTISQLHLPDEYLRISQKAGRRILAQLIDGWDIDADAPLTYDKAVIAAGYRSHSVPPNSKQATGEILESLPYYGEILAQYTAPMPKSKVPDEARFGKIGNPTVHLGLNQVRKIVNAIIKRYGMPDQIVVEVSRELKNAQYTRTQIERDQKDNRERNERFAKALEKLGLPSTADNRLRLRLYEELGGVKQCVYSGKTISVAQLFTHEIQIDHILPLSKTLDNSASNKVLAFHSANRFKGNKSPYEAFGSSPHGYDWEEILSRAKALPANKLKRFSPEAVSVVDGFLARQMTDTQYLARVTQQYLKSLLTVDVWSTPGQLTGLLRGKWGLNNLLSIDGTKNREDHRHHALDAAVIAVTDRSLLQRMSKSSERAVLKDLDKDFDDFPDPWETFRSELAEKVERIVVSHKPEHGTEAALHNDTAYGIERLGKPGEPSVVRHKIPLTSVDEKHLGSLKDANADLTILDVDKPFLKRIEDALLISNSPKERVENLQTLAAQSGRRSVVLREVISVIPIYKKGERDSVDGKPYKAYKGDGNYCYEIFEDETSKWDGRIISRFLANSREFKSFARSSKYNRETFEGEKLVMRLAPGDTLLMDGSKTVYRVQKISLGNVTLADANESNVDARNRDKDDPFKFISISPNPMRAKRVRKIFVDELGQVHDPGKN

SEQ ID NO: 8836 - protein, 1388 aa, unidentified
  REGION 1..1388: note = Description of Unknown: Cas Enzyme sequence
MNNKNYKIGLDIGSNSVGWCVTDENYDIVEKKNKKLWGVLMFDEQQKNVDRRKYRGARRRIERKRNRIIYLQEIFKNEINKVDPTFFGRLDESFKQDEDRKYHDKYTLFIDKNFNDKTYFKKYPTIYHLQKYLMESNKKEDIRLIYLAIANCIKDRGNFLNSQEPEKFNVSFDKESAKTNILDAINELTNYLNDDDNLKFDYSNENVLVDDFDKILKDNYEKTVTDKLNLYKDIFVDDIKNNKYFKKSLYEFVLKALSGKSISFKDYFVNNLEDESTKLDYKISEEQEPQITKIMSEFKDPDYLINAINKLSEIYQGLLLENIFKGSIKSLPEALVNRFNNYKQDLKDLKRLVSALPNGYELYKKIFIDSSEIIDNERAIPNNYVHYTSSYREYNENGKISHNKTNTSKCSRDDFIDYLNKQFGFRDEKDRAKNPELYDLVHKPSFLLKPKTHENSVFPYQLKYQVIKTIIDNQKKFYDFFNEKDDDGYINEDKILSILTFRIPYYYGPLTINNRYVKEDKENVASKWAWLVKEEGKEQVKIRPWNYMDVVDDGTTQNNFIQKMQSRCTYLKNEFTLPKDSIIFQKYLVYQFLNYVRINGNFYFNAEEKDKIIENLFLKNRKVSKKQFIQYINTNILKVNRDTESDIAFKNGALSEDIPSLSSLYDFKKVYDSLDEINKHEKEIEEIIKDIAILQDKDSLSTRLKNKYHLNDSQIKIIKGFNYKNFSSLSMRLLNEIEPCNKDGEIIHKTILTLLKECNSKDSQAQSLMGLLTMSPDSLAYEYDFKTIIDKENGNDTSDDLNEFVDELYVPVSSKRAIKQSCKIIEEIQKILKLDNFDNVSFAVEVTRENQKDKKQKDSRYKEMKTILNKIKVIKDSPEENVIGSFNELEGKDEGKVRSEKYYYYFMQLGKDIYTGEPIDYDKLSDYDIDHIVPQSLIKNDSIDNKVLTKKEFNEGTKKNIYPFFNEIKLFKGNNNDAKKFWKTLLDNKLISSKKYNALTRTVELSDEELEDFENRQKTTTDQSVKGFMSVLKDWYKVSDKNIIYSKAGNVSYFRNKYEIYKSRNINNYHHAHDAYLNIVIGNIVANSYKNTYIRFKASHGDSFQDYLIRNAYSINPERIIDNYFDNKQKDLLVKIKENIFLTKNIFTKKRTYVGSENVLSGVTLYPANGGNSGIPIKNDLDTSKYGHYDSYSFSTYCLLKSKIKEGEYCLEAVPRMYLKNVNDYFAKDPKFKDFEIYIDNLKVNTKMKIGNKSFIITGRSGNKYLTLNSIEKAFVLEDINKTQGLLNTIHNCEKLIRYFSNIIIKINDTSIKLLSSNDYIKNDNNSLKTINDSFKGNYFMTNEFIKNPEYDQKDKNKKNYALYLTCEELNVLYEYILSLYERPCYMK

SEQ ID NO: 8837 - protein, 1224 aa, unidentified
  REGION 1..1224: note = Description of Unknown: Cas Enzyme sequence
MKKVLGLDLGVGSIGWALVNVDETHAPVNLLGMGSRIVPLTTDDAKEFTQGNAASKNQKRTQKRTARKGYDRYQLRRQQLTDKLRSLGMLPDERLIKLPVLELWELRANAATPSYKLSLPEIGRVLYHINQKRGYRHSRDEDSDKQQRDYVAAVNNRWKEIREEGKTIGQHFANKLKETEIISEKGKFYTYRIKEQVFPRGAYMEEFDRIVEAQKVFWPDIFTDENVDELRNRIIFFQRPLKSCKHLVSLCDFEVRDFVKKDHSGNVITDRNGNQCHILAGPKVAPKSSPLSQESKLWEEINNIRITNSKNDEFFISQEKKVEIYRFLSENEVMKANDLKKILGISANDKEWTIDKAVSKGLTGNTTRTRLRKALSHFKREDLLRFDMQLTDSSFVNPETGEILHEIDPKCEQEPLYRLWHCIYSIDNKEDLAKALENQFGITNKEAIDNLNKIDFVKQGYGSKSAKFIRRILPYLQNGAMYSEACEIIGTNHSGSLTKAENAARQLLQRIPQLNKNELRQPVVEKILNQMINVVNAIAEKFGSIDEIRIEMARELKLSQEARATTAKSIRDREKINLEYAGKIREFGIVPSKNKILKYRLWEEAGQRCFYCGQTISAQEFLSGFDSDIEHIIPKSRLFDDSYSNKACSCRKCNSTKNNMTAYDFMKAQGEDKFKDYCDRVANAYKEGKISRTKRDRFMTPAEKIPKDFISRQLVQTQYISRKAMEILMQICHDVYASSGDVTAYLRRIWGYDEILQRLNIPRYREGGLTEMVTYEHNNQQHTEERIKGWSKRLDHRHHAIDALTIACTRQNIIQRLNNLNAQESSGEDKLNLDKWTMAQAHFSVREVSDAASRILISFKSGKKVATPGKRYIYRNGKRILAQENIIVPRGALSEESVYGKIRTIEKGIAINKLFDRHEDIFQPLIKKIIEERISEFDGNIKAAKASLKKRPLYLDKEKTIELKYGSCFKYEYVIKYPLNTLRAKDVEYIVDENIRETVSDRLSQFNGNVKEAFKEPLYTDGTSPVLIKTVRMFTGLDAVVPVRKDSDGKNIGFVKTGNNHHVAIYKDKEGKYQKHTVTFWHAVERKKYGIPIIIEHPDEVWQKVLDLDAPQSFIDQLPSPDWTYVMSMQQNEMFILGMGDDEFNDAMSAKDYRTLAQHLYRVQKVCSKDYYFRYQYETQLDDKEAALSMKKFYRVTSLSSLQSLNPKKVSINLLGDISLHNII

SEQ ID NO: 8838 - protein, 1087 aa, unidentified
  REGION 1..1087: note = Description of Unknown: Cas Enzyme sequence
MHRYAIGLDIGITSVGWAAIALDAEENPCGMLDFGSRIFTGAEHPKTGASLAAPRREARGARRRLRRHRHRNERIRRLMVSGGLISQEQLESLFAGQLEDIYALRTRALDEQVAREELARIMLHLSQRRGFRSNRKGGADAEDGKLLEAVGDNKRRMDEKGYRTAGEMFFKDEAFAAHKRNKGGNYIATVTRAMTEDEVHRIFAAQRGFGAEYANEKLEAAYLDILLSQRSFDEGPGGDSPYGGSQIERMIGTCAFEPDQPRAAKAAYSFEYFSLLEKLNHIRLVSGGKSEPLTDAQRKKLIELAHKQDTLSYAKIRKELELNEAVRFNSVRYTDDATFEEQEKKEKIVCMKAYHAMRKAVDKNAKGRFAYLTIPQRNEIGRVLSTYKTSAKIEPALAAAGIEPCDIAALEGLSFTKFGHLSIKACDKLIPFLEKGMNYNDACAAAGYDFRGHSKDGRQMYLPPLGDDCTEITRPVVRRAVSQTIKVINAIIRRYGTSPVYVNIELAREMSKDFAERNKIKKQNDDNRSKNEKIKEQVAEYKHGTATGLDIVKMKLFNEQGGICAYSQRQMSILRHFDPNYAEVDHIVPYSISFDDRYKNKVLVLTEENRNKGNRLPLQYLTGERRDRFIVWVNNSVRDFQKRKLLLKEELTPEEENDWKERNLQDTKFVSSFLLNYINDNLLFAPSVRRKKRVTAVNGAVTDYMRKRWGISKVREDGDRHHAVDAVVIACTTDALIQKVSRYESWHERHYMPTENGSILVDPATGEIKQTFPYPWAMFRKELEARLSNDPSRAVADLKLPFYMDADAPPVKPLFVSRMPTRKVTGAAHKDTVKSARALADGVAIVRRPLTALKLDKDGEIAGYYNKDSDRLLYDALKARLTEYGGNAAKAFAEPFYKPKSDGTPGPVVNKVKLTEPTTLSVPVQDGTGIADNDSMVRIDVFRVVGDGYYFVPVYVADTLKQELPDRAVVANRQYNEWKQMSDDDFVFSLYPNDLVKVRHKRGMKLTKCFEESTLPATMDCKESMFYYISSCISTGAICCITNDNTYAIKSLGIKTLESIEKYTVDILGEYHPVKKEERQRFNTKRG

SEQ ID NO: 8839 - protein, 1018 aa, unidentified
  REGION 1..1018: note = Description of Unknown: Cas Enzyme sequence
MGFSLGLDLGVGSVGYGLIDNEDGTILEAGVRLFSSIDPDNNQVRRGSRQARRLNRRKVHRLTRISQLLEENGFFRGEVMAPTPYHLRVKGLTEKLSREALYVALYNLAKHRGISYLEDVELDEADSSSLGYNIELLKEYYPCEIQLNRYELYGQIRGIIEICAEDGEHELLVNIFPTPAYEKEARAILLKQGEFYSEINAHFIESYIKILTDKRLYYVGPGNEKSRTDYGIYRENGETLENLFDILIGKCTVYPDERRAAKFSYTAQLFDFLNDMNNLSIAGEKLTEEQKCLIYREVMSSKTVNMIKIIMKVTGCIKEDIKGFRVDSKNKPDFHTFEPYRKFRNKMKEINVDITTWSYETFDELAAQLTLSTEYQQIIEQIKKVDLSLNEEAMDAIADFRKKNGTLFSKWHSLSLKAMHEIMNDLWSTPKNQMQLYTELGVFRSNKDLYKGLKYIKKEMLLEEIYNPVVRGSISESIKVINMILKKYGALDKIVIEMPRDANEKEEKKRLEQLNKENKNRKDCAIKAAQEEYGFTEEAYRNHRDLNTKLRLWYEQGKRCLYSGEMIKVMDLIMNPNRFDIDHIIPKSVSFDDSLNNKVLCFASENRLKGNQTPFRYFKRKQNSQWNYEQYKSEIVKLYNDGKGKLSRTKMDLLLFEEDINKYEVRRHFINRNLVDTRYASRVVLNTLQDFMSVNYPNTTVGVVRGKFTAQLRKHWNIKKDRDESHSHHAIDALTVACVPHLSLWKKQDIFKEEDIRVDDYAVTVNEETGEIIEDSYNQLAYQPPFEKFFSGLQRVPMECRYSYKVDRKFNRQVADATIYSTRQGVVKETKGEKKFVLDPESKEHYVVAKIKNIYDDADAKRFMDRYKKDKTQFLMYHHDPQTFAILESAMQQYSKEKNPFAMYREEHGPLQKYAKKGNGPEIRSVKYFDSKLGNHIELKQEHAKDRKVVLQSLNPWRSDIYYNKKENRYMVAGIKYADLSYQKGSGEYGISLQKYQQVLKSEKIDLRVEELQAILNG

SEQ ID NO: 8840 - protein, 1219 aa, unidentified
  REGION 1..1219: note = Description of Unknown: Cas Enzyme sequence
MEKRILGIDTGTNSLGWAVVEKEEDGTYKLLKQGSLIFQEGVKIEKSNESSKAADRTAHRASRKHYFRRRLRKIRALKALMKYGLCPQVPEEALHEWHVNKKYPMSEALIAWQRTDDSLDRNPYAYRHICLHDELDLDNEAERFMLGRAMYHLAQRRGFMSNRLEQNDEEDNETGKVRKGISDLTQEMEKAGCEYLGDYFYSLYKKGNTERIRDRYTDREEHYQKEFYAICAKQHLTQEQTTDLEKALYFQRPLKSQRQGVGRCTFEKRKPRCADSHPDYELFRMLSFINTIKVQGPNDICLRRLNKEEQEKAEKKFYRKSPKPFDFEDIAKAIAGKDKYQYIKDEGDKPYKFNYRLTHSVSGCPTISSLKAIFGEDYQEGIAEVYKLSCDKTPRQMTDDVWNVLYSFPDKENLKQWAKDKLQLNDDMAERFSKIRISHNFASLSLSAIRKILPWLERGMIYSHAVLMAKIPDIVGKETWEQHHATITDNLLELIDNFNPEDTSLQGTLEFCIKDYLLNNFNLPAGAADKLYHPSMIETYKNAKKNSQGIYQLGSPCTNAIRNPMAMRSLHKLRKVVNALLREGIIDTNTEVHVEYARELNDANKRKAIAIWNKKRENDRKKFAGEIKRLYRDKCKKDIEPTEDDIKKFQLWEEQERLCLYTGKQIEICEFIGANPEYDIEHTIPRSVGGDSTMENFTLCSKRFNRDVKKAMIPTQLANHDEIMARISGWKDKIERLRKEADKKRTHPGMTKERKDELIQQRHLLRLELEYWQGKYKRFTMEEVPEGFSRRQGAGIGLVGKYAGLYLKSLFHKKDDRTKTNVRVVKGTTTAEFRKMWGIQSEYEKKSRDNHIHHCIDAITIACIEQGNYNATAKYYQQLEEYERTKAAKPTFPKPWPTFTEDINALAEETLVVHDTPDNLPKKWKKKVKTQNGRKLTGGDSVRGSLHNETYYGAIERDGNIRYVVRKELSKFQKASEAENIVDDAVREKVTAAFKEKGFKEAIAEGIYMNKEKGIRINKVRCYANSVRNPLHIRQHRDVSRKEYKRMFHVQNEGNYILAIYEGAVKGKCKRGFELVKTIEAANFFKQSTDRDDFPALIPETSKEGYPLKYRLKIGQHVILYENSPQEIDLNDNADVCRRLYYITGLSYLPVSNGYGTIVIRHHQEARMAKDIKAKNGAYKTNEEHRSAIIMLHTQFNALVEGRDFIITPLGEIKLTHEI

SEQ ID NO: 8841 - protein, 1254 aa, unidentified
  REGION 1..1254: note = Description of Unknown: Cas Enzyme sequence
MKQILGLDLGVGSIGWAVIRWIDEQSVRIIGMGSRVVSLDTKETTGFTKGDGETKCRMRTMKRSMRRNLDRFQQRRKMLGQLMDELGLRFGPELLRLSPLELWQLRADAAAGVKMSAAQLGRIIYHLNMRRGYKHGKGEPEDAAEKKKQSDYLAKMSGRAKEAAEAGQTPGQYFAAKLKESAYTTQAGGVCCTYRVKEQTFPRHAYEDELKRILEAQRPNFPDVLTDDNISRIFSTIFYQRPLKSCKHLVSLCEFASREVTDKEGKTHIVGPRVAPASSPLAQECRLWEAINNIVLVNNRNRKMKGREAELALLPGSEAKKLAYEYPLDKSDRFRIYDFLNGHEKMKGTDLLRILGLKKDDGFAVPAQVTKGLKGNTTRHLLAKALGDWPGAEELLRFEIKIEETGEFDEATGLARRRVSRSYLREPLYQLWHTCYSVSDPDEFAKAMRGKFGIDDPEVVERLFNVDFRGQGYASKSAKMMSGIIPWMHDDGFRYSEACEMAGYNHSSYVTAEENAVRPLLDKLPQIPKGELRQPVVEKILNQMVNVVNAAVEAYGPMDAIHVELARELRRSKDERASDTKRNSQREKDNNRIADLLVEKGLKATRTQIQKYRMLEENGHCCMYCGAPINDLEFLRGIEADREHVIPRSLFFDDSFSNKVCSCRRCNAAKGQMTAYDFMASQGDEALQKYINRVDSLYEQKLISKTKRSRLLTSLKDIPQDFIDRDLRLTQYISRKALDMLGQISRDVVATTGSVTDFFRHAWGYDEILHSLNFARYDKAGQTETVEITRNGQTYTEQRITGWTKRLDHRHHAIDALTVALTGRAYIQRLNTLSAQKAGDEAGEAAHEEQLGNLSKWAARKPHPSTAEVAGVTAGIAVSFKAGKKVTTPGKRYVQKGGRRVLAQDGLLIPRGPLTEETVYGIRRISIGKQPLKYMFANPSAIGDENIRRAVELRIKEYSGDAKKAQKSCDRKPLHAEGLSVPVTEAQCFERRVVTRVSLSKITPKNYKDIVDGAVRDAVGRRFDEVGGSADKFVKSLVESPIYRDEEHRLPIRSVRLAKGSAPDSLAVVRRSAGGTAIGYAMYGGNHHVALYENSDGKIEESIVPFAEAVRRRQLGLPVVVENPDSLWDMVQMRGDEIPDDILSRFPSPGSRFVISMQLNEMFLLGLSDDDIRYLASAHRSSELASHLYRVQKLSSWYYDFKRHVSTLADCTNEQMANGNYIRVNSFKALTALNSVKVKVDVLGRIILPDSYAK

SEQ ID NO: 8842 - protein, 1225 aa, unidentified
  REGION 1..1225: note = Description of Unknown: Cas Enzyme sequence
MKQRILGIDTGTNSLGWAVVDRNEDSTYTLVRQGTLIFPEGVKTEKGIESSKAAERTQHRSLRKQYFRRRLRKIETLKVLIKYDLCPRLSDEELHVWHVRKKYPMNEAFLQWQRTDECAERNPYADRHRCLHETLDMEQRADRYVLGRAFYHLTQRRGFLSNRLDASEDDKEAGKVKTGISSLSQEMQEGGFSYLGDYFYWLYTHEGNRTRIRSRYTDRNDHYKKEFEAICVQQRLPDEWVKELRAALYFQRPLKSQKLSVGKCKFEPNKPRCIESHPDFEEFRMLQLVNNIKIKTPKDDDLRPLDPKERAQVIALFGKKKRDNFDFEEIAKTLAGKKSYAYYKEVGTQMPYLFNYRMELGVPDMPVTAAFRGLWGDDWKEALAETYTRSVTERGGKSVEDIVTDVWNVLYSFSSQEKLREFAQNRLQMDEKLAEKFAKMKLGRGTASISLKAVRKILPYLREGWSYTHAVFLANLKQVVPAGYWEQEDARAFILDGVKELMRNFNPQDTGPTGTLDFCIKDFLRNNLELAPGALDKLYHPSQINPYTDALLNPAGIPQLGSPATSSVRNPMAMRSLHQLRHLVNRLLVEGTITPATEIHVEYARELNDANRRKALADYNKDLEKKRKRYRAALQEDWKRETGRDIEPTARDLEKYLLWEEQGCTCPYTGQSIGITDFVGEHPRFDIEHTIPRSAGGDNTLMNKTLCDSRFNREVKGTKLPSQLSDHEAILKRIEPWQEKLKELNRKIAKCRTNPSMLKGQKDSIIQKRHRWELERDYWRGKYECFTMTEVPEGFSRRQGVGIGLISKYAGMYLETLFKLPQNPGKRRVHVVKGVTTAEFRQMWGLQGDDPKSRDNHVHHCIDAIVIACIGKREYDAMAQYYREKAAYDNKEQSAKPRFPKPWPTFTEDVQRIAEKVLVPHVQPDVLGKHTKKQIRINGAKHEAQGDTARGCLHLDTYYGAIMRDGELHYVVRKTLADLKDTDVDKIVDDTVRGIVKAEIERKGLKEALAEPICMNREKGVYIKKVRVYCPNVKRPLDIRKHRDVSDKAYKQTYHVMNESNYVMAIYEGMVKGKPKREFELVNYLDASRFYKRSMDRNDYPELVPLQSKNGYSLLCLLRMGVMVLLWEKGPDELWELSIEEQRKRLYKVVGLSALIQEKNRYGTIELRHHQEARPKGELKVKNGVYKSGEAYRPLIGLLHTQFHALIEGVDFELTILGEIRPLKR

SEQ ID NO: 8843 - protein, 1259 aa, unidentified
  REGION 1..1259: note = Description of Unknown: Cas Enzyme sequence
MKQILGLDLGVGSVGWAVIRQSDNTPEEISIEGLGSRVVPLNSDETTGFTKGNGESKCHERTLKRSMRRNLDRFQQRRKMLGQLLDELGMTFDSDLLRLSPLELWQLRADAADGKPVSAAQLGRVIYHINMRRGYKSSKDEESAEGADKRKQSEYLAKISGRAREAAEANQTPGQYFAVRLKESAYTTPSGATCCSYRIKEQTFPRHAYIEELRRILNAQRQHLPDILTDANIARIVDTIFYQRPLRSCKHLVSLCEFESHEITDSKGNKLIVGPRVAPASSPLAQECRIWEAVNNLSLINHHNRKRKDSPLPSLFDISSDARKLAYEYPIDDNDRRMIVGFLNENEKMKGSDLLKLLRLRKDDGFAVPAQVSRGLKGNVTRNMLRKALGDTPGADDLLRFDIEIVETDQYDEVTGAAKTMVSDSYLREPLYQLWHTCYSVSDFDEFDKAIRKKFGITDSEVINRLFHLDFRGMGYASKSAKMMTRIIPWLQSGYKYSEACELAGYKHSSYVTADENATRPLLQQLPPIQNGDLRQPVVEKILNQMVNVVNAAIDKYGPMDEIHVEMARELRRGKDQRKADYEHNSRREKDNDRIMKVLVEKGLKGSRTQIQKYRMLEESDFCCMYCGKPINDMEFLRGIEADREHVIPRSLFFDDSFSNKVCACRQCNAAKGQMTAYDFMAAQGDDTLTTFINRVNMLLDRYKKSGGREGISKTKHTRLLTALKDIPKDFIDRDLRLTQYITRKALDMLHAVSRNVMATSGSVTDFFRHAWGYDEILHSLNFARYDLAGQTDQTEVIHKGQTHLETRIAGWNKRLDHRHHAIDALTIALTRQAYVHRLNSLNASGGDSADGQSDSDQLTGNLNKWATSRPHPSVAAASDAVADIAISFKAGKKVTVPGKRYTYKGSKRTLAQDGLLVPRGALTKESTYGVRKMPIGLQPLKYLFNNPSEIDDIRILRAVEARLADNANDASKALKSCKRRPLTVEGSDVPVTEALCLKPTVVIRVKLTSVTPKNCSDIVDGAVREAVATRYEEVGGSADKFVKSLAERPLYRDAGGRLPITSVRIRKGLSPESITPVRYDSHGNAIGYAEFGNNHHIALYEKPDGTIEECVVPFAEAVRSRQANLPVVVTDPQALWQQIDMLDKELPESSLSRFPSHDSRFLMSMQVNEMFILGLSDEEFSDLVRDENRHELTSHLYRVQKLSSLYYDFKLHTSTLSDCTTDQMNCGNYIRIVSFSALKKYNPIKVRVDILGNIILPS

SEQ ID NO: 8844 - protein, 1208 aa, unidentified
  REGION 1..1208: note = Description of Unknown: Cas Enzyme sequence
MEKILGIDTGTNSLGWAIVEKSDEGKRLLDKGVHIFQEGVKIEKGIESSKAADRTGHKAIRVRYYRIRMRKMQLLKVLIDNHMCPPLSKDDLKNWKLKKIYPKNELFMHWQRTNDNEGRNPYADRHRCLHEKLDLDNLMSRYTLGRAFYHLIQRRGFLSNRKEQGGDDTGKVKEGISVLSEEIQNAGFEYLGDYFYSLYNKGEKIRDHYTARNEHYLKEFKAICEKQELDSRLGSDVVKAIEKAIFYQRPLKSQKGQVGKCVFEKNKAKCPASHPLFEEFRMLSFLNNVKIQTPKDDALRPLNNDEREKVMPLFFRKSKRNFDFEDVAKKLAPKKMYAFYKQNSDMPYLFNFPMDVSVSGCVVTAYLRDIFGEDWLTSICEVYTLGEGKTRMQILNDVWHALFFYSDKEKLEVFAKERLQLGDDDAKKFSEIPIPLEYASLSLKAVSKIIPYLRMGIIYSRAVFLGNLCEIMPQYVWNIAEMREAAIDKIVYEMDNYNPSIDNRTLEVCIKDYLKSEYGVTDEDLKKLYHPSMMETYPRVHPNGDGVYQLGSPRIKSVRNPMAMRSMFRLRKLINRLLQEGKIDKNTTINIEFARELNDANKRKAIADNVRENQKQRDDARKKICELYKAETDRDIEPNDDDILKYILWEEQEHVCLYTGKQIGIADFIGPNPKYDIEHTVPQSVGGDSTRMNLTLCYSRYNREVKKAQLPSELSNHDEILKRIELWKKKYEDLDKQIRRQRTSGASTKDAKDKIIQRRHLLQLKRDYWRGKYERFTMTEVSEGFSRRQGTDISVISKYARLYLKSVFDKVYTVKGIATSDFRKIWGIQNIYASKERVNHVHHCIDAIVIACIGKAEYDKLAQYYHDKENHAWYGYSKADFVKPWATFVEDIKNVQNEILVSHYTPDNMAKQGRKYTIVNGKKVLSKGDAARGSLHNDTYYGAIERDGDIKYVVRRELASLGEKDIKNIVDDTVRGIVEMAIAEKGFKEAMAGAIWMNEEKQIPIKKVRCYTPSVTNPLNIRKHRDESEKEYKRQFHVANDSNYALAMYIGKDTKGKEKRDFELVNMIDAAGFYKTSNNKEVVGGSMVPIKSKHDYPLAYTLKIGTMVLLYEKSPEEIWEGNVAERCKRLYKVVGLSILNASGHSYARITLRHHEEARQGTDLKIQNGAFIQNEELRPCILMLHTQLKALVQGYDFDINELGEIKRLR

SEQ ID NO: 8845 - protein, 1387 aa, unidentified
  REGION 1..1387: note = Description of Unknown: Cas Enzyme sequence
MSRKNAVSDYAISLDIGNASVGWAAFTPNYRLVRAKGRELIGARLFEPAQTAEERRVARTTRRRISRRRWRLHMLDALFDPALSEIDPSFLSRRKYSWVHPADTDNAEHWYGGILFNSKEQDKRFYNDYPTIYHLRKTLMKDDRQHDIREVYIAVHHILKYRGNFLVEGELDSSNVFAAKNLLDLMRDIINQTSEGGLGESWASNVDDEKFADALCTTRGSRKMRADNALTLIQDACDLAKGQIAIIKAVLPGLEGNKLDLNKVFPLEDRPREDQKTLGVYFNKVDYEETRAKIADSGLLGEDECALLDELQQQYSAIALKQLLGDSTSISESMCASYEQHHKNWELIKKEFRTRDNAEEINRHYGAIVGWEMVDGQRRSIRSSNEDKRKKANKYFADLIGKSSLDESTKQKLSHDIEEDKLFPIQRDSDNGVIPYQLHLNELRQILQKQGKYYPFLLDTFEKNGKKVNKIEGLLTFRVPYFVGPLVEKDDMQSSDNAENHWMKRKNPGVITPWNFDEMVDKDESGRRFIDRLVDTDSYLLGEPTLPKNSMLYQEYEVLNELNNVRLRARSGNHWADKRRMRLGHEEKAVLLDLFKQHGTVTKNSAENALRRKYGKTFELSGLADDKKFTSSMSTYSKLGRIFGEEYVQKHFDLMEQIVELQTVFEDKETLRHQLSLLNGLTDQDCDLLCRTHYTGWGRLSKKLLTTKVGECKLDDDFAPRKHSIIDIMRSQDRNFMEIITDKELGFSEWIDEQNLSENKNQSLESMVDELRISPKVKRGIIQSIRLIDDISKAVGKAPSKIFMELADDVQASVRTTSRKNQLLDAYKNSGLKKEFSDIFARLENTDDKELQDDRWFLYYTQLGKDMYTGKELNIDRLSSDYDIDHIIPQAVTQNDSLDNRVLVSRAANARKTDSFTYLPELVEKQKNFWQELLDNHLISPIKFERLTRQNDFGKHEKERFVQRSLVETRQIMKNVATLLRQKYGNSSSVIGLNAELTKEMRRYLGFSHKNRDINDYHHAQDALCLGIAGQFAVNRGFFDNGMVSDGAKNSYNRYLQDYLKGYREQLKADDRKRGKAFGFVVGSMASNDESKHVNPKTGEIVWSDADKEYLRKVMNYRKMLVTQKVGDSFGALYNETRYGAGVKEGRDGLAFDKSKTNTSLYGGFSSAKVVYSVLVEVKKKVRLVSITMQEYSLLGDHPSDGALRKVLVAKKAEYAKAKILLRHIPQMQLARYKGALVTVKSASEFNNARQLWLDYGAYAYFDQLMHDTQAAEPNTLIEVFDEIMTAVQQQYPLHRVSEQDLPKIRMAFDGLGAEDQIAVLKGLIIALHANPSFSNLTKIRLSPNWRRINTGKNGFIFSDDDEFIFQSPSGLFEKRVTVAELKRKAK

SEQ ID NO: 8846 - protein, 1326 aa, unidentified
  REGION 1..1326: note = Description of Unknown: Cas Enzyme sequence
MTEKKDYNIGLDIGTESVGWSVVEVDNQKVMRKGNKALWGVRLFEKANTAADRREKRSTRRRYDRRRERIRLLQEEFNDEINKVDNNFFQKLKESKYLEKDKINKTIAISNEEQKMIRDYQNSYKTIYHLRNELINSTEKKDIRLVYLAIHHIIKYRGNFLYQNSNFNIDNLNIKEKLSELFEILSNSIHDFEIYDNSINMVDFSKLQEDMLNVSKNDAKRLITTDLSNFINKSFVNEFAKLMIGNKANIAKLLLIETDDKIEISFSGTDYEDKYDEYQNILGENIEVLDNLKQIYDCVFLKKLFNGNQNTNISSLMIKYYEQHKEDLEFLKELFRNDRKLYNKLFRNGKELCLYEKYITNKEDSDEFIKELKKLLTELFDTDINIDAKLRDKYTLEIKDRIENGNFLPRITTTDNGKYPYQLNKYELIKIIENQGRYYPFLLEKTEDDKTYKIVRLLEFKIPYYIGPLVSEDRSKNAWLERKSYDERVTPYNFDRIVDKEKTAEKFIKRMISHCTYLLDEYALANNSILYSRFKVLNELKQIRVNDRRIELDFQQQLLEDFFMKTSGAITERKFKNYLMSSNQYNMDNGDFRITGYSSDGKFANNMQSYLDFFGEGGIFENTSYGEEDAELIIEWITIFEDKDILEKKVRDNYKELNETQIKKILTKKYKGWGSLSKKLLTTKYYKDKRTELPKSILDLMYETDENFMQILNNDEYNFQDMIQEFNNAKNDRKLSYEVVAELATSPAVKRGIYQALKVVEELVDYIGYEPKNIMIEMARGDEEKVRKDTRKEYIKKLYEACKDSINNYKTLKHELDSHEITSQRLFLYFIQEGKCLYSGKPLNIEDIENQSLYEIDHIIPRTLVKDDSIDNKALVLRECNQDKKANYVLPARFRNDYQKAWWKHLKDNNLMSAKKFHNLIRDKYSENDINGFINRQLVETRQITKHVANILKNFYKSSNIIYLKAELSHNYREKYELFKFRDINDYHHAHDAYLAAVLGEYKEKYMHRKLNFDVIKELNNEILKMDDGKSKNLKYGFVINSLDENLCDTVLKISPNLIDENTGELLFDAHSFNRIVEDTLYRNDISVSKKVEFRTGEFYNQTKSKKGDTGVPLKANMPTKLYGSYTSLNPAYAVLAKINKKGITTQKLVGFPIYLINKPKDIINQYYKKLLNLSESDSFELCEKHIPFYSIIVWNNSVCSLVGATDKVEVCNAIEFNFDKCFMKEHKYALKKLYDKKYSNDDVNYEKKLEEIITYIVDKMEKQYLLYNNLISDLKEMVDYKHYDKLNLDEKEQTIIQLLNLLKFNSTNANFKFLNQSYSSAFGKQ

SEQ ID NO: 8847 - protein, 1133 aa, unidentified
  REGION 1..1133: note = Description of Unknown: Cas Enzyme sequence
MHRCARRRLNRRKQRVTLLRELLTEEVCKVDTSFFERMDASSLLLEDRKEKQKNSLFNDPDFTDEDYYHRFPTIYHLRKYLAETDEKPDIRLVYLACHHIVKYRGHFLFGEMESKTPDFSDAVGCLKEDLLQIDSSFEITDMQRLSEVISDRMTTVNDKKRAVEELIVSDSSLGKTMSTLLSGGKVKLSDLFIDESLKEWSISFRDVSVEDTMAELEDAIDTDLFRILRLSKKVYDWSVLSGLLSGHNSLSEAKICQYEQHQADLELLKKGVKKYAPEKYREIFKEKAIKGNYCSYVNKCGRGKPKDTCDQEEFCKYVKKILEKTDIINDQNYVGMLGRLSAATFMPKQTSKENSVLPYSVHRSELKAILDNVSRFYPFLSEVDDDGFSVKEKICMIQCFRIPYYVGPLGKGSENAWAVRRSNRRITPWNFEEVVDLDASAEGFMDNLTNYCTYMVGEKVLPKDSILYSYFQLYNELNNLRVDGERLPVKIKEQMVEELFRNSKTRVTEKRIRTFLMTKGVIDKTEEHEITGMADTSIKATLKSERMIRDAIGSKADDRELCEEIIRVITVFGDESRIRKKLVSDYPGRFTEQELKVLSKMKFEGWGRLSEKLLTGLYDVNPDTGLEMNIMQMLETTGYNFMEIYNKFSFHDQVEKHNISMTSDDEVTYQSLEALYISPAVRRAVWRTISVARDVMDCMGHAPKKVFVETTRDVRGTNDGKRTESRKSGLMQLYRACKEDPQWIAGLESREEADLKARNVYLYYTQLGRCMYCGRAIDIEELGRTDSVDRDHIYPQSRIKDDSIHNNMVLACKVCNGKKGNMYPISCEVQQKMRPMWDDLLRKKYITPEKHARLVRTDGFSDDELNRFISRQLVETSQSVKAAIEVLKRVFGNETDVVYVKGGLVSEFRQEYGFLKCRSVNDLHHAKDAYLNIVVGNVYDTKFTKDPMNIIRGGERYNIGRMYDHDVARNGVSAWISGETGSIVNVRRCMRRDNILFTKYQYIAKGALFDDNLVRASDTLFDRKAGLPASKYGGFDNAKGSCYSLVEYDKGRHHVRSLEVLHFHSIARIGDIPSLEAYYSERIGMDVKVIIPVIRMNALFDWNGFRMHIGGRTGNSIVFYPAVQLLLPDDLYS

SEQ ID NO: 8848 - protein, 1139 aa, unidentified
  REGION 1..1139: note = Description of Unknown: Cas Enzyme sequence
MELSKYSLGLDIGTSSVGWAVIDLEKERIHDLGVRIFERPEDPQNGDSLAKPRRDARSARHRLKRRRQRLNYLKRFFVNEKILTQAQIAEVLDPKSTYNKLNVYTLRDKALNYELTAEELFKALYQISKRRGFKSNRKVVEETDSEGGRVSKALTINEQLLAEKGYKTVGQALAQDEKYTEHKRNKHDSYTNSFARADFIHELEEIIKAQRSYALKSVSDEALRNLIYGVDSDGLLTNRSAIMYQRPFMTEGLIKKMVGECTFEKGEKRAPRASYSFELFRFANDLTHLVFIPKSTNKHQAKREQLQLTLNPEQIAAVVAEAKKTAKITYKKVRQVAGISEEYAPEYVRGKINKDDPYGEKNEFGKLKAYHDIKKALKSTPEDWTKVDNESTLNEIAYILTTEREDAGILKKLSRLALSDEATYAILKINPKNFRSFGHLSIKALQKITPYILNGLTYDKACEKAGYDFRRKSASLEQITNPVVKRAISQTNKVVQAIIRKYGKPYFIKVETARDLAKNFKDRKAIENENKDNQAFNSEVKEIIEHGYNIKPKTKRGKNLLEFLRENNVPLSQNIDANGQMITKVKLYREQNGKCLYSGDPIDFQSMVHDDNAYQIDHIVPFSRSNNDGLTNKVLVKTEENQEKANRTPFEYFGSDEARWKQFAARVNATYQTRDVKTSDKTTNSENYKFNGYAMRKKQNLLIEEYKNDSWNARALNDTRYITRFVQNYLRQTVDFAEGDDKQRIFAPNGTITSYLRKRWGLNKVREENVLHHAADAAIVAAIDQRVIYRANLYAKRGEITEFLAAAKTMDEKTNKLTGEILDDDEFMKAQHRKDALQVLSDKHFPEPWSGFRDEVDLRTRNINRESLRKKLQGAHLYDEDFLSQIRPIFVSRMPRRKATAQAHKETIRSPKVKDGDQRTVRMPLNKVKIKDVENSVLKESDTWLYNKLISLLEINADNPEKAFAEPVYKNDKKFDKHGKPLMPVSTIKVYSTQPSGFLINKGKAFVNNGSMIRLDVYQKQNQKGKIEHFFVPVYAHQIGKNQPMPTKILPAPKGFTDVDETFTKVCSLYPNDYVLCRFGDKIKEGYYVKYNISNGDLQVINQTSADKDASNLIHISPRSATLIKRYDISILGDNAPRL

SEQ ID NO: 8849 - protein, 1217 aa, unidentified
  REGION 1..1217: note = Description of Unknown: Cas Enzyme sequence
MKKRILGLDTGTNSLGWAVVDSDEYGNCNLVKYGDLIFQEGVKIEKGIESSKASERTGHRALRRQYFRRRLRKIEVLKVLIKYGLCPFLSNELLHDWHVHKIYPKTDDFMLWQRTSDNENKNPYYYRHLSLHRRFNLDRQDERYMLGRAFYHLAQRRGFLSNRLDSTPENENGKVHTGISNLSHEMEAAGCEYLGDYFYQIYSDPDNHSRIRTRYTDREQHYEKEFHAICKMQQLPPEMVEELEKALYFQRPLKSQRKGVGKCTFEPKCPRCADSHPDFEEFRMLCLLNNVKIQTPYDLELRYLNQEEKEKIVPLFYHTSKPNFDFEDIAKTLAGKGKYQYFKEEGGMPYKFNYRMTQGVAACPLTAQLIKIFGADWKNALAETYRLTDTQGGQKTVAQMVDDVWNVLSTFESKDKLQQWAQKNLQLDEEQAKRFSEIKLSHGFSALSLKAIHKILPFLRQGYIYSHAVVLANIPAIVGEEVWQDADKQRFIMKNVLDILQCQDQATKDFCIKDFLLNNFNLKPGEADRLYHPSMIETYRDAGQKDGVYQLGSPRTSAIRNPMAMRSLHEMRKVINQLLKEKIIDTNTEVHVEYARGLNDANMRKAIADYQRSQDKKHQDYVNSIKKLYLEETGKSIDPTETDIRKYELWEEQSHKCLYTGAEIGIADFLGDNPKYDIEHTIPRSVGGDSTMENLTLCDSRFNRDVKKARMPSQLANHEEILTRIEGWKKRYEELTRQIDKCRTFAGMAKDMKDAVIQKRHRLKIERNYWKGKYERFTMTEVPEGFSRRQGAGIGLVSKYAGLYLKSLFHDPQNRSKSRVFTVKGTTTAEFRRMWGLQSEYEKKSRDNHCHHCIDAITIACIGKKQYDEMALFYHDEELYDDGRGKKPQFRKPWPTFTEDVLNLEKSLIVVHETPDNMPRKARKYVRTTRGKFLAKGDCARGSLHNDTYYGAIERDGKIKYVVRKALASFEKESDLDNIVDDTVKEIVREAVRGKNFKEAIAQPVYMSKEKGILIKKVRCYARRMTNPLNIRQHRDASSKDYKQAFHVANDTNYCMAIYEGMVKGKVKRDFELVKTIDAATYFKGSTCRTDYPTLVPDKSNRELPLKAILRIGTMVLLYEETPTEIDFSDKKDLARRLYKVTGLSYLPVNGNIYGVIVLRYHQEARQSKDIKSKNGVYKMKEEHRPAITLLNTQFNALVEDIDFHINAIGEIELINS

SEQ ID NO: 8850 - protein, 1308 aa, unidentified
  REGION 1..1308: note = Description of Unknown: Cas Enzyme sequence
MKSRQYLLNLQGETDQEKLLAAWQRHRFYLSALVLGIDIGLEGIGVYLRQGRNELFARTLDLSGVLPDKSDALANRRQMKHARRCRHNRRTRMRRLDELLEKHGLPLQWRDAPEAFRKSDPYKLRHRAVKADGKGLESKFALANAIRHCVQHRGYDYGRFREEGNYPWGDTAKLSKAIAWLKTASLDEQTAEDLREMARNRELEVKDKEADEKWAEFNERIEERAAYAREHDIARVLVEHAKGDKHDNLRKRARGVAFPRRQVWAHLEHIVRRHAHLIEDAEGFLAALGCNPDDRDEFPDIAASTAARERAIFWYNRKTRHEMERHWAKKSKDCPYAERLGLGNDKKTSAREELPLRLWAMLEFGITRRVEITFQDAERIQALKERGVKVTKKNSPAKELIHSLSPVAVGRLIGLVKAQHGTDGVLLPLSNERRAEIKKEARAIIEQDIVDHTGVPAALGPKPAALKAGKEERWNASFFDQLNDLVAPAPSTLKGTGSLFHETASRLYDIATAGGKDFTREGFNQRLVELGFYDWRRESVLDWGVFPQVEFLLGRRVKNGKRKGEISVSCQGFLRNLLRDLVKQEKLPASTLAPDFCVVEVVGNAPRTQEQKTDILKEQKANRATRDEQFKQAGRDDSGVASRRRRISLYAQQKGRSPYTGRALPDDPLSPELEIEHMFPEAKGGLSVDDNLVLTYKTENDSVTGKGDRTPLQWLGEEKLAQMVAANKDMKWSAMKREVFAWGTRREDDPSGKWPSHYDEAGRLLIPDFGNTTRVAQLARQLRAAVAHWMEIEKDAEAMAERIGTPSGWLASQAMKSWLPDYRKDRDDITHHLIDAAVLAHIPPREGMNSIHCGGIFFSERVWLPDEKKPGEQTSRLVTRALAGLSPASGLSKWLPGERKEYTECPVLKHRPRKNKQSIGDATFWRQAEAAKPELAQRPQKPFNAEDYKGDADKLLAELRMMKINERKHKQWCERNKRKGLPEPDYRDVLPTYKDIESYLERSTAATQAERGQAIEPLRLRDGKDGSKGTPITKVWKWSKKRNLDSPLGLSGKQRAENGKAVFEGLRFLKESNVRMELWLGYDWDAARKARKAKAADWEAKGWRYYRRFIPHPTALRHLKQLGFAFDRNKRAKAPAYMQAKPEAPETHVSLRELLLGDELPPFARKVGQFRKEDVLLIGLNQEGSIAGASEEIAWSAHYRISAIGTQIEMKPLLFKDKAVTPLAKINRKNLDQQPANASVLASLLSLPPAGKHAAELMANNAKVRIPPEPVDKEKPKLNDSPPDTPRGRGRRATPAGQADFFREEDRA

SEQ ID NO: 8851 - protein, 1041 aa, unidentified
  REGION 1..1041: note = Description of Unknown: Cas Enzyme sequence
MTYTLGLDLGARSIGWAAIGLVAGEPSSLLGMGVRIFEAGVEGDIERGRDESRGVQRRTARLARRQTRRRRQRARLLYRTLESAGLLPPVTHAPGQPLAVSIQSTLNELDAQLRLKYHDHPAVHHLPYLLRARALDHPLDSLELGRALYHLGQRRGFLSNRKAKAKDGDDEKGKVYGGIHQLRDEMSGARTLGEFFSRLDPQESRIRQRYTHRSMFENEFELIWAAQTPHHPALTPELRDSLVQILFTQRPLKDTADLVGNCEWEPTEKRAPLWSLDFQRFRLLQSVVHLRVQDPDGRVWSLNPDQRRQLVETLDTAKDLTFARARKLLDISPKAKFTIEEGKETKFKGNTIGARLCELLGDLWLQMSDSLKNDFLSDIAKEKTDEDVQAMLESKWGLPPDRAEAIAEKFSLPQGYASLSLTAIRKALPFLEQGLSVQEARIAAGYEIDPRVPVHDFLPPLKDSQLDIRNPAVSRTLTELRKVVNAIIRKWGKPAEIHLEVARELKKNRDQRMKDSTRMRERESQRESVRRCIAKELGIPEDKIRRRDIELGLLYDECGGTCPYTGESLGSFTSLFSGNSRAQIEHIIPRSISLDDSFGNLTLCLTAENATKGNRTPYEAYHQQPERYQAILDRVKTFKGKAASHKLARFKLETLDKQELLEQFSSRHLNDTRYASILAARYLALLFGGEIVDGKRRIIKSTGQITADLRNVWDMNSILNDGPRKTRDDHRHHAIDAAVIAVISQKYVTLLSEAAERAAAERKRRYASIPPPWVGFKEAVAAEAAKINISFRADHRVTGPLHKETYYSKVGVSTAGGDVVRTRKPVHLLSLDSAGNITDKIVDKHVHKAISTKLKQLKDSGIGKVDPKKLENDWPELPNANGAPVKIKSVRIEINRAVRSIGKGHRQRFAEGSETHHVAVYEVTKGKRRVWDGEVVSMRDAMERIRQRTPVVDRNEADGRGFLFSLAKNDSLLLTDPEGLRSGLYIVKKIAAKKQLTLVPQWDARSEAQRSVFSPMVGGLQKFAAQKVVITPIGEILPSHE

SEQ ID NO: 8852 - protein, 1284 aa, unidentified
  REGION 1..1284: note = Description of Unknown: Cas Enzyme sequence
RQQFSLFAGTDYTDKEYYEDYPTIFHLRKELLESDKPHDVRLVYLALLNMFKHRGHFLNSSLDDNNSGVNMEALIKNLIEQLEKYKHLNLKEQLEKCEHPDPKSDFNAAGFEAILGAKGMSRTAVLDRLAEYMSVTKKNKGDYEILKLICGIKGKLQPIYGIEIVDEDHKAMSLSFRDASYEETSNEIQEYLGDECFELILVLKQIHDTGMLSGIMKGHRHLTNARVESYEEHKKDLALLKKVISEQLPEAYDQMFRIMEAGNYSAYVGSVNSDKSKIRRNCQEGKGRSRDDLYATILKLIEKLPESDEINTIKTRIENETFLTKQLTSSNGVIPNQVYAKEMKQILANAEKYLPFLREKNDNGLTVSEQILQLFSFTIPYYVGPLGKEYSGVAGYNVWAIHKDTVGPIYPWDLENKIDIKGTAEQFIKRMVRHCTYMSDYHTLPKCSLMYEKFMALNELNNLKVHGEDITVEIKQDIYEKLFMKGKKVTVKKLEEYFVFNGMADKDDKDFISGIDVTGGFKASLSSVGKFEGIFGTDFSKDSSCSHMIEDIVFWMTVYGEDKKFVKERIVKEYPKITVAQLKKILGFKISGWGNLSREFLMLEGVSKEDGVQRTLIAALWETNDNLMQLLSDKYTYAEELEKITENDAKSLSEFTIEDLDDMYLSAPVKRMVWRSLRIINEVQQIIGETPDKVFVEMTRHDGVKGERKASRKRQLENIYKGLGKEYKNWVNDISGRNEADFRIKKLYLYYMQMGRCMYTGEQIDLDQLMNDNQLYDIDHIYPRHFVKDDSMQNNLVLVKKENNAHKSDNYPIEKNIQEKMLSYWKTLVHAKLITETKYNRLIRKTEFTDEEKAGFINRQLVETGQGTRAITQILKGALPDTEIVFSKAGVVSDFRKTFDIEKVRCINPLHHAQDAYLNIVAGNTYNVKFTKNPLRFIKAAEKSNSAEDKYHMDKIFFKSVSRNGEQAWIHETGNMDNSINTVRKVMRKNTPLITKRAYIAHGGITEKDTVYSKATAGKGSGYLPMITSDIRLSDVSKYGGRTSIGNMCYTLVEYSLSGKMQRSLEALPRYMGDIDSLPDETIVKYVTESLVKENPKKFVEKVSIRKRCIKYNSLLRIDGAYYYLAGKSLEQIILQNAMLLYLDYEWSRYIKKIEKALGNQYFGERDCGEVIITKKKNGDIFDIMIDKLSRGVLCKRKNNIVDTLKNSIDKFKNITIEEQCYVIMQIVSWMQIEQTKADLKHIGGAANAGKCLTAKKINSSYEFKLISKSVTGLYENQIDLLTI

SEQ ID NO: 8853 - protein, 1335 aa, unidentified
  REGION 1..1335: note = Description of Unknown: Cas Enzyme sequence
MIKQDYCIGLDIGTNSTGFAMTDMKGNLLKHKNRSTFGAVLFEEAQEAKERRMKRSARRRLDRREQRIDLLQMLMSEEISKVDFAFFARLNESFLHEDDRKYPHLYGTLPKAIWTDGTIEPIPSIYHLRSALAHTEKKADIRYVYLAIHHIIKYRGNFLSEGETLESINDVREPLTEILSQLAEQDDSWPCQETVDKVYNALKESGLTRLERKEKLKSILQSGSMDTKAINALASLWVGGEGSLEDLCGYSGDSPTKKLSFMEDFDEEAYIDALGNDAELFKTILQVYRWHQFCSLREDGETISQTMIHRYNLHRQHLKQLKMWFRTYCPEKYASMFRGCHKMEKNTDIVSHNYVAYCRQDIKCGNAPSPASCTQEQFYTALEHILEDEKLGDEALNAAKPMLAALKEENGFLPLQRIYLNGVIPNQLHVEELGMILDQQGKYYPSLLENRDKIISICSFRLPYFVGPLNTASPHQKWLSRVSAPARPWNIFEVVDKIETADGFIENLTNKCTYLPKENVLPLHSLLYEEYLLWDELNAIRINDKLIGQELKEKIVEKLFKNQKKVSITALKKWLSHDSVYCNAHNIVITGYRDTNGFVSSLSTYYDFRKNGFQIDDASIPMIEELIQWSTIFENRTILREKIEKSSFNLTPDQINFICRKRYTGWGRFSRKLLDGILGTNQADGKTVIEMMRFTNNNFMQVLRKQEYGFSKRIDEENDFSNNGPITLEEVQALQGSPALKRGVWQAVQIVEELIKSRGYLPRAIYIENTREDDLSKKGKRIPDRIQTLEGYYKGHDKEISPSCRQYLDECKEKKLRLNDRQFLYFLQLGKCMYSEKTLDFNRLEQYEIDHILPQSLIKDDSIENRVLVLSGENGRKGASALLSEDMRISRKSFWEMLHQMNLIGPQKMKNLTRRSIDEKEILGFVKRQLVETSQIIKHVINLFKSHYRDHGVEIYAVKAQLTSGLRHAYELYKVRELNDSHHAYDAFLTCTLGLFTSRFFSWIHDDTVAAAKAKETWKKNVQMDTNGIVLGAFNQNQYDDETGEELHNKDQRIAYLKKVWGYRDHFFVYRKYENTGAFFNETRYPAGSVKAKFPLRKNLPVDKYGGFDSINPAYIVAFTYKKGKKRIGALEGVPVYLSQRVAQHPEDLVSFLEGKKDKNYVDVRIIRTKILLNQRILCEGSELLLKSAREAWNGRQLYLPTHQHKLLHQMMKSPDGNWEISEDQMNCLIDTLLKKLKTHYPIYSGVMERINTELNKIKTLSMKEKGIFVFETLKIMNVSGQYAMYKKLPDHIKLNNSQGRITNKNFDISKIILIDQSSTGFYERRTPLWDSEQL

SEQ ID NO: 8854 - protein, 1480 aa, unidentified
  REGION 1..1480: note = Description of Unknown: Cas Enzyme sequence
MKTILGLDLGTNSIGWAKVCVDDNGNYTREIKLGSRIIPMSQDTLSNFDKGVTESPTAARTGFRGIRRIRERALQRRERLHRVLHVMGFLPLHYENAIGWNREETTTYGKFLDNGEPKLAWEKQEDGSMRFLFMDSFYEMMADFAKYQPGMVADGRKIPLDWTLYYLRKKALTQAIRKEELAWILLNFNQKRGYYQLRGEEEEDDPTKREEYYELKVVSVEAAEEGKGGNTWYNVTLENGWIYRRQSKIELNDWVGKVRPFIVTTEYEIDGVTIKKDKNGEVKRSFRAPSENDWGLRKKRTESLLEESDKTVGAFIYNHILSEPADKIRGNFIRTIERKFYKKELEAILREQSKHHKELKDINTLIACIKELYPNNKPHQDSLIKKDMTYLLITDLIFYQRPLKSKKSLIADCPYEYYEYVIKETGEIKRQGIKCIAKSNPYYQEFRLWQFIINLRLFDRNNDKEVTSEYLSSTEDYTKLFTYLNDRKDINQEALLKDFFKQKKVKRGMEKEFLIRWNYIEDKDKKYPCNETRHELLAALDKAGIDHSWLDDKERFYRLWHLLYSVESKEEAEGALRKLVDNDDFVNAFLKIKPFKKEYGAYSEKAIKKLLAVMRIGALWNEDDICEQTRNRIQSIINGDIDEKIKERMNRTFSQLSDFQGLPEWLACYVVYGRHSEATDIQRWTKPENLMAYINGFKQHSLRNPIVEQCILETLRTVHDIWKEAGHIDEIHIELGRSMKSTADQRARMSKSIMQNENTNLRIKSLLMELKNAKEFENVRPYSPMQQEILRIYEEGALQELTKEDAQYNEISKISQMAQPSANELLKYRLWLEQKYCSPYTGKPISLSKLFTSAYQIEHIIPQSRYFDDSFTNKVICEAEVNQLKSNMLGYEFIKKHGGEIVHCTMVGDVKILDAKEYYNFVTEHYTNNRRKKEKLLLDDIPQEFLNRQMNDSRYISKKVMAILSNIVREEDEQEAKSKFVIACSGGITDRLKQDWGLNDVWNSIVYPRFERLNKLTNTENFGHWENKEGKQVFQTSVPLELQRGFSKKRIDHRHHAMDALVIACASNNIINYLNNESAKSQEKREDLRKKLCDKNRIIRKPWETFTQDAHTALENVVVSFKNYVRVINKATNYYEKYDKNGKKGIAEQKGQDMWAIRKPMHKETVFGQVNLRRKVTVKLKDALEKIPAICNKELRDYINNLVAKQFNKKQILAHFKSINYRLNMKYVDKVYVWQYSDEKEPMVATRKPVDTSFDDKRIATITDTGIQKILRNYLETKDNDPNIAFTPEGIAEMNKHITEYNNGKQHQPILKVRVSEPKGAKYQVGETGNKTSKFVEAQKGTNLYFAIYEDKEGNRSYNTIPLNEAAERMKQGYSPVETTNSKGNLLKFYLSPNDLVYVPAEEDKLSGDCKLNKERIYKMVSSTESTCLFIPYSAAKPIYDKFEFEAKNKMGRALTGEMIKAVCWKLELDRLGNILKVIK

SEQ ID NO: 8855 - protein, 1380 aa, unidentified
  REGION 1..1380: note = Description of Unknown: Cas Enzyme sequence
MKKGYSIGLDIGTNSVGFAVITDDYKVPSKKMKVLGNTDKRFIKKNLIGALLFDEGTTAEARRLKRTARRRYTRRKNRLRYLQEIFSEEMSKVDSSFFHRLDDSFLIPEDKRESKYPIFATLEEEKEYHKKFPTIYHLRKHLADSKEKADLRLIYLALAHMIKYRGHFLYEDTFDIKNNDIQKIFNEFISIYDNAFEGSSLSGQNAQVEAIFTDKISKSAKRERVLKLFPDEKSTGLFSEFLKLIVGNQADFKKHFDLEDKAPLQFSKDTYDEDLENLLGQIGDDFADLFVAAKKLYDAILLSGILTVTDPSTKAPLSASMIERYENHQNDLVVLKQFIKNNLPENYVEVFSDDSKNGYAGYVGVDSKIRKRNAKLATEEEFYKYLKNILNNVKGADYFLDKIEREDFLRKQRTFDNGSIPHQIHLQEMNAILRRQGEHYPFLKENREKIEKILTFRIPYYVGPLARGNRDFAWLTRNSDQAIRPWNFEEIVDKASSAEDFINKMTNYDLYLPEEKVLPKHSLLYEKFAVYNELTKVKFIAEGLRDYQFLDSGQKKQIVNQLFKEKRKVTEKDIIHYLHTVDGYDGIELKGIEKQFNASLSTYHDLLKIIKDKEFMDDPKNEEILENIVHTLTIFEDREMIKQRLAQYDSLFDEKVIKSLTRRHYTGWGKLSAMLINGIRDKQTGKTILDYLIDDAYYNRNFMQLINDDGLSFKEIIQKAQVVGKTDDVKQVVQELPGSPAIKKGILQSIKIVDELVKIMRHNPESIVIEMARENQTTARGKKNSQQRYKRIEDALKNLAPGLDSNILKEHPTDNVQLQNDRLFLYYLQNGKDMYTGEALDINQLSSYDIDHIIPQAFIKDDSFDNRVLTSSKDNRGKSDNVPSIEVVQKRKAFWQQLLDSKLISERKFNNLTKAERGGLDERDKVGFIKRQLVETRQITKHVAQILDARYNTEVNEKDKKNRTVKIITLKSNLVSNFRKEFRLYKVREINDYHHAHDAYLNAVVAKAILKKYPKLEPEFVYGEYQKYDLKRYISRSKDPKEVEKATEKYFFYSNLLNFFKEEVHYADGTIVKRENIEYSKDTGEIAWNKEKDFAIIKKVLSLPQVNIVKKREVQTGGFSKESILPKGNSDKLIPRKTKDILWDTTKYGGFDSPVIAYSILLIADIEKGKAKKLKTVKTLVGITIMEKAAFEDNPITFLENKGYHNVRKENILCLPKYSLFELENGRRRLLASAKELQKGNEIVLPVYLTTLLYHSKNVHKLDEPGHLEYIQKHRNEFKDLLNLVSEFSQKYVLADANLEKIKSLYADNEQADIEILANSFINLLTFTALGAPAAFKFFGKDIDRKRYTTVSEILNATLIHQSITGLYETRIDLSKLGED

SEQ ID NO: 8856 - protein, 1374 aa, unidentified
  REGION 1..1374: note = Description of Unknown: Cas Enzyme sequence
MKRIVGLDLGTTSIGWALVNQAENEKEQSSIIDTGVRVNIISEDEKDAYEKGKSITTNSDRRLKRSMRRNIDRYQLRRDNLIKVFINQKWVKDKNILTETGAKSTFETYRLRALAVTEEISLEALARVLLMINKKRGYKSNRKVNSGEDGHLLDSIEITKDLYNRGITPGEYCLELTKKGEKIPEFYASDLKEEFNRIWTFQSAFYPEYLTEDFKNQVTSNFTKALNKVFYAKYSITTAENKGKDKKLKEYEWRSQALVEQLPIEIVALVLSSISSAIASSSGYLGDISDRSKHLFFNNLTVGQYLYGELCKDHHFRTKNKVFYRQDYIEEFDKIWNKQSEYHKELNDELKEELRDRIIFYQRRLKSQKGLISFCEFEKREIEVEKDGKKTIKTVGCKVAPVSSPVFQDFRMWQKINNISVTDRRTGDILELDIDRKKEIADRLRYEPEMSSSAILKLLFEEKAKYYEMNFNKVEGNRTISDFYNKFREICTATGHDAVERTNLGIFGFHNGIKEVFDGLGFNSDILEFDSLLPKEEFERQPLFKLWHLLYSYEGDNSKTGNESLIKKIGEICRMPAEYASILSGITFKQDYGSLSHKAMRKILPFMMEGDEYSVACEKAGYRHSAKSLTKEEIENRELKSKLDLLPLNSLRNPVVEKILNQLINLINSIIEKYGKVDEIHIELARELKSSQDDRKQATDSIRQNNEINAEIEKKLKASPFNLSYVSKNDIVRYKLYEELESNGYKTLYSNQYIQKDQLFTKEIDIEHIIPQAVLFNDSFSNKTLEYRSVNLEKDKDTAIDYVRKKYGEEGCREYVKRVEDAFKNGKISKAKRNNLFRDSNHIPEDFINRDLKDTQYISKKAKELLEEYVKVVVVTTGSITSKLREDWGLVNVMKELNVPKYSKLGLTKNMTDREGRNIIKIDNWTKRNDHRHHAMDAITIAFTKLSHIQYLNNLNAKSNKSSSIYAIGAKETYISGTKRLFKPPFEINDLRASVKNQLENILISNKAKNKVMTLNTNSIKRRGEKIEQKCMTPRGALHEESVYGLRKRYETYEVAVGSKLDKKQIDEVASKEERNALMKRLEEFGGNAKKAFTGKNSPENNPIWIDTMHSRQVGSKVKCVRWQYYYTIKKDINKDLNIDKVVDSKIKRLLETRLSEKGNDKSKAFANLDADPIWINKEKGIRIKRVAIAENFNLNAVRLKKDHCGNVILDKSGKPVSADYINFKNNHHVAIYRDDSGDIKENIVPFYEAVNRVNAGQPIVDKFFKKDEGWEFMFTMKRNEMFVFPNEEVGFDPKDIDLKDPKNYSLISPNLFRVQKLSSKDYCFRHHLDTTTEYENKLRDITWKRITNIKLLKSIVKVRINHLGEIVSVGEYD

SEQ ID NO: 8857 - protein, 1494 aa, unidentified
  REGION 1..1494: note = Description of Unknown: Cas Enzyme sequence
MKNILGLDLGTNSIGWALIDNESHRIIKSGSRIIPMDAATMGDYEKGNLKSAASERTSFRGMRRLYERAKLRRERLLRVLNILGFLPEEFRRQIDFEHHPGQFIDGKELLIAYHHDENGQRVFSYMCAFEEMLTDFRATQPELVRDGRRVPYDWTIYYLRHKALTQPVTKEELAWIILNFNTKRGYYQLRSESEEVTTNKNEEYAELKVVSVEKTGEDKKRAGYYWYTITYDNEAEQKITSTIPPRQIGDKVELIVTTARDKAGETKKTVRSPKEDDWTLMKKRTEHNIEEEECTVGSYIYQHILADPTVKVRGKLVHTIERKFYKKELKQILNKQKEFIPELQDASLYEACIKELYRNNEAHIQSIANKDFTDLFVNDIIFYQRPLKSKKSTISNCPYESYYYKNKETGELIRKPIKCIAKSNPLYQEFRLWQFIHNLRIYKKSEEVSGRLQTDVDVTDRFLTTPDDYAKLFSWLNDRKEIKQKELLRYEAFGLSKSYGDYRWNFVEDKQYPCNETLHEINRRMKSILSDKKLSSEAYQQLWHILYSIDDPIEIRKALTSFAQNQKINSDDFVNAFYQYVPEKTKSYGAYSEKAIKKLLPLMRRGSYWAIGNIDEKTRRRLDNIINGVADDSISTCTREKLNNLTDITMCQGMPLWQACYAVYDRHSEAADTTKWEQPDDIDTYLSTELKQHSLRNPIVETVISETLRVVRDIWKAYGRPEEIHVELGRNLKQDAKSRKQDAIRMAENEQTNLRIRALLQELSNPECGVENVRPHSPSQMELLKIYENEVLQSTDDIPEEISNIIKDLGKTDPKKRPSLSDITKYRLWLEQKYQSPYTGHIIPLSKLFTPAYQIEHVIPQSRYFDDSISNKVICEAEVNKEKDRMLGYEFIINKGGSIVKGSFGQEFKIFDKVQYEDFVKQRYAHNKTKMKKLLMDDIPDGFIQRQLNDSRYMSKKIISILSNIVREDGEKEATSKHIIVTSGAVTDRLKKEWGIKDVWNDIIAPRFKRLNKLTDSNNYGMETEKEGRQYFQINVPIELSVGFSKKRIDHRHHAMDAIIIACTTRNHVNFLNNSAAASDRKDIRRDLQHTLCTKTKTDSNGNYVWRFNKPWDTFTQDTRQELEGIIVSFKQNLRIINKMSNYYQHYVDGRKTISRQNKGDGWAIRKSLHKATISGKVNLKRSKTVGFKEALNDWSAIKDKTSKAILQKIIAQYKNYDPKTIFKYFKDRNFKVEGKDFSKLEVYYNTSDKEPMSAHRVNIDTTFDEKEIRSITDTGIQKIMLKHLHTYDDAQGKTHPEAAFSPEGIEKMNQNIRTLNGGKDHKPIFKVRKAETLGMKFAVGERGHKDKKWVEADKGTNLFFAIYESEENKRSYSSIPLNEAIDRLKRGENVTDERDQNGNKLLFVLSPMDLVYVPDPDDAHIDEVKGNNNIFKMVSCTGTECYFVPETYANVICKGKELGSLNKVESYDGINIKKSCYKITVDRLGKVRKIFKG

SEQ ID NO: 8858 - protein, 1007 aa, unidentified
  REGION 1..1007: note = Description of Unknown: Cas Enzyme sequence
AQRKKAIRRLLTEHGLNNIEIIDIPETGKSVWDLRKEALERRLDDTEFARVLFHIAKRRGFQSNRKGAEPNDTEGKKALNGARELQEAMVSANAPTVGAYLATLPKKRNGDGSYDRFVTRDLLRQEVKKIFEAQKKFGNEKATPEFLLAYAGDGDPRKRNTLEGDGIAFYQKPLQSSENLVGICVLTGEKRAPKFSYTAELFVLWSKLNNARLRNTSGTEEALTPDQKNKLLNLAHKNKTGVTYRQARKELELDDDDRFNISYRKIRDEDDNWEKIRDTAEKADFLKLPGYHALKNALDTGSEADWRKWVGAEREKLDQIAWILSFEKDIKRIEGKLAGLSLDSRQIDRLTDITSFSKSVDLSPKAIRNILPYMQDGLTYDKACDAAGYDHSRKANKGLDKVPPFEDIRNPVVNRALAQARKVINACIREHGMPRNIIVELARDVGKPFKDRRDIEREQKKNQAYREEAKKHVAEILGIIPDNVSGEDILKYRLWKEQDGFCAYAGVYISPETLRDPVATQIDHIIPYSRSWNDSYMNKILCLTSENQNKGNDTPVEYFRRTGKSRDTLEAFARLLPPKKSENLLIENFDEEKAKDWKSRALNDTRYMARALKNHLEQSLALGEGNRVQTRNGALTANLRSAWGLGKTRENDRHHAVDAIVLACSTQGMVKQHADWNKYEARRHNPAQRPLPPAPWETFRGDVMDKVFGPKNEQGIRTGGIFVSRMPVRKVTGAAHQETVRSIKKLPDGSRQIVQRVKLSGLTLPMLENIVDKDRNVKLYTLLKDRLEAHGGKADKAFAEAIYMPTNDPAKQGPRINSVRIVTNEKSGIEINGGLASNGDMVRVDVFSKPNKKGKPEYYLCPLYVHDFAKEQLTKRLCTSGDQNDWIEADESFEFLFSIQQNDLLRLLGKDKEVWGYFVSMDISNASICIRTHDNNPSFNPKANKPENRGKKKGQGVKTLLAFEKYSVDYFGNKRRVKKELRLGLAHGDDSESGEAESLQRAVAAGE

SEQ ID NO: 8859 - protein, 1019 aa, unidentified
  REGION 1..1019: note = Description of Unknown: Cas Enzyme sequence
MSQFTILGLDLGPSSIGWALFNGGADGVPTELIDLGVRHFEEVAEPKTGVLLNKKRRTKRGMRKNIRRRRERLDSLLAAMRQGGLAPTGQHPFAESGVDPLAAYRTRARAVEEPVSLEELGRAIYHLARRRGFLSNRGTKFARIANLQEVANLLAEQEGERESTERGKKRNAEEEEKAKEEGVILKEITELRTQLDGRTLGQYFLQELEAGRGVRGRHTHRDMYEDEFERIWSCQSSHHPQLTQELRARIYRAIFHQRPLKEQHGFKGFCSMEPQRLRAQRSQLVAQRYRYWQDIVNLKVREPDDVEHRPLTREERLSLAHFLDGRVEATWEAVRKHLQLAKGTDFNLKKSKDQLRGNSTAVRLAAIATDWGSMDEAARERLVETLLTISDRGKLYLTMREKFGYDVETAYRLAKLELEDGTAALSSRAMRRILQALEQRPETATMYEAQLAAGYTIREVQQALRIERAPNRLEITNPRVRKGLAQLRRVMNALIAKYGRPDIVRIERATDLSLNEDEKRGLDKAKKQLERENAEADRWLRDQGIQNPSRSDRFWYRLARQCGWVCPYTGQPIPQELASTSRFQIEHIVPYSRCLDDSFNNLTLCESQTNQEKGDRTPWEAFGQTAAWEDMEARVQQWRGIGTGRKKSLFLRREAPPEDQMVARQLNETRYMSRKAMEFLEPVVGRVEVTKGGATAMLREHWGLFHALNTEGEKNRDDLRHHAVDAVAIAFTTRSVFMKATAHRKRHADGRVGKITPLSAETVPAAPEWLHDALKQRLASMVVSHEATRKIRDAFHEETAYGMRDPNAKVFHYRKNLVDLTASAIADIADHGLRRRAEEILKATSLPPKEALKEWLPMGTTVARRARLVKPMPGAKLLAVPNDNPTKFYPLGNNHHVAIFEDERGKRVGVFVSMLDAARRLRRVKAKHPVDTNPPSPGLRFVMWIAVNDTILLPDDDGPGLYRVASLWSTTNQICLYDLKKSNSSGSEGRLLKGPNTLRAVKVEVDPIGGVREVPEGKL

SEQ ID NO: 8860 - protein, 1424 aa, unidentified
  REGION 1..1424: note = Description of Unknown: Cas Enzyme sequence
FISKLADKDHRVVNSTTYHNTTTPRMKTILGLDLGTTSIGWALVKEAEPFSDEKSEIVRLGVRVVPLTVDERTSFEKGKSITKNAERTLKRGMRRNLQRYKLRRQALIDELKNAGWIGDDFIYSETGPGSTFRTLRLRAKSASEEVTLGDLARILLQINKKRGYKSSRKAVSSDDGQAIDGMAVAKEMYDKGLTPGEYVYQRMLEGKYAIPEFYKSDLQDEFDRIWTLQKSFHPELTDQLYRKLADRNKSQTWAICRDELGIQGLKSKFTGKERLKEAYHYRHSATTQEVDLEVLTCALQEINGQKASLSGLLSKISDRSKELYFNNLTVGQMLLKRIEENPNNSLKNIVFYRQDYLDEFERIWTEQSKYHVELTPELKKRLRDIIIFYQRPLKSQKGLISLCELETREIEVTVDGVKKMKNIGPRVCPRSSPLFQEFKVWQTINNILVNGAALDDEEKAIIAKELMFKDKLKDSDLLKLLFKTTKGLNVNFKEVDGNRTMATLMKACFKIAGNLGYDDTDLAKLSSEGQMDRIEEIFKKQGFKTGFLHFDSSLASPEFENQDSYRLWHLLYSYEGDKSASGNESLVKCIMGLCSMDEESAKILATCTFLPDYGSLSAKAMRKILPYMKDGLEYSAACAMAGYQHSKRSLTKAELDTREYSDRLSLLPKNSLRNPVVEKILNQMINVVNSVIDAYGKPDEIRIEMARELKKSAKEREEAQRNIASATAESQKIVEMLKGEPFFITSPTRNDVIRYRLYQELAQNGYKTLYSNTYIPKDKLFSKEFDIEHIIPQALIFNDSFSNKTLESRQCNLEKGKATAMDYVNSKYDEVGVQAYRDRVKGLIDKGISKTKAKWLLMDGKDIPEDFINRELRDSQYIAKKAREILESLVKFVVPTTGSVTARLREDWQLVNVMQELNWEKYARLGLTGVREDKDGRRIPFIQDWTKRNDHRHHAMDALTIAFTRRQFIQYLNHLNSKIDAVSWDKKDLDLRDYDLDDIKFGNMSTGDRYGIVKALQDRFLYKDGNDKYRFVPPIPLDEFRTQAKEQLSDILISFKAKNKVCTRNVNVTKNKGGANKKVQLTPRGPLHNETIYGSSLEYVTKENEKIGSSFDADKITTVCKKQFRDALLRRLEEFGGDPKKAFTGKNSPEKNPIWVDEHHSEQVPAKVRTVTMGQQFTIRKPVDATLKIEKVIDKKIREILQARLDEFGGKAEKAFTNLDENPIWLNKEKGIAIKRVTVSGPANPVSIRVKRDKDGKPVIDDVGKTIGSDFVTPGNNHHIAIFRDSSGKLQEHPVSFLEATITKSNGLDVIDRNYKKDEGWEFLFTLKQNEYFVFPNPETGFNPLDYDLTDPKNYAEISPNLYRVQKISRSNYMFRHHLETTVEENAMVKGIAWINIRSVSNLANIVKVRIDNLGRIVAVGEYD

SEQ ID NO: 8861 - protein, 1184 aa, unidentified
  REGION 1..1184: note = Description of Unknown: Cas Enzyme sequence
MKKEKSLTYQTSMENIRKRLDSREYSIGLDLGVGSIGIAVVAMEPDENGTLYANDIIYASSRIFTSSKGASDRRKYRGQRNSIRHKAHRLRKLWQLLATKGLMKPYSSETVENPATLRFSTEMLRKGPYKLRLKGLKNKLSLEEIGVALYHIANHRGSSSVRSFLNEEKTKEEEMAEEQMSKTQNLAKRYNVDTYIEVLDYFNMDEIKGYRNKDTRSSSFIMPIPTRDIILSEFENLINTQKQFYSDILDDNFISGLREIIFYENPKIVPEAGNCPYFPDEKKLPKAAFINEERRLWEALNNIRVLIDRQTANGLIYTEKMPLEKDEKEKLFIVLREGNNVTPSFISKAFPKYGKLKKDNILLQGSDKKNTEIKGFRFKKLEQLPYFSILKDDDKDKYISLFVNTPDDISLKNKLISQLGFSTKTAESAILDTPKLVGDYAPVGKTAMTLLMPFIKDGLSFQEAEQEAIQEGIIESQIEKKVYDYLPYYGEVVPSSTQSLAGKAWHSSFSSKIGKKGFIKPDTNKDEEKYGRIANPVVHQTLNELRKLVNEVIKIMGKKPHEITVELGRELKLGKEAREKLIQDNNNRAKDNEKIYTKYCVPNNLPTKYIKRFRLLEDQDYKCPYCLGSINCNDVISGNADIDHIFPKEDTADSSENNLVLAHKICNENRKKKQIPQKAFGSDTVLWNRIEQYLDNTPKMANKRWRFEMTDDKYQQYLAKNTFLNRFKSDNAFVARIACEYLLSLFPPENKFIAVRTIKGAETAALRKAWNLNGITNSLASLHSGEDNDTLDSKNRTDARHHALDAIIAAYYTYSAKQMIGSISQNNCNQDEIAQRVPIPKFFRRNKTLSTSEQRKDFRKTIENFIINNTFVSRKVDINRNGELLAATQYSILAIKDENLILYTKKRLKNINASTFFGNKSGSVEYALNGKFSKPKWINMEQEKQIDKLLEHNQQLFESIISNKDKAEEELQKENYNRISIGKKTISIDEKKIVTMALKLTGGIYYTLTNNQRKKVFIAKEPTLTEKGFAFDTGENFSLDLFHDENGKINGEIIRKINAVNAKYVPQYKKKGFSLFERIYPGDILEVDLIPRSPTGAPKDFVKGIKSPNAPLDKTFLVVKTFTEAGKSIQVYYDSLMSSKPEQKGSFYISVLNKQNIRKVCLTEAGLLIYRSRLLKDRENVESS

SEQ ID NO: 8862 - protein, 1394 aa, unidentified
  REGION 1..1394: note = Description of Unknown: Cas Enzyme sequence
MKSILGLDLGTTSIGWALVKEAENESEKSEIVKLGVRLVPLTVDERTDFEKGKSITTNADRRLKRGMRRNLQRYKLRREALIEELKKEHWIEDGFCFSEEGPGSTFRTLEIRAKSAFEEVSLQELARILLQINKKRGYKISRKSDSSDDGHAVDGMDVAKYMYDNDLTPGEYVYERILNGQYRIPEFYKSDLQLEFDKVWNFQKAFHPQLSDELYEKLKDKNKSQTWAICRETLGIQGKKSSSTGKERTKESYYNRQLALRKELDLETLTCVLQDINGQKSSLSGLLSAISDRSKELYLAHMTVGQMLVRRLHDNPNASLKNIVFYRKDYMDEFEKIWSVQSQFHPELTPELKKRLRDIIIFYQRPLKSQKGLVNLCEFESRTFNKCVDGAVKKITIGPRVCPRSSPLFQEFKICQTINNILIDGQCLDDDERADLVSELTYRDGMTDSEILRLLHKSPKEHRVNFKKVDGNKTMSALLKACEKIINSLGYDVDLSKGPARDKLFKIEEILGKEGVKTDFLHFDSSLSSPAFESQDSYALWHLLYSYEGDKSTSGDKSLVDKIKSLCSMDEGSAKIMAGCVFSSDYGSLSAKAMRKILPYMKDGLEYSAACAMAGYRHSKSSLTKEELASKEYVDHLKLLPKNSLRNPVVEKILNQMINVVNSVVDAYGKPDEIRIEMARELKKSASEREQAQKNISAASKVNESIVATLKGSPFFIDSPSRNDVIRYRLWEELKPNGYKTLYSGTYIPKESLFSKEFDIEHIIPQALLFDDSFANKTLEARWCNLEKSNKTAMDYVLSKYDEAGVQAYLDRVDSLVKDGISKTKISRLKMKGTEIPDDFINRELRDSQYIARKAREILESMVKFVVPTTGSVTARLRDDWQLVNVMQELNWEKYSKLGMTSYRQDRDGRRIPVIEDWTKRNDHRHHAMDALTIAFTRRQFIQYLNHLNAKIDVTDKSDIELRDYNLDDVDFSAKSPRDRFGIVRALQNKYLYKDEKQKYRFVPPMPIDELRMEAKRQLDSVLVSFKAKNKVCTKNVNVIKSRNGNKRCPQLTPRGPLHNETIYGKNLEYVTKDEKVGSSFDMEKIATVCKKSYREALLRRLNEFGGDAKKAFTGKNALDKNPIWVDEHHSAKVPGRVNTVSMEPVYTIRKAVDSSLNIDKVIDRRVRAVLQARLDEYGGNASKAFSNLDENPIWLNKEKGIAVKRVAIDESVIPIPIRNKRDKDGQFVLDYKNNPVQSDFVKTGGNHHAAIFLTPSGKLQDVVVSFNEAVMRKSLGLEVVDRNYKKDEGWQFLFTLKQNEYFVFPNPEAGFSPKDYDLMDPANNAVISPNLYRVQKIAKCNYMFRHHLETNVEEDSRLRNISWINIRTPSGLEGAVKVRVDNLGRIVAVGEYD

SEQ ID NO: 8863 - protein, 1062 aa, unidentified
  REGION 1..1062: note = Description of Unknown: Cas Enzyme sequence
MDYILGLDLGSTSLGWSVVELDKNGVPVRLERMGVRIFSDGRDSKTKEPLAVTRRTARGMRRRRDRYVMRRETLMNKLIKYGLMPENASERKALERLNPYELRVKGLDEKLSPHELGRVLFHINQRRGFKSNRKTDRKNDEAGAMKSAIKDLTEKMTESGARTLGEYLYNLNKDRKSTQNFAPVRVRTHLEKSKAVYSMYPTREMYEDEVRQIFLKQTLSDEIKADLFKTIFDQRPLKTPPKGLCPFEKSEERCYIAFPDFQRFRALQQINQLRVRDDFTEVELDDKQKRELRHWLLDDFSKLDKDYRLTFAAIKKILKLPKNVKFNLESERRKGLDADKTSAQLRPLFGTVWAEKQDEIVDLLLNMENEDELKQALQKYGLTDEQIEQVLDVNLPDGTGSLSLKAINKINPFLEQGMLYDKAVVAAGYVFSKKFDKLPDKYETFIDPEYGTVFNELPYYGQALPERVIGGTHKDEDKDDEAKFFGKINNPTVHIALNQVRKLVNALVKKYGHPNSIVVELARDLKLSRDEKKRLEKEQTQNEAENKDIGTELMRLGIKNNYDNRMKYKLWKDSSKNPMQRCCPFCGKQMPKEETAMSAEFEIEHLLPFSRSYLDARSNKVLSCRRCNREKDNRSPWEAFHNDAKRWNEILARAEKLPENKRWKFNEDAFKKLQDENGDVLARMLTDTQYMSRIARQYLCFAANPKRVYGIPGQLTSKLREHWGLNSILSEQHEKDRTDHRHHAIDAFVVACTSRGTLQKYATERRDFDEMPQEKAPHIPFPTFRLAEIKDAFDKIAISHKPDHGNPQKAIRQGKTVAKLHEETYYGMIGDGEKKGTVRLTKRVPCLAFTKSFNPQKKPYKVEDIVDQSGTANKIRERLENSDPADYEKIVMEYFNERGMKHVKVFEDRNKNVVLAFNDRKTKQPYRYAIYGGNAYAEIYCSDRGKNAGKWQIEIIPNYRAHQKNFVPNWRHTDAHAKLIMRLHIDDMVAYEENGKTVIARVKKMTSGKIYFRENKIAKEDGDSKSWAAYPSGMQEKNMRKITVTVDGVVLDSKRPKGGADG

SEQ ID NO: 8864 - protein, 958 aa, unidentified
  REGION 1..958: note = Description of Unknown: Cas Enzyme sequence
VKKNGKKVPIDKKSTRADFYSFLKKILDKMIFEDDSERKIAQEILRKIENETFLPKQIISDNGVIPYQLHEAELNLILKNAALYYPFLEKKDEDGYTNIEKIQSIFKFRIPYYVGPLNTYHSDKGGNSWAVRKQPGKIYPWNFDEKIDAEESAKNFIERMTNKCTYLVGKDVLPKESLLYSKFMVLNELNNLRIDGEKVSVEIKQDIYENVFKKYQRVTGKKVKDFLIRSGVITREHELSGFDQNFKSSLKSYHDIKQIAGNVNLSQNQKEDIIRDITIFADSQKMLKKRIKIKYPQLSDKQVSQLAAKKYTGWGRFSREFLENVESVETETGEILNIISALWETNENLMQLLSNRYDYLAEIKRMNEEVEDKSEVVTYDDVRELYVSPAVKRPIWQTLKIVEEISKIMGEKPTRIFVEMAREPGQKGDVKVSRKTKLLELYRACKKEVPELYENLVNEDDNRLRSDKLYLYYTQMGRCMYSNEIIDIEDLFTNRYDIDHIYPQSKVMDDSLDNRVLVKRELNSSKTDTFPVPKEYMDKSKSLWDMLRHKELITKEKYFRLTRRDGFSENELSGFIARQLVETRQSTKAVTQLVTKVYPDSEIVYAKANAVSEFRKKFELLKVRSVNDYHHAKDAYLNIVVGNTYYVKFTKDAAWFVRNNPGRTYNLKKMFEKETVRRGDETAWIPGKDGTIKTVKRIMKKNNILFTRKAYEVKGGLFKQQIMKKGKGQIPIKNSAIDNRLCQKEKYGAYNKARGAYFMLVESTDKNGKRIRTLEVVPVYLVKEMEKSEDAAIRYCIEKLGLVNPDIRLEKIKIDSLFNVDGFKMHLSSRNGQQLVFKGAEQLILDAESQKILKKTGKICADYKINKNVNISEKMELTDDMLIRLYDIFLLKLRDTIYKIRLSKQYETLKYKRNNFIKLSILEKCIIIEEILHVFQCNIVNANLTIINDGKGKDAGKI

SEQ ID NO: 8865 - protein, 127 aa, unidentified
  REGION 1..127: note = Description of Unknown: Cas Enzyme sequence
  MOD_RES 124..127: note = Any amino acid
MTEKSSYSPKKYSLGLDIGTSSIGWAVLDLDKERIHDLGVRIFERPEDPQNGDSLAKPRRDARSARRRLKRRRQRLNHLKQFFIDQNILTKDQVEEVLDCKSDFNKLDVYKLRAKALAEELSPXXXX

SEQ ID NO: 8866 - protein, 928 aa, unidentified
  REGION 1..928: note = Description of Unknown: Cas Enzyme sequence
LRELEAIIKTQRNYTLKNVPEQTINELIYGIDDGQVTNVSAIMYQRPFMTKELIEKMVGDCTFEKNEKRAPKASYSFEVFRLASDLSHLVFIPRDASKRQAKRENLEVRLSPEQISKVIDLAKNQKSLTYKKVRSTAGISEDYVPKDVRGKKKEGDEFGEDNTFGGLKAYNDIRSALKDLPEDWAKIDNESTINQIAYILTTQKADEGIRAELDSLPLSDKAKEAIIKIKPTNFKAFGHLSIKALQKITPHILEGMTYDKACEAAGYDFKKQSASLEQITNPVVKRAITQTLKVVRAIERKYGKPYFIKVETARDLAKNFKDRKVIENENKENQARNQSIIQTLNENGVVTPTGQQIIKVKLYREQNGVCLYSGKSINFETMLRDDNAYQVDHIVPFSRSNNDGITNKALVLTEENQKKGNQTPFEYFGADEKRWKEFAARVESIYKTRDIKTADKATNAINYKYNGYAMKKKQNLLLQDYKNDSWNVRALNDTRYITRFIQNYLRQMVDFAEGEEKQRVIAPNGTTTAYLRKRWGLAKDRAEDVLHHAKDAAVVAAINPKIVYQANLFSKEQEMKKYLTNVKTIDEKREILLASTNKNTGEITDETTFTKAQRDLAIAEYFKLRSNEETKNRFPSPWPDFSKEVMKRTLKTDIATLQNELRGLDNYDEEFRLDVKPIFVSRMPRRKATAQAHKETIRSPKVKDNDQRTVRMPLNKIKRKDVENSVLKESDKWLYDKLLERLDAHDNNPEKAFAEPVYKNDKKFDKNGKQLSPVSTVKVYSTQPSGFYINNGKAFVNNGSMVRLDVYQKPNKKGKIEHFFVPVYAHQVGKNKPTPTKILPAPKGFTDIDKTFTKVCSLYPNDYVRIYLKNEIREGYYVKYNVANGAMQLLPNYATGKNQNTFVQVYGKNAQAIERYDVSVLGDNYRWL

SEQ ID NO: 8867 - protein, 1207 aa, unidentified
  REGION 1..1207: note = Description of Unknown: Cas Enzyme sequence
MGKKVLGLDLGVGSIGWCLITLDKDEKPQSILGMGSRIVPLSADDATEFTQGKAITKNKMRTVARTIRKGMDRYQLRREALKKVLREHAMLPDEALIKLPLLELWELRARAATPGEQLSLTELGRVLLHINQKRGYKHAKADEAAEAETNKGKETGYVAQVKGRYQILKEKGQTIGQHFAGELRANQQTAPRGVYYTYRIKEQVYPREAYIEEYDRIMAAQRVFYPELLTDALIGRIRDRIIFYQRPLKSCKQLVSFCEFEKKEKVIRVKHTNKEGVQELVEKTITIGPKVAPKSSPIFQVCKVWESIHNIRLYHPDGTERKLEQEEKQKLFDYLQRNDKLSLTTLRKELKIKPKDKLWCDKLLVNGIGGNTTAAILRKALKGYDQYEGLLRFNLTTRDSHEVNVIRPIIDESYQNEPLYKFWHILYSIEDRAEMRSALIGQLGIKAEDLDGGLMDALYKIDFVKQGYGNKSAKFICKLLPHLQEDKMYSEAAEAAGMRHSDSMTAQERDERSLLDEIPLLQKNALRQPVVEKILNQMINLVNALKREHGEIDEVRVELARELKMSREEREKATKNNNAREKENKTTAEKIKVYDVTPTKSRIQKYHLWKESGGKCIYCDNPVGIVQFLRGEEIEVEHIIPRSILFDDSMSNKVCACRSCNQEKGNRFAMEYIQSKGWEQDYIERVDSLFQGKTISYSKRQRLLMLPKDLPEDFIERHLRLSQYISREAQGILRKGIRLVSASEGGVTAKLRQLWGYDNILRDLNLDRYRSMGETEVVTVEHRDGQRTDERIKDWSKRKDHRHHAIDALVVACTRQSYIQRLNRVNAEADRQEMDAFIKEQQQVHKLSKKEKLSLLEHWLIRQPHFTTKEVMKHVEEILISFRPGKRTVTRGRNVYKRSGKTDVQRDVLIPRGALSEETVYGVISVDGENKVVCKYPLQKFLDTKETNVDKIADQAAEKIVDKVLREKIRERIKRYGKKEAFAEPLYLDEAQTQVVRSVRCIISKDQAKLVPLRYNAESEAVGFVAPGNNHHLALYRDGGGKMRASVVSFFAAVERARYGIPMIVLNPRETREKARIIPDLPESILSKLPEEDWVLEETLQEGEMVLLGMENDAIEEAIKKKDYSKLSRYLYRVQSLSYNDYKFCFHLETEPEKKEKKEGEDKKRGEKAKNTAVMTPKRYRIRSLVTYQELNPRKVKIDLLGRISLV

SEQ ID NO: 8868 - protein, 1074 aa, unidentified
  REGION 1..1074: note = Description of Unknown: Cas Enzyme sequence
MKHPYGIGLDIGIASVGWAVVALNENAEPYGLIRCGSRIFDKAEQPKTGDSLAAPRREARSARRRLRRRSLRKADLYELMEKNGLPGKAEIEQAVQAGHLPDVYALRVQALDGPVTALDFARILLHLMQRRGFRSNRKADDAQKDGKLLQAIDANTRRMEANRYRTVGEMMYRDPVFAEHKRNKAENYLSTVKRDQIIDEARLVFAAQRQYGATWASPEMEAEYLCILTRQRSFAEGPGKGSPYSGSNRVGTCTLEGKSEQRAAKAAFSFEYFTLLQKINHIRIAENGTSRTLTPAERQVLLSVCSQTDKLDFARVRKALALPEEARFNMVRYRGEQTAEACEKKEKITALPCYHKMRKALNTLRKDHIRNISREQLDAAGAALTNPENEDKLREALKQAEFEPLEIEALLTLPSFAGYGHISVKACRKLIPYLEQGMNYNDACQAAGYDFQGRQNGEKAQFLPASTEEMEDITSPVVRRAVAQTIKVINAIIREQGESPVSIHLELAREMNKNFQQRSELDKAMRDNSAENERLMKELNELFPGRTVTGQDLVKYRLWKEQDGRCAYSIQPLELDKVITVSGYAEVDHIVPYSISFDDRRTNKVLVLASENRQKGNRLPLQYLQGKRRDDFIVYTKANVKNFRKRQNLLKERLSEEDGKGYIQRNLQDTQYIAAFMLNYIRNHLAFADCSGAGKRRVVAVNGAVTAFLRKRWGLSKVRADGDLHHAADAAVIACTTQGMIKRVSDFCKRAETTAVRNEHFPEPWPHFRDELTQRLSACPQEDLMKINPVYYATVDISSIQPVFVSRMPRHKVTGAAHKETIKSRLDDTHVVQRRNITELKLDKDGEIAGYFNRSSDTLLYNALKARLLAFGGDGKKAFAEPFYKPRADGTPGARVQKVKICDKVTSTVPVHDGKGVADNDTMVRIDVYYVPGDGYYWIPVYVADTVKPELPSKAVVAYKSSAEWKEMKDEDFLFSLCQHDLVRIESKRLMKFKVQNRDSTLEKEMPVNKILAYFEGGNIATGAVTLTTHDDAYIADGLGFKTLQKVQKYQVDVLGNYTPVKKEKRQTFPAQRR

SEQ ID NO: 8869 - protein, 1149 aa, unidentified
  REGION 1..1149: note = Description of Unknown: Cas Enzyme sequence
MLLPQIGNNRAPHCEVPGLHFRETLPKGPLEWHNTHMSASSQNVERIRYKVGIDVGLRSIGFCAVQVDADDRPIKLLKTVVHVHDAGVSSADAKKADTRKLVSGVARRTRRLYRARKRRLVDLDRHLEGLGWPLVDPARSADPHEPWFAREKLVSGRVGDANERMELLSVALRHIAHHRGWRNPYSTVESLQTDAPPSEFLQGLNQRVSEKLGMELDPGLTQGQLIAKLLHRFPNAKIRGPEGILSGKLHQSDNAGELRLICRTQGLDRHMTEELVRLVFQAKSPKANKEMRKRIGRDRLPGQEAHIRAEKAHPVFQRFRIVAVLANLRIRETHVDRRLTAEEMRTLTDFLLGLAGSEQPTWEELADNLNIERHQLRGTAKASVDGAPVLRFPPIDVTTDRIYASKLKWLAEWWRQADEERRGYMVDALSNSGGSEDEPYLDDEIAEMLEQASEVDQAKLDGLHLPGGRASYCLDTLRRLTDAMLGGGLDLFEARKAVFPIDDDWAPPTDPIGAPVGNPPVDRVLKHVARWLKAATGRWGAPQAVNIEHVREGLGSEKAARELTRMNDRRRRNNQKLVEEMGKKLGMSGRIRRTDRMRYEAIRRQNCECLYCGRPITYQTMEMDHIVPRAGAASTNTRSNLVAVCRRCNQQKDKLPFAVWAEGQDSPKEVSLEGAVQRVRHWLRDAGMGEKELRALRIQVIARLKSRLPDEEFDGRSMESVAWMANELRARVEAQYRGSGTTVRVYRGALTAEARKASGFEGRVNLIGGRGKDRFDRRHHAMDALVIALMNQSIAQTLALRLNMRDSQWLTQSEQTWRQFHGAPGEAERKWEAWERDMRDASDLFNLALDGGRIPITENVRLRVGNGRVHEDGVIRFKPEYAVKGKSPKEGGVRLLGDSLPSELIDRAETPALWTALTRLPEYDRKGGLPENPDRVIRVNGVVVQAADRIRFFGTPASVAVRGGYAKLGESIHHARIYRINGKTPKYAMIRVYTIDLMRFNHEDIFTVDLKPSTISMRCAEKKLKQAIGEGNAEQIGWLVEGDQLELDAAAYTKGVGADLMREYPMATCWRVAGFPDEAKLRLRPVLLAEEGLREDASKSVREVLENKGWRPAVNALLSPGSVRVVRRNVLGEPRFKSSGHLPTTIDLV

SEQ ID NO: 8870 - protein, 1195 aa, unidentified
  REGION 1..1195: note = Description of Unknown: Cas Enzyme sequence
MARKVLGLDLGVGSIGWCLITLDEDEKPQSILGMGSRIVPLSTDDATEFTQGKAITKNKMRTVARTIRKGMDRYQLRREALKKVLREHGMLPDESLIKLPLLELWELRARAATSGEQLSLTELGRVLLHINQKRGYKHAKADEAAEAEAEGKSKSKKEKEGYVAQVKGRYQALREKGQTIGQHFAEELRANQQTAPRGVYYTYRIKEQVYPREAYIEEYDRIMTVQQESYPEILTDELIQRIRDRIIFYQRPLKSCKQLVSTCEFEKKERVVQVKRINKEGVEELVERTITIGPKVAPKSSPIFQVCKVWESIQNIRLYYPDGTERKLEQEEKQKLFDYLQKNDKLSLTALRKELKIKPKDKLWCDKLLDKGIAGNTTTAILRKALKGYKDREKLLRFDLKNKVDEDGVILPIIDESYQNEPLYKLWHILYSIEDKDDMRRALVGQLKIKEEDLDDGLMDALYKIDFVKQGYGNKSAKFICKLLPHLQEGKMYSEAAEAAGVRHSDSMTAQERDERSLLETIPLLEKNALRQPVVEKILNQMINLVNALKREHGEIDEVRVELARELKMSREEREETTKSNNAREKENKTKAEDIKEKHGLTPTKSRIQKYRLWEESGGCCIYCGKHFGVVQFLRGEEIEVEHIIPRSILLDDSMSNKVCACRSCNQEKGNRFAMEYIQSKGWEQDYIKRVDSLFEGKKISYSKRQRLLMLPKDLPEDFIERHLRLSQYISREAQGILRKGIRLVSASEGSVTAKLRKLWGYDNILRDLNLERYRSMGETEVVTVEHRDGARTDERIKDWSKRKDHRHHAIDALVVACTQQRYIQRLNSVNAEADRQEMDAFIKVQQQKPTHSKGEKLSLLENWLIRQPHFTTGEVMKHTEGILVSLRPGKRTISRGRNIYKRSGKTGVQRDVLIPRGALSEETIYGVIRVNGEDKVVCKYPLQSLKAKDVVSIVDEVLREKVRERITQHGEKDAFAEPLYLDEAQTQEVRSVRCSTGKKQAKLIPLRYNDKSEAVGFVAPGNNHHLALYKDDDGNVVESIVTFWQTVERARYGLPIVVASPREVMEKALAIPELPESVLKALPASNLCLMEVLRINDMFLIGMKDEEIKAAIEGEDYPTLSRHLYRVQKLSSMYYVFRYHLETEVKDEKKAGGKDEKEEEVKIPKFYRVQSMKAYEKINPRKVKIDLLGRISLA

SEQ ID NO: 8871 - protein, 1167 aa, unidentified
  REGION 1..1167: note = Description of Unknown: Cas Enzyme sequence
MTQKSSYSPKKYSLGLDIGTSSIGWAVLDLDKERIHDLGVRIFSGQIENKKRRQFSSAQRMNKRKKQRLKHLKTVFINNGLLSSDEINLALKDQEITENIYSLRAKAATQQISHRELFRVLYLIAKKRGFKSNRKSDPNDNESSGTKFKEQLAKNSATAEKYQTIGLMLENDPVYANQKHNSKDNYIATFQREDIRKEVEIILSKQFEKELNSPQISDKYKNIIETILDETTVDDSGEKQYLGMFTQRPYTNASLIEKMTGFCEFEKTERRYVKASYTTEEYIFLSNLSNIVILDTNNNDERYYIDKEDIGRLLALAKQEKNIKCSDIRKVLSLDKSICFSSRAIEDTYRDSIKHANKKYSAPQNKEKLAEALETARKIRDRSRKSIERQKVCEKGLETFCIFKRLFRDSFLEQKIDENPYLIDDIAYILTVNIDDESIKTNLQQLEFLSDHDISVIMNMPNDDLKHFSGRSNLSCLAMQNIIKYLKEGYQSHLAIQKAGYDTKEIYQGNNITLPSLKLSDFSQYGDETFEKYGINSKVAQRALSQSIKLINAIIKKYGSPTYVRVELAREFAKTEEEREKIERNNKRNREKNREYEEIINQIFKDNHKLPPSKIGHIIRKLTLRDQQDCKDIYSGDDIDITTLILDESAYEIDHIIPRSKRFINDMNNLVLTSTKNNREKSNQLPLTYISDPTKQKEFLERVNLIKDKQKRNNLRLDSCEDQDNMTERALNDTKHIARFFKNYIQRNLLFAGDDEENGRQRVFAIPGPVTAYLRARWGFDQKDRDANALHHAIDACVIVATTPKLLSRVMYHESHREQGKLYSERQAAKQDTGDFGMQAYLQAKKMYYDSLDRVSGEIINPHKHNVAYKIMQEHEKRYRYSFPRPWTDFMREVSLRAGDIDKKTLQNKLVEINNYDAEFRRTLHPIFISHMRYGKTRGSGHGEQIYKKPYKDDSRIIQHKSIYNISPNDIDNSPIAISDRKLYELLKDTFGKIELKGDQKEKDKRIDKNTVIHKPSKNPDKSPAVKRIPVYVDKTPISHDVRGGAVLNEKGTVAYSILCQSSTTGHYKVVPVYFRQIHANENIELEEGWKYISRIVPNDFVVIIKKDGSKISGYHKTRKGDTLISILPHQHSDSSRAISQRIGTAKEIRIYNISILGDNAPEEEYK

SEQ ID NO: 8872 - protein, 1190 aa, unidentified
  REGION 1..1190: note = Description of Unknown: Cas Enzyme sequence
MLMSKHVLGLDLGVGSIGWCLIALDAQGDPAEILGMGSRIVPLTNLGDDKAFSKGKAFTANQERTARRTMRRGFARYQLRRYRLRRELEKVGMLPDAALIQLPLLELWELRERAATAGERLTLPELGRVLCHINQKRGYRHVKSDAAAIVGDEGEKKKDSNSAYLAGIRANDEKLQDEHKTVGQYFAEQLRQNQSESPTGGISYRIKDQIFSRQRYIDEYDQIMAAQRVHYPDILTDEFIQMLRDEVIFMQRPLKSCKHLVSLCEFEKQEKVMRVQQDDGKGGRQLVERRVKFGPKVAPKSSPLFQLCRIYEAVNNIRLTRPDGSPHDITPEERTKIVAHLQSNASLSFAALKKLLKEKALIADQLTTKSGLKGNSTRVALAAALQPYPQYHHLLNMELETRMMTVQLTDEETGEVTEREVSVVTDSYVHQPLYRLWHILYSIEERDAMRRALITQLGMKEEDLDGGLLDQLYRLDFVKPGYGNKSAKFICKLLPQLQQGLGYSEACAAVGYRHSNSPTSEEITERTLLEKIPLLQRNELRQPLVEKILNQMINLVNTLKAEYGVDEVRVELARELKMSREERERMAEGNRRREKENKAIAEKIRECGLFPAKSRIRKYMLWEEAGEKCLYCGQILTLSQCLNGDDMEVEHIIPKSVLYDDSYGNKTCACRRCNKEKGNRTAFEYIRAKGWEAEYMERINGLLDKKAISYSKHQRLRWLKEDIPSDFLERQLRLTQYISRQAMAILQQGIRRVSASEGGVTARLRSLWGYDDILHTLNLDRYDSMGETECVSREGETTEKLRITNWSKRKDHRHHAIDALVVASTRQGYIQRLNRVSSESEREAMSGEIEVQKATKTDKLSLLERWLTQRPHLSVRAVSDKVAEILISYRPGKRVVTRGRNIYLRHGKKCVQSGLLVPRGPLSKETVYGQITVNGEPQIVCKYDLHSLKAKDVDYVVDLALRKRLKELLAQHGGKEKEAFAGDVYMDEAGTQGPIRSVRCFTNLLLSKMRPAKYNERREAIGFVATHNNHHVAIYRTPQGKLEESVMSFWDVVDRARYGIPLVIRHPREVMEQVLQRGGIPESVLRMLPSSDWVYVESIQRNEMVLVGLSDEEIQQAFEARDYRKLSDHLYRVQKIATGNYMVRYHLETDTDMGNRSGRIPKLYQLSLTSYEEKNVRKVRVDLLGRISLL

SEQ ID NO: 8873 - protein, 1280 aa, unidentified
  REGION 1..1280: note = Description of Unknown: Cas Enzyme sequence
MKKILGLDLGTNSIGWAVVNADEMTRDDGSRHLKPNSISAAGSRIIPMSADVLGNFESGITVSQTKDRTDKRMARRLHERALLRRERLLRVLSLMGFLPKHFADKIDRYGKFTDESEPKLAWRKNTEGKYEFIFQEAFNEMLAEFKDKQPKIVKEGKKIPYDWTIYYLRKKALTQKISKEELSWLLLQFNQKRGYYQLRGEEEEEKPNENIEIIAAKILSVEKKEKDKKYDKYWYEMPLDNGSTYRAAFYNDVSSWKNETKEFIKKTTILKEGTKKEELSFLPSPDEIERMDAQRKGQLYTKIKLRTEKNIENSHKTVGCYIYDSLLNNPKQKIIGKLVRTVERKFYKEELTQILKKQVELIPELRNDNLYKQCIEELYPINEAHRNTIAKTDFANLFINDILFYQRPLKSKKSQIDNCPYESHNYIDSKTGETKTAPVKCIAKSNPLFQEFRLWQFIHNLRIYQREKEINGKLLTDVDITNECLKSEEDYVKLFDWLNDRESIEQEELLKHLFNTKKSKNKENPYRWNYVEDKVYPCNETRATILKGLSKCGINASVLSPELEMALWHILYSVEDKKEIEMALTHFAQKQGWNGEFVTVFSKLKPFKKDYGSYSEKAIKKLLSLMRMGKYWNQENIDKNTLDRIDKIINGEYDERISNRVRDNAINLKDISDFRGLPVWLACYIVYGETKDCTKWNTPEDIDAYLKEFKQHSLRNPIVEQVVTETLRTVRDIWKQEGQIDEIHLELGRDLKNPTDKRKKMSENILKNENTNLRIKAMLMEFMNPAMGIENVRPYSPNQQDILRIYEENALDNLTKEDKDFDFISKISKQAQPSKSDIVRYKCWLEQKYRSPYTGKTISLSKLFTSAYEIEHIIPQSRYFDDSFSNKVICEAEVNKLKDRQLGYEFIAEHHGEKVQLSQGEVVEIFSVEAYEKFVKENYANNRVKMKKLLMENIPDDFIERQLNDSRYISKVVKGLLSNIVREKVDDENYEPEATSKNLISCNGAITDRLKKDWGMNDVWNGIILPRFIRMNQITGKDCFTTTNAEGHLIPQMPLELQKGFNKKRIDHRHHAMDAIVIACTTRDHVNLLNNEAAHSKYNTNRYQLQRKLRRFEKTVIDGKEREVAKEFLKPWDSFTMDSKNILENIIVSFKQNQRVINKTTNAFQHFDENGKKTFAKQGKGDSWAIRKPMHKDTVFGEINLRKVKSVSLNEAIKVPERILNKNIKEKILELKNNKIDAKNIKKYMEENAKVGLFFVRRLAMALGQADARTVNLTQKHMNG

SEQ ID NO: 8874 - protein, 905 aa, unidentified
  REGION 1..905: note = Description of Unknown: Cas Enzyme sequence
MNNKPYSIGLDIGTNSVGWAVITDDYKVPSKKMKVLGNTDKHFIKKNLLGALLFDEGTTAEDRRLKRTARRRYTRRKNRLRYLQEIFTEEMSKVDSNFFHRLDDSFLVPEDKRGSKYPIFATLEEEKEYHKNFPTIYHLRKHLADSKEKADFRLIYLALAHMIKYRGHFLYEESFDIKNNDIQKIFNEFISIYDNTFEGSSLNGQNAQVEAIFTDKISKSAKRERVLKLFPDEKSTGLFSEFLKLIVGNQADFKKHFDLEEKAPLQFSKDTYDEDLENLLGQIGDDFADLFLVAKKLYDAILLSGILTVTDPSTKAPLSASMIERYENHQKDLATLKQFIKNNLPEKYDEVFSDQSKDGYAGYIDGKTTQEAFYKYIKNLLSKLEGADYFLDKIEREDFLRKQRTFDNGSIPHQIHLQEMNAIIRRQGEHYPFLQENKEKIEKILTFRIPYYVGPLARGNRDFAWLTRNSDQAIRPWNFEEVVDKARSAEDFINKMTNYDLYLPEEKVLPKHSLLYETFAVYNELTKVKFIAEGLRDYQFLDSGQKKQIVTQLFKEKRKVTEKDIIQYLHTVDGYDGIELKGIEKQFNASLSTYHDLLKIIKDKEFMDDSKNEAILENIVHTLTIFEDREMIRQHLTQYASIFDEKVIKALTRRHYTGWGKLSAKLINGICDKQTGDTILDYLIDDGEINRNFMQLIHDDGLSFKEIIQKAQVVGKTDDVKQVVQELPGSPAIKKGILQSIKIVDELVKVMDHAPESIVIEMARENQTTARGKKNSQQRYKRIEDSLKNLASGLDSNILKENPTDNIQLKNDRLFLYYLQNGKDMYTGEALDINQLSSYDIDHIIPQAFIKDDSLDNRVLTSSKDNRGKSDNVPSLEVVDKMKVFWQQLLDFKLISYRKFNNLTK

SEQ ID NO: 8875 - protein, 1073 aa, unidentified
  REGION 1..1073: note = Description of Unknown: Cas Enzyme sequence
MEKRNNGLVLGLDIGVTSVGYGIVNRETGEAVDFGVRLFSEWDPANNQNRRAKRSGRRLRSRRKNRLQDMKKFLVDQGMISSDYAFHLDPYALRVKGLSEKLTDEELATVLYNLAKLRGSSLETVEDTDDTKSDDSLSTKNNLRINDALIKSGKYVCQIQQERLSEKGKLRGHINNFRTKDYVSELKQILSNQGKSKDFNDYVENLIVRRRDFSDGPGSQKSPTPYGRWLTKDQEEPIDLIEKMRGKCSYYPDQLRCAKMAYKADLFNLLNDLNNLSVKGEKLERDQKEQVIEYVNEKGSIKPKQLAKLLGLSDIDDISGFRIDKSDKPILTEFKGYIKVKKVLENSGLYHDHELVDQIIDVLTRDKVVERRANEIRKLSNKFSEEEIEALANLTQISGYHSMSAKAINEFNKEMLISPLNQMQIITNRGNQNDRFNKLKGMKEIHADDTAILSPVAKRAQREAMKVVNRLRELYGEFDSIVVETTRAKNSQEQKTKIKESQAFFEKEKKRAQQIVDENKYNLTVNAKLIQKLRLYTEQNCKTAYALVPIDLDLLISDPTAFEVDHIIPISISYDDSFSNKVLVTRWENQIKGNLTPLQAHKNHKFGEYSDLASYIANVNDLRKMNGMRYEKKKNLLLSDEDLTKFDTQKKFIARNIVDTAYAERVVLNTLQDYFRANEISTVVNTVKGNLTHMFRNKIHLDKERSDIDTGDAHHAIDALIIASLKVFQRFGEILDKRPETIIDEETGEVLEIIEDKKFFDPRYIEIVHKLSLIEKDVTKFSYKIDTKPNRQVADETIYSTRNINEEDLVVKKYKNIYEEKFVTLANDILENNVEKYLMYRNSPETFKYISDIILYYAKEYRDDEKLMKNGLFVKNPLNRYYEEHHEYLHKPSKHNNGPSIISMKYTDGRLGNKIDISKNYSVDTEKKKVVLQQISPYRTDFYYSPTEGYRFVTIRYSNVYYSSTQGLYIIEKDWYKSQKKSKKIDDSFEFCFSMHRNEIIRIKKEDEDMMWRFTATNNDSTNKIEVKPIGHKINKQLILAIGKKIFLLEKYATDVCGNLYKVTNQELKLEFK

SEQ ID NO: 8876 - protein, 1138 aa, unidentified
  REGION 1..1138: note = Description of Unknown: Cas Enzyme sequence
MVTSSENIPGIRYRVGIDVGFRSIGFCAVEVDRADQPVKLLNSMVFIHDAGVDPNENKAAKSRKLTAGVARRTRRLYRTRHQRLVNLDRVLSKEFGWPLPDLMAFKDPREPWHVRSKLLEGYIADDDKRKAALSIALRHIARHRGWRNPYAKVESLLQPAEPSDFLKGLNERISTSLGRSFPADATPGQLVDAYLAHPDYVKKAGTPKLRGPKGILAGKLHQSDNAEEIRRICEVQQIDPADRDRLIRAVFQAKSPKGSAKERGLVGYDELPGQGKHVRAEKAHPAFQKFRIVSVLANLRVREGRAERPLTPEELQGLTDFLLVAGLKQEVTWQDLADNLGIERSDLRGTAKASFDGSPVLRNPPTDVTTEKILACKVKWLKEWWKDADDEQRGYFVDAFSNSGGSEDSSDVNDEVAELLEQATEDDQLEFEKISLPQGRAAYSLDSLRRLTDRMLRDGVDLHTARRLEFNVGDDWKPAVEPIGTPTGNPAVDRVLKQVSRWLHAATERWGEPTVINIEHARDGLGSERVARELMRENDRRRSANAAAVAEMAAQLKLSGRVRRSDQIRYFALQRQNNECLYCGTEITFTTAEMDHIVPRADGSSTNDRSNLAAVCRTCNHKKGAVPFAAWASSDRANTGVSLKGALDRVKFWVRDNGMSPKQFKQLQREVSARLKSRKPDEEFDGRSMESVAWMAVELRTRIEGFYRTRDEESVPSVCVYRGQLTAEARKSSGFESRVNLIGGRGKTRFDRRHHAMDALVIALMNPSVSRTLALRVNMRDAQRIAGLEETWKNFYGKPGEASNRFESWRESMLRGVELFNIALSDNAIPFVENIRLRVGSSVIHDATVHSFCPPKTPDGEQIITKGCGEQHRLGDALPVELIDRAETPALWTALTRCPDFDPKKGLPENLNRTISVNGTRVGPTELLNFFGSSAACLKVRGGYVELGSSIHHARIYRIDGKKTAYAMVRVFQVDLLRLKDQDLFTTPLKSSTISMRTAEPKIRQALADGTATQIGWLVEGDELQIDTSKYSGGFIGEVLERYPEATSWRVAGMPSSSKLRIKPLLLSKEGFVDEQQAERLGVEATSEAVRKTVDTPGWWPAVNVIFGAGTVRVVRRNCLGEERWRSSASLPVSMSME

SEQ ID NO: 8877 - protein, 1095 aa, unidentified
  REGION 1..1095: note = Description of Unknown: Cas Enzyme sequence
LLSYNRVMKYSIGLDIGTTSIGWAIIDEDNKRIEKVGVRIFEKPENPKDGKSLSEARRTARSARRRLKRRRQRLNFIKRFFRDNNLLTKEQIEELLKPENKLDPYKIREKALNEKISNEELFIGLYHIAKRRGYKSNRKSAEENDKENSKVLSAISKNEKLLKEYKTVASALNSNEKFIAHKRNKAEDYSNSFVRANFEDEVKLILKIQEEFGLNLSDEKINFLLFGNEKEGNFNGIFSQRPFMTSELIMKMRGKCNLEKSESRTPKASYSFEMFRLAENLSHLRVVINKEERGLTEEEISKVIEKAKDIKVLKYQHIREVLGYKKDENFSFPINMIRGEIKKDSKNNGEENKFGELSFYHKVKAALSNTPEDWQKVCDNNYRMLDELGEILSCNKDDENLRKEISKFNLSEDAVEALMMINVSGFGHLSFKALRKILPFLLKGNIYSDALKNVGYNTKQQLSGDKNKLPPLSKEESAQITNPVVKRAVSQTIKVVNAIIREYGAPYQIKIEAASDLAKNFKERNKIKKTQDENASYNESIKERLKNEFNVLSPTGLQITKFKLYEQQNGKCVYSGKSLVLENLFSNEHYAEIDHIIPFSRCGNDSLMNKVLVFTEENRQKGNLIPFEAWGTNESRWADFEARINSMNLPFRKKERLLAKVSPKEDWNSRALNDTRYISKFLSRYLRKNLKFAKFENENPAQRVIVPNGSITSYLRRIWRVGSKDREENNLHHATDACIIAAIDQSVIQKISRLNKYFELFKYSAEDEVIDKITGEIFSRADFEQTFEDIEPWKDFGKEVRKRTAHYESPMELRNELIGLENYDEEFRNKTTPIFVSRMPKRSGKGNINKETIRSPKIVKGYVDSKGKLAIARKQRVRLINVDLKTLHNSPVRETDPALYEILKARLNEFDNKPEKAFGDPSNPVYKPTKNSGCGNIVRSIKVYDTQNSKSGFLINKGKAFVNNGDTIRLDVFKRKNYKGEFEYYFSPIYAHLLNAKKVEILPTPNGRSTAEKADFNKIRDENGKIFATEENGFVKQFSLYPNDYVRIYTGNKIVEGYYVKYGIADGTLNLMNHDQTSKDNLSLKHIGRGTITFI

SEQ ID NO: 8878 - protein, 940 aa, unidentified
  REGION 1..940: note = Description of Unknown: Cas Enzyme sequence
YEELSIRDRLNKAEALRVLGKKNRQWDLNYKELEGNRTQATLFSYYNKIIMMTGHEECNIKQLKAPEIRHYIKTIFKNLGFNTGILEFDSSLNGHELEQQPMYQLWHLLYSYESDKSRTGNEALLKKLETIFGFPREYASVLAEVAFEDSYGNLSVKAIREILPHLQAGLDYSQACEEAGYKHSRRSLTKEELDEKEYKEKLELLSKNSLHNPVVEKILNQMINVINAVIDEYGKPDEIRIELARELKIGAAERENMTRSISQGNAENKRIREILEKEFALSYISRNDIIKYKLYEELKPNGYKTLYSDTYIPKDKLFSKDFDIEHIIPKARLFDDSLSNKTIEARDVNIAKSNKTAFDFISEKYDQQGIEAYKKKLDILLQDGSISKAKYNRLLMKEADIPSGFIDRDLRDTQYIAKKAYEILSDLVRNVTPTTGAVTSRLREDWQLVDVMKELNFEKYQKLGLVEVIEDRDGRKIKRIKDWTKRNDHRHHAMDALTIAFTKPSYIQYLNNLNARSDKNSSIYGIENKELHREDNKLRFNAPLPINEFRAEARRHLKSILVSVKAKNKVMTQNVNKIKTKHGVIKKVQLTPRGELHNATFYGTKKRPIIKMVKVGAALDEVTIKKVSSSFIRKALQDRLYEYNGDAKKAFTGRNSIDKNPIYIDEERKRTVPALVKTIEWEMYHPTRKLISPDLKIDKVIDKGIREILKTRLAKFNGDAQKAFSNLDENPIYKDEAKKITLKRVSLEGVSSVIPLHTLKDRGGKPVVGKDGKPVLGDYVQTSNNHHVAFYIDENGNLQDNIVSFFEAAERKSQGVPIIDKNFNHDIGWRFLFTMKQNEYFVFPNEVTGFNPSEVDLMDEANYDIISPNLYRVQKMSRVVYGKSIIRDYVFRHHLETTVEVNANLKGLAYKQLKSLSYLEGIVKVRINCIGKIVAVGEYD

SEQ ID NO: 8879 - protein, 1269 aa, unidentified
  REGION 1..1269: note = Description of Unknown: Cas Enzyme sequence
MSTVEYRLEPSPTTAVSFDWKNDAFYTSAVVLGIDIGLEGIGVWLREGLSPIYARTFVFETPDAAPLESRRGLRAGRRCRQAEQRREVMLKKFCDDFGLPWVEITDKGRDDGPFRFRWIATRKDTDGLRDIRAFAACLRHIIRHRGYDWHAPEDGGEYPWGDEAKAKDAIEWAKTAFCQQEHADKLLYVLTDCGWNDKERKSFEAALNQAVDKYNTKGIDAVLAEHFSQPKNNLRFPARRHNFPREMVRAHLEAIVKRHPQFLGGAERVESALKRLHEIINDHRKEPGALALRKVNRCPLAEILFDGPAPKCDSSKDRHIRRFKLLEFLATRTFVTKDGKRELANMEMFRWLLDDLLETDIRALASNGQIQRSRLAKDDFKKEFLAKHDPSGETKLARDNQSHNGEYFTQLTDLLWPKMSELGGRASLCGRSAEALFDYAIKEGFDATRIASRLKDKRFERSGKKMSFYEIRQTAAAGFGIYKQVEFLLGRWKKNAKPGDKPAVPGKLRQIFAQLIKDGILPPDKTAPDFVIVETVGDIPRNKVQAKEIQKEQTARRGFKDKLREQFKDFERGNLSREEANKRLLLYDQQRGICPYTGDPLGENPLAFDLEIDHVFPRSRGGISEMVNLVLTRRSTNGEKGERTPYEAFGGSNNSPQWRVLRDRLLKMQWNGQKREFFLRAENTPPDWGNMTRVAQLARQLRFEVARWLEIADDDAEVRRRVGTPTGYQTSVCRESWNDKLPEDFWPKKNRNHLRHHLWDAAILSHIPPGNGLNHVRCHGIFWHEQENNTGNIKMLALPGLGPDLKQFEAQTAGQCLVEKIQPAHAKKSRFEQWIYGRPDENGAMWARDPIGSLANKTNLLDLLREAGIDEKQLPTSRFNEWQEKRQAQFFTREEALSAFEALALPPEHQIPAPIFEEWWADRLKGEKKKVTAKSLRALLAKAHVPKTIVNDQQLSAALINRGDPGPLTCKDGTEIRGVSGTAKNMTPMAVVPHRNHTGETIGFKLAKESFIRAEIWVTEKRDKKGEIIKGKDGKPELEYHRRLIPHPRGLKNLSLRVLQCTGERLTWERRLTDAELVELGLGKKLTSLENERERLKKLQAKAVNKWQKSQRKKKDSDALGLAAAAASSPPQEIPEIWLSLRKIYTGLPPHAKRLKNANGANISRFAKGDLLLVPVNQSGGICKPSESPYREIWYRITAINASGQAEMQLAEFKQVKRLSEQDVKEGKSLEPKQEWLADVFQQQPGSDAVIAFLLQRTRANDKPPHSVK

SEQ ID NO: 8880 - protein, 1075 aa, unidentified
  REGION 1..1075: note = Description of Unknown: Cas Enzyme sequence
MQYRLALALGSTFLGWCALETLDHTPVRILDMGVRVFPNGRDSQSGESLAVARYYARLKRRNLDRTKLRRKRLMKFMIESGLMPADEQARKELQNTDPYELRAKALDEKIPLHHLGRALFHISQRRGFKSLRIPGKGDDEADDDSSNMKGAIKDLHGKLLATRSRTLGEYLYNRHRDRHPVRVRIRVVNNKAEYSFYPGRNMYEQEVDAILAVQKNHHPQLTEKVCEGLRDIIFYERPMKPRPVGKCRLESAEPRARLALPLARRFRIWQEVNDLEIEGLADGGPPLELKDRKKIVEVLLSSRKKTFGQIRKLLGLEPGCRFNLETGERNELRGDITSFFLSDEQCFGPRWRELSSDQQENLLTMLFTEPDPGRLREALMTEWDLSSEQAEEIISITATHDDRDGISNHYGHFSKKAILKIMPWLEQGHKFHEAARLAGYRPSEIHAGDRHDRLPYYGQVLPDSVIGGSYDDKDKDLPERYYGKVNNPSLHIGLNQVRKLVNAVIEVYGTPDEIVVGIARDLKQPWGDIARKQGKNRKDIDRINKELEKLNVRKNYRNRMLFSLWEDLAQAPQHRCCPFSGIPVAMSDIFEKDFEDVHLLPFSRSYDDRRANRVLSSREWNHRKANKSPFEAFGHTGDWPQIMARVQNLPADMQWRFRKDAWAKMEGKDGVMARMLNDTHHMAQWTRQYLSFLLDSEKRKSCVWAVAGQMTPLLREKWRINDFLGEEDGPDNRADHRHHSLDAVTIGCTDRRMLETVSETARTLEENETLRGKRHELVTGLPEPFAGFREQLEEHLTRMVVSYKPDHGGADKAIRAERPYTVAALHRQTAYGLAGIPGEDTTSFATRVSVESLLSTADIETVIDAEIRRKLLAAVEGLKTGGKEWKQALERAAAPGGIMKSGIRRIRVHVKKTPGTMVGIVQPHERGRDGAQPFKFYELRGNYSAEIFCSGKGKKAGEWQCEVISNYHAHQKDFIPNWRKEDPTARLIMRLQKNDMVAYESEGTDVICKVKKTGRRKSGGTIFLRPHTIAIEDANTLTWEASAYQLQLKNARKLSVDIMGRVKDPAHMKKPAAAA

SEQ ID NO: 8881 - protein, 1067 aa, unidentified
  REGION 1..1067: note = Description of Unknown: Cas Enzyme sequence
MRVLGLDVGIASIGWALIEIDDIGYEEGARGEILAAGVWKFEPPEEKTQNGSRLKSEIRRNFRSQRRVLRRRRQRMNEVRRVFARHELLPRDDRDALKQPGLDPWKLRTEALERALRPVEFAVALGHIARHRGFKSNAKDVKSAQAASSNSAMSKAFAATQDKLARFRTPAHMLCADESFLVSGTSVRRLRNRDGDHSRTQLREDLLSEATALFRAQARLRAEHATTQFEEEFTKAAFFQRPLQDSEHMVGRCLFELDQKRSPKHGYSYERFRCLCRLRNLTLVEGRKTRFLSASEMNVAMLDFGADAKFTYAVLREKLGLPASVSFAGVPIEEEKRLDFVVRSGAAAAGTHKLKSLISDALGETTWRDLLASPERLDRIAEVVSFRNRYDLIRRDLVASCFDEALMRTIETAAKDGGLDLFAGAGHVSAKAARNIIPALMQGLTYDKACARAGYDHAASRARHAFDVGVFGKEALARILSEKRVSPELVDSPTARKALIEALKQVKAVVEIHGVPDYIHVELARDVGKSIEQRREIARRNEARGRRRDELIERFAREVGRAPRGGASGEEDLSRFELWLEQGGRCIYSNADIDASQLVAGDNSVQIDHILPWSRFGDDSYSNKSLCLTRANQDKKGRTPFEWFCADRGPKEWEAFIARVDSLRIDGFKKRNYKLRDAEDAADKFRARNLNDTRWTSRLLAEALKQLYPKVEKNAKGEKIRRVFARPGALTDRLRKAFGLQWIKKNEKGERIRDDRHHALDAIIVAATTESMLNRATRQIQRKEREGLPFELTEIFPPWMGFREACLDALERVFVACAERKRARGKAHDATFRQVATRDGERKVYERKIVADIKIADLERIKDPDRNIAIARALRAWIEAGKPAGEPPRSPKGDPIGKIRLAAKNKVNILLNTGNPNRPATVDRGDMARVDVFRKPNAKGVFQYFLVPIYPHEIATLAAPPMRAVQGGTEEENWPRIDSSYEFMWSMTSMALLEVSRSEGEVVRGYFRSLDRNTGALTISTASGALPVKMRIGTRTLLGLKKLHVDRLGRVHKVERERRTWRGKVWD

SEQ ID NO: 8882 - protein, 1106 aa, unidentified
  REGION 1..1106: note = Description of Unknown: Cas Enzyme sequence
MSIKNKISLGTDANLQLAFDVGHSSIGWAVLQSSAGVPPVSIKQKENAPSVNILGCGSVVFRADDCLASSRRTYRRQRRHIRSTKQRIARMKIILKCLGVLKENELNQPGCAWPWQLAARVLLGGKSLTWPELWDVLRWYAHNRGYDGNRRWSAAEAEAQKEDSEKEANARTLMGKYGVHSMAETFCKELGVEPLGKKKSSMKRFKGLNAAFPREVVEGEVRKILQVHSDKLKGVDVKLEKILFSDWRAIPCPDLKLPKRYEGGLLFGQLVPRFDNRIISICPISGQKVPSRNCPEFLNFRWAMQLANIKVGKTKDRELQPLKTEYRVALDKQMRERGYLTPKELKDTVRSITSCERDNLDTMLMNPDAKEALLLDPVQKLICSNDLQSLWKLLPERLQKRLRGQWRRNKVFTLAQIRKQLESLGDVSAFDAEFQKQLDTQNSRAKKKEKQATREQLLQQHFPSRPLKLDGRAAFARHLLKQAYKDVLAGKPHPKEEGGCLFITEKIREAQLNRAIADQTNNHLVRHRLLILERLLADIIKEYAAGDKKHVGKITIEVNRDLREMSGKTAKEKAQDLGLRIANHHAVAEKLEKAFAEERNGKSIPITAGLIRKARIAEDLGWRCPYTGIDYEPKDLVTKRVDKDHIVPRSERASDSLDSLVITLSAINKWKGKRTAWQFVEQEQGKPVPDLPNLSIVSLTRYKQFVENLETYKGHDDDKRRKKKRKELMLLPKYEEKEFVPRDLTQTSQLVRLGAQVLKRAFANSEEKPTLVSLPGSVTGAVRKAWKVLGCLSLANQQVLDENGDVKTKTDIRNITHLHHALDACVLGLTSHFIPNNGRVWELIVKRNPNDLERQQLMALGVFGFNAEKRFEMRDLDHQLKEQIRQRLAEKRVVQHIPARMDGLRVEQNTWRVVSSDENGNVTIRQRIRQPDGSRPEKVTEEKPSKLLGLNPANGSGKLANNKGALVIPDNFGVALDPQPTVIPFQKVWPRLQEIKKANGGKMPRVLRNGQLIRVPRGSRAGIWKVMSTKDTEAYGLALNLALPDRVKLDRGNAPIKKLIQDGLEILDCSFVGVDSSGVTIAEAKKRPRKTKATGTDESCPATSST

SEQ ID NO: 8883 - protein, 1012 aa, unidentified
  REGION 1..1012: note = Description of Unknown: Cas Enzyme sequence
MKYRLALALGSGFLGWCALEINDASPVRIMDMGVRVFSDGRDSQSAEPLAVGRRYTRGIRRNLDRTKLRRKRLMKFMIESDLMPADETARKELENIDPYELRARALDEKIPLYHLGRALFHISQRRGFKSRRKRGQGDDKAEDESGNLKEAIKDLHRTLLATRSRTLGEYLYNRHRERHPVRVRPLLVNNKAEYDFFTGRRMYEREVDAILEAQKKHHHQLTDRVCNELRDIIFYVRPLKPQAVGKCRFESGETRAHVALPLARKFRIWQEVNDLEIEDLADGGPALALKDRKKIVEALLFSKKMTFDQIRKLLGRGTACRFNLESDERDELRGDNTSVLLSDEECFGPGWRDLSDDQQENLLTLVFTEPDPERLKDALMTEWSLSSEQAEEVMSITASQDDDPAISSFYSHFSKKAILKMMPWLEQGHKYLEAARLAGYQPSDFHAAKKRDVLPYYGQILPDSVIGGSYDDKDKDFPERYFGKVNNPSLHIGLNQLRKLVNAVIEVYGTPDEIVVGLARDLKQPGGVIAKKQFQNRKDIDRINRELEKLKVKQSYRNRMLFSLWEDLAEEPQLRCCPFSGIQIARADIFTGAFEDGHLLPFSRSYDDRRANKVLSSREWNRRKGNKTPFEAFGHTDEWPQIISRAENLPRDRKWRFREDALAKLEGKDGVQGRLLNDSHYMAQWTRHYLSVLLDSGRRQSHVWTVTGQMTPLLRETWGLNDLLDKEDRPGNRADHRQHALDAIMIACTDRRLVETISEAALRLEENETLRGKRHELVSGLPEPFDGFRQQLGEHLKSVVVSHKPDHGGADKAIRAAQPHTVAALHGQTAYGLVRVLGEETTAFVRRAFVESLSSTAEIERVVDDEIRKKLLAVVEGLKAGGKEWKQALHRAAAPDGIMKNGIRRVRMLYNKANDTMVGIVQPHEKVRDGSQPFKFYQLQGNYCAEIYCSDKGKKAGQWQCEVISNYHAHQIDFVPLWRKEDPTARLIMRLQKNDMVAYENEGTNVICKVKI

SEQ ID NO: 8884 - protein, 1097 aa, unidentified
  REGION 1..1097: note = Description of Unknown: Cas Enzyme sequence
MGQRLRILGIDLGIASCGWAIIEFDGNVWRIVRAGVWEWDAPEYIDKGKTRKSNLKERGVTRRRRRLLDVRQKRMRDLRQLLAHHGILKRTDRNALHFPKLNPWLLRKEALERKLSAEEWAVVLAHMAGHRAYWSNAKRKKNETDDDRKKLLKALKENEREFETARMARTVQTVGEWLANKETQRNRGGDFRHSIKREWVKQEAALLFNRQRELCNPFALSSLLDRYAPLAFEQGEITPPEVGPCTFELSQPRAAKHSYSFERFRLLQRLTNIRLISNPDMPPRSLSDVEIEKIESQLGVKASITYNTIRRLIDLPQTESFHRINDADQEEHEIVTGTKSGKSGPGTRALRMLITKTFGEQTWQSLLAKPDTLDAIAAAIAHRDDLTLIRTELENLNIDPAITDVLVNESDGGELGFFKGTGHLSVKALRKLIPHMLAGCDYHDAQIAAKYDPSKDRYSRRPGIVGAGPQAVAAWLKKDQLEELIRNQVVSRAVREVFKQVIALWRADGPFDAIHLEMARDVGRSAAERDKMDVDNIKRRDRRNALRNSFIENFKKTPSDREFERWTLWCEQKGKCPYTAFNTEGIPCNAVLDGDDRVEVDHILPRSRFNLESLSNKVLCLTGANRNKASFTPHQWLSRGLGKLSWEDFCNQARVIFKDNPRKLDNLLIVDTAILESSLSSRALNDTRWISKFLLAGFEKLGTTDRPLRVQPVNAALVGTLRWAWGLAGWKHDPKNRSTRQSDDRHHAIDAAIVATIDTDLVHRLTRAYQRAEERGEYFEARGFHPPWDTFREELLIRLYGDGAAKAKPSEFTPDSTAGVLVSRGERRRARGQMHKETIYSLTSVNGTGADTTRRVKIERKAVDNKLKVDDLSLLKDADRNYKLADLLRSWIEKGHPADEQPVWKYKLSDGTERYEPIYSVSLVTNDAPAISPKRLRRKGDGTEVAFAAVDRIEMVRIDVFDNGDAGADARYLFVPIYVHQTVDAKPPQRAFTLRRPYEEWPRVGANDKFKFSVYKFSLLKIEVKKDSSAPMLGYYRTLDSNDGRITLTPQYSRDEKLAARFSPTTISSIRKFTIDRLGRKFEVSREVRTWRGKACT

SEQ ID NO: 8885 - protein, 956 aa, unidentified
  REGION 1..956: note = Description of Unknown: Cas Enzyme sequence
LSPTTKRKQTIALLSKTRKPLNVIHGNVRFTKFNKDRGNPIKQGSNRLDEAMNADKARTLGEYLWQRHQRRESVRARNVASGPKAAYEFYPTREHYRNEFDAIWNTQAKYNSAMSPEARAQIESEIIFRQRDLKQPPVGKCTFDPATEPLEKDPEGYRCPWAHPLAQRFRIFKEVRNLEIRETGKVARKLTKEEGDKVALGLLQNNKVSFDKIRTLLKQPAEARFNLESERRDHLKGDELAEKLANRKLFGKAWRSFALDRQILIAEKLLVEPDENVLLSWLQGESGLDATIAEKIANARLPDGHCRLGLRALKKLRPIMENDVADDGRSGVQEHEAVRRVYGDHAKLPTGEILDRLPYYGEWLPDAVVGTGDDRSKKEKRFGQFPNPTVHIGLGQLRRLVNALIKEFGAPEQVVIELARDLKRSQDEKREEEAKQAKNQKKNDDRKAKLAEIGIVNVSGADLMKMRLWEELGDFVKTCPFSGRPISLKQLMSADVEIEHLIPYSDSLDNSPANKTVCFTSANRLKGKQTPYEAFGSSPEWPAISARAASLPSNKHWRFAPDARERLNRDGRDFLDRQLMETRWLSRLARQYVSAICNPNEVWVVTGQHTSLIRGKWGLNTLLPDHNFTTAKNRADHRHHAIDALVVALTDRSLLMKIASAYDVERDKIKVEPPWDKDKLRNELESALTRLIVSHKPDHGYQGKLHEDHAYGIVKDEETEAKGKSIGNLVYRKALIALTENEIDKIRDCRLRDMVRNHVQMAAANDIPLAKGLADFRDTVRDPHIKHGLKRVRILKSEKPEYLVPISNTTTGKIYKSYSAGKNVFMEIFELPDGTWDGEAVTFFQANQAAQAIQWPNKFPGAKLLMRLFKDDFLRIEHDGVEKIVRVVRLEPSANRVRLAEHKEAGALQDRHKNPDDPFRWIFGQYDRLKEWKAEQVRVDELGRAWRIQTEALTKA

SEQ ID NO: 8886 - protein, 969 aa, unidentified
  REGION 1..969: note = Description of Unknown: Cas Enzyme sequence
MTRILGLDVGIASCGWAVLEMNGESGGIVAAGARCFDPPLVAKTGEPKSAGRRTARGQRRVIHRRRLRMNRVRELLTRHGALPAADRDALAEVARRLAEASGEGGASPWRLRAAAHDRALSDDELAVALGHIARHRGFRSNSKREAGANAPDETSKMKKAMEQTREGLAKYRAFGEMIASDPKFAERKRNRDKDYSHTPKRSDLEDETRAIFSAQRRFGQQTANDALERDFAELAFSQRPLQDSETMLGDCPFEPGEKRTAKQAPSFELFRFLSRLVTLRLTTGRTERPPSADEIARASRDFGQATKGVTFTALRRKLDLDPNTRFAGVPADREKYDVATRKGEAAAGTHALRQALGEAPWASLMRTPEKLDRIAEVLSFREDFARIADGLREIGLDPLVSEQLLDATRAGAFSHFGGAAHISAKAARAIIPGLREGLDYSEACARVGYDHAARPSGALKDINSPVARRAFLESIKQVRAILRAFGPIDEVNVELARAVGKSAEERAKLTQGIEDRNKEKDKRAKEASELLGATVSADELLRYELCKEQNFKCVYCDAEIAPNGFSANDTRYQVDHILPWSRFGDDSYRNKTLCCVACNQHKRGRTPSEWFDDDKTSDEWDAFAARVEGFKEMKGLKKRNFKLKDVDKEVEDKFKARNLTDTQWATRLLADELKRIFPSKGDERRVYTRPGAITSKLRRAWGLEGQKKVDGVRVADDRHHAIDAVVLAATTEGLLQWMTKQVQQREREGRGDDIFHVAPPWRGFREDSIRVIYGEGGVGGVFVSRAERPRARGKAHDATIRQIREIDGEDVVFERKAIEKLTPADLDRIPVPAPYGAIVDPAKLRDATVAALRAWIAEGKPKGEDKLPRSPKGDIIRKVRVETDVKVAIRLQGGTVDRTAIVRLDVFEAGEPKSRSSYRFVPIYAHQIVESSAPNQFFELRKPVQNWPPISNFHKFIFSLVPMCLIEIA

SEQ ID NO: 8887 - protein, 1579 aa, unidentified
  REGION 1..1579: note = Description of Unknown: Cas Enzyme sequence
MELNCEETVWAFDLGKGSIGEAVRQGTRFLHKESLLIPPDFARRGPATLSGTPASRYRAMKTREAHRKREEWLEKLWTAAGLQVLQGRQVRCDQKTKEWLPPILGDERLEREFAKAGDDMCYTSSLLRIKLLQWKRGEPKLAEWQVYKALRSAIQKRGYAPVPWEKQRADKRQAPSPEEETAFAEAKSRWDNFAAMLKEKSLGEEFHRPCYYDAYHLKLWNPERPTELSANRLVSAPNSTQQVIFPGRVVQAEVLALAEQAANQLPQLNQAFAKIMDQHRQEVRERVAAINARRAEKGKLLIHMPSLAGGAKDFAELLAFGVGGQSLRLPNHRPIASFDPTLRRDMGLHPGSPSDHKAALGQKVARFENRLRAECALIGRSRNRPKGLAVCRNTCAEDLRRAISDEDVRLLPAQVTFLMKLKNLRVEDKTQDRKQHGLAHEQIAEVFNACNPKRKYHLTHSEWARWCAHFDVLPVAKLEDKVKAETNLPAQGETDKPEKGKDAVERPATEGRCRFSRPALRILKELILSGKAPSVFHGRLVRRDPELLSKLGTKVKDKEQTVTRPLAVFDDSEDQATNAANCLKGLLVSDLAFLTKMRKDDAKEDSWDGIFIPSRNLDQVAAQAEASPAERRDTILALIGQQNNPIVRHRLSTFWERLQKLEKRFGAPGRIVLELVRGDPESSWLGEKAKEGIRKSQDDNRQARNNAKQRLAEMKLPSTERNLLKYLLWESQGGQCLYGLDGKLMEAVGDDGKSKAKCLYVETALPWTGLESYRVDHVVPRAAGGPDAFHNLVLTTDDTNARKGDRTPYQWFRDDRSQAEWQAYRTRVLSREKQLGGKKVRLLLSADAEQLVQRYTPLAETAWIARLAQTIAGLHFGWVNGVDAKGVQRIVPISGGLTGRVRRQYYLNTLTGPSSDKDLPQDKEERRAREKEAEADRNTKNRRDRRHHALDAMVLSFLEGWVNDPGREDEFRFTELGDKPCYQPSDRPRVFAIKGRIEQLQGQFKQAQTVAEREGIQTQITSCRDQLAKLRQPRDWRSVREWFRRQLEGSEHDGTRPLLPVYLHYPKSRLEAMLYRGVWLPVEDEQKASLATVENYDKAFKELKMPLVKLAYLGNRQTGKEEFSVEHGLRQAAVLVAGRGFDSKALRQAVEAFLNANPDEATWQAFCRGSNLATLFPPRKKPGIENQVVVYRLAEKRTQRAKLLDLGLSNEEIPEFDAPHFEMQVSRLVVPPERPKDRKGRRKRMESAAGSALPAENTQLQDQLRRLRLQIEEHFRQNPPYAGKQPRKPSERTAWEQKRKRSDEAWDAFLRQTGLDRHKRVYLRTDEPDPTATPFEKAGLRGVLLAKARRFDPSGAEKQAQSVSDPWLRFQLREFLKRNPGQQEWKDFCGTFVQVTRDQFRQFVATGPQTAAQFVEFYKAARNRPKATLVRYVQQVIGDPDEYVDVSKDSTGIYAKGGNSGYLTFTRVLEDKDGKETCSFGAVPVRCFQNQHEARHNLLREPGVSLYDAKLWRTDVLLQLPQEAKIGKQTLPRGYYYFGSISNGRSMTLKPLKGGDNFEGISVTGLLAAGLKRVEIETL

SEQ ID NO: 8888 - protein, 1069 aa, unidentified
  REGION 1..1069: note = Description of Unknown: Cas Enzyme sequence
MRVLGLDGGIASIGWALIEVEDSGEAPEGCGKIIASGVWMFDPPEEKTQTGSKLKSEIRRNFKSQRRVLRRRRQRMNEIRRIFARHGLLPRDDRDALQQPGLDPWRLRTEALERVLAPVELAVALGHIARHRGFKSNARVAKSVAAAIASSATNKAIAVTQEKLARFQTPAQMLCADESFLVSGTPVRRLRNREGDHSRTQLRDDIEGEARALFRAQARLQAEHATTEFEAEFTKTAFFQRPLQDSELMVGRCPFEPDQRRSAKHGFSFERFRCLSRLRNLTLLEGSEERFLSANEINAAMLDFGASAKFTFAALREKLKLLESVVFVGVSDEKEKRLDVVARSGAAAAGTHKLRSIITDALGATAWSALQSSPERLDRLAEIISFRNKGDLIRRDLLENALDETLTNTLATAAKDGALDLFVGAGHISAKAARNIIPGLEQGLSYDRACAQAGYDHTVSREREAFDVGVFGNEALARILSQERVSRELVGSPTARKALIEALKQVKAIVETYGVPDFIHVELARDVGKSIDERREIARRIETRNKQKEALRQRFVDELGCAPRAGGAGVDELLRFELWCEQNGRCLYSDARIDASQLVASDNSVQIDHILPWSRFGDDSYSNKTLCLTQANRGKKERTPFEWFSADKTPQDWEAFVARVESLAITGLKKRNYKLKSAQEAAEKFRARNLNDTRWACRLLAEALKQLYPDDERNAKGEKIRRVFARPGALTDRLRKAFGLQWIKKNEKGERILDDRHHALDAIIVAATTESVLNRATRRIQKIESEGLPYELTGVSPPWADFREACLDAMEEVFVARAERKRARGKAHDATLRQIATRDGEQRVYERKSVADLKIADLERIKDPDRNIAIAQILRAWIEAGKPAATPPRSPKGDPIRKIRLAAKGKVNILIDTGNPNCPAAVDRGDMARVDVFRKANAKGILQYFLVPIYPHEIAMLDAPPMRAVQGGADEEQWPLMDSSFEFMWSMTHMTLLEIVKTNGAVVRSYFRSLDRNTGALTVSNVSNVRAPKMRIGARTLLGLKKLHVDRLGRVFEVEREQRTWRGKVCNGG

SEQ ID NO: 8889 - protein, 1036 aa, unidentified
  REGION 1..1036: note = Description of Unknown: Cas Enzyme sequence
MVGLVHGEPAKLIRAGVRVFDAGTEGDIESGREQSKNLKRREARRHRRQLWRRVRRMTKTFNLLRRFGLLPSGDASRPERRQDLINTLDKTIRSSDWFKAKASSAAYLEPEQTLPYILRAAALDEPLEPHFLGRAIYHLAQRRGFLSNRLKPTNQEDDEGAVKKGISGLLRAIEEAHARTLGEYFACVSPNEMRIRGRWTARSMYEQEFEKIWAAQAPHHPGLLIEERKKELRDSLFFQRPLWFDPDVIGRCGLEPEERRAPAYVLIAQRFRLMQMVNNLQVLPAGQGERDLSPEERKKLIEALELKSDQSFVQIRKLLSLKGSQFNLERGGEKRIKGNRTSSDFYGVFGERWLQMSSEERDRAVEYLHAFQRPEKLAAAAKKAWSLSDEAAEKFSEITLEPDYMDLSRKAMDRLLPLLEKGVPYATARKQMYPERFEPGNPLPWLPPVEQVLTEIRNPAVKRSLTQLRKVANAVVRSHGKPSQIRIELARDLKRTKKQRQAQSEAMRKNERARAEAVKEISTADVGIKDPKPDDIRKYLLAEECRWQCPYTGRTISMQALFGPEPQFDIEHIIPFDRSLDNSFANLTLCYNEENRNVKRGRTPLQAYRGTERYDQILDRVACFTGERRMVAAKLKRFKLNDEELEVILDDFRNRQLNDTAYASRVAAGYLSLLYGGLTDAAGNRRVQATSGQTTAYFRSLWKLNSILNDGPLADGGRVSKSRADHRHRSVDAVVIGLTDAGMVKRLSDAAQRAPLAGHGRFAALEAPWPNFADNVRQEIGRIVVSHRVSKKVSGSLHEETIYSPPQHSGASHVRKALVAVTQSEVEDIADPQVRKIVQKKLVELGIEDPKKAFADENKLPCFEAQDGRRILIKRVRVKKRLPTFAMGESRGARYVTSESNHHVELYAQIDGQGNEGAWDGEVISMFQAYRRQTARTPIVQRDHGPLAQFKFSLAPGEVIECDGKPDGRSLYVMRTVSQLSSGQLQIGFAPIRDARKAKEMQSARAWLWASPATLSQRHPRKVSVNALGEVSEAHD

SEQ ID NO: 8890 - protein, 1074 aa, unidentified
  REGION 1..1074: note = Description of Unknown: Cas Enzyme sequence
MSIKDKISLGTDANLHLAFDVGHSSIGWAVFETGKRLEIKGCGSVVFRADDCLASSRRAYRRQRRHIRSTKQRIARMKIILKHLGVLKENELSQPGCAWPWQLAARVLLGGKSLTWPELWTVLRWYAHNRGYDGNRRWSAAEADAQKEDSEKEANARTLMGKYGVHSMAETFCKELGVEPLSKKKSSMKRFKGLNAAFPREVVEGEVRKILQVHSGKLKGVDANLEKVLFSDWRAIPCPDLKLPKRYEGGLLFGQLVPRFDNRIISICPISGQKVPSRNCSEFLNFRWAMQLANIKVGKNKDRELQPLKAEHRVTLDKQMRERGYLTPKELKDTARSITSCERDNLDTMLMHPDAKEALLLDPVQKLICSDDLQPFWKLLPERLQKRLRGQWRRNKVFTLAQIRKQLESLGAVTAFDAELQKQLDTQNSKAKKKEKQVTREQLLQQHFPPRHLKLDGRAAFARHLLKQAYEDVLAGKPHPKEASGCLFITEKIREAQLNLAIADQTNNHLVRHRLLILERLLADIIKEYAAGDKKRVGKITIEVNRDLREMSGKTAKEKAQDLGLRIANHHAVAEKLEKAFAEERNGKSIPITAGLIRKARVAEDLGWRCPYTGVDYEPKDLVTRRVDKDHIVPRSERASDSLDSLVITFSAINKWKGKRTAWQFVSDEQGKPVPDLPNLSIVSLTRYKQFVESLETYKGHDDDKRRKKRRKDLMLLPKYEEKEFVPRDLTQTSQLVRFGAQVLKHAFANCEEKPTVVSLPGSVTGAVRKAWKVLGCLSLANQQVLDENGDVKTKTDIRDITHLHHALDACVLGLTSHFIPNNGRVWELIVKRNPNDLERQQLMALGVFGFNAEKRFEMRDLDNKLKEQIRQRLAEKRVVQHIPARMDGLRVEQNTWRVVSSDENGNVTIRQRIRQPDGSRPEKVGEEKTSKLLGLRPANGNGKLAANKGVLVIPDNYGVALDPLPTIIPFHKVWPRLQELKKANGGKLPRVLRNGQTIKVPEGKYKGVWRIFSAKNNTTGMAIDIGQPDVVRLKNKTEGHKINVLLASLLKSKMEVVKTPFTGISVIPTTASR

SEQ ID NO: 8891 - protein, 1350 aa, unidentified
  REGION 1..1350: note = Description of Unknown: Cas Enzyme sequence
MKLNCEETVWAFDLGKGSIGEAVRQGTRFLHKESLLIPAELARRGPATVSGTPASRYRAMKTRQAHRKREEWLEKVWKAAGLTPLQARKPEYVGYQLRRKKKRVRGKSKWKNVKVGGRWILPPSGKADYRLEREFAPKQIEREGGQLVEVKYPEGKAADGAPAATAEDFGTCYTSCLLRIKLLEWKEGERKLAEWQIYKALRAALQRRGYGRVPWATKEARKQGKSAEELEAEEEKKLQQADPRYREAVDKWKQFKSEVPAEFQLPCYYDALHMGLWRYVPEQQQGHLGYWNPENEPAKPPHGSYRTDHKAESTRNIRSDRTAVRAELTRLGDQAAAMLPKLRDAFARWQREGWKFAHPFQEGKQLTYPIHAKSFGEFLCDGPAGQPVERSFEAFLKQRREAGVRRGSFEEWMAGLGQKTPSFDNRILNGCVLIPRYHVCKVDVRLETDGDGKPTGRLVPESLLASEVTLLLKLKNLLVADAKAGQRKLTVQEVRSVFDFAQRRLRSLALLTPEGELVKEWPQKVADRFAINKSHWQAIAAESELLARVRALTVTSKGAAQPLSTEDAELLLRAVATSKKGASVELPEPMKPLLKAAKAEWKKAKDAADQTLLRPMPGHEEVKAPKSSGRSAYSRVALRILKELILSGEAPSVFHDRLMRRDTELLQRLGPSPGKLLVIFNDSTAADEDQRKQEDTENRKRGLLVSELGFLRQMRKDNTAEDSWENIFIPSQTLEALQQRHTEDGKLDADAAIGELLGTIKDPIVRHRLEVFNQRLKKLQFGDEEEAIPAFGVPDAVVLEFVREDFMGEEAKRELKDFQSKREAARKTAREEAQKSGSTEKSAPLKYELCNTQGGICLYCGQPFSRARLDEYAIDHIVPLGEQGPDAMVNKVLAHRECNEAKGKQTPFQWWHHNTTGKAPTISWDGYTALVEKYRTTLRNKKVQLLTREDAPELVERYTALAETAWVSKLAQTIANLRFGWKNGTDYSGPKPVKRVIVVSGGLTARVRRKYGLDKLLYTEVTDAEVLAKKVKNRDDKRHHALDAMVLTFIPQWARDPNKEGFFRFPAAFRNAEGREDYQTIRKLFQQHLAEVMPRNIAYERAALADTSFGCRLDGGKPVIVQRVAVLDLGQKPAGAPGKTTFDLIYLVKQIQSVRDATIRRRLEEFAATNPDEPKWKAFCESFAQKREDGTTGARILKVCVNAAAPDEFKDLSKDGEGAWRKAKGDHQGQIIYTDADGNLAVKPVYVHASIRQELTRIVQTGGKSKVHCFVRSKCLFRLRKELPQPDYRLVIKNEQKQKRRVQATAPLAPGTFMLNTIITASMDVEFSSAGNQRVVAPLQALLVAGFETI

SEQ ID NO: 8892 - protein, 1073 aa, unidentified
  REGION 1..1073: note = Description of Unknown: Cas Enzyme sequence
MNQIYRLGLDVGTNSIGWAALTLDAVGRPNGILALGARIYSDGRNPKDGTSLAVARRVPRGMRRRRDRYLRRRDDLMETLIALDLMPADEAERQALVTLDPYALRAKAVHGPLPPYELGRALFHLDQRRGFKSNRKTDTSDDNKLADKIEVLDRLIGDQTLGEYLHRRRLKGKMVRARPEAPFYPHRVLYEREFDKICESQAPHHPLRPEQWAHLRDIIFFQRPLRAVDPGWCLLEEGERRAHRALPCAQEFRMVQEANNLRILVPGEAGKPLTRDQRDRVLRELRTKKELKLDGLLKLLKLPSGARINLLDENRKALKGDETAARLSHKNSFGRLWHVLSPTRRTEIVRKLIETESADEIERIARTEWKLDAAAAKNVAATPLPEGYARLSEKAIGKVLPVMEEQGLNYAEAVAEIPEYLHHSDFRPDAALDELPYYGAILTRQVVGADPTKPKDDEAGHYGRIANPTVHIGLGQLRRVVNRLVKIHGKPAEIVVELARELKMNREEKEQERRRNRENEQANERRDRAAGRELTPDDHRRLRLLEEQRFGTACVCPYTGQPISMTMALSNQTEIEHILPFQKTRDDSMANKVLCLTVVNRVKRDRPPAEAFQANPMAGPYPCNYDEILLRASSLPENKRWRFYPDAMARFEDEQAFLDRQLNETKYLSRITRLYLAHLYNERAEARLLVRAIPGRLTAMLRGKWGLNALLRDHNRAGEDDGSGPKRKNRDDHRHHAIDAFVIAMTDQGLLQAISRLNESAERTRLIEAVPEPWPGFSPEQVRNPLEHMVVSHKPDHGTPGQNGKTTGALHNDTAYGLVAPGKNGTWKVVSRAALASFLTPKDMDAALPAVRDNALRAALTAEWGRFKQAEPAKSEDNSGDGEKRKKNFAALFAEHVATVGIQISGHTVKVRRVRMVEELAVVPIKDRRTGEPYKAYKPDGNAFADLYRLPAGRCTAVVIRRFDANQPDFDPAKYRPHPAAKKLMRLHIDDMVALEDAGVRHILRVVKLSGQKITLADHIEAGALKKRNEDKDDLFKYLEKSANTLIRMGLRKVGVDEIGRLTDPGPRIARNT

SEQ ID NO: 8893 - protein, 1077 aa, unidentified
  REGION 1..1077: note = Description of Unknown: Cas Enzyme sequence
MHTAPSEAPKYSLGIDLGSASLGWAMVCLNEANEPTELLRAGVRIFEPAVEGNVEKGQDVSNAAARRQARLARRQLRRRAGRQKQLFKLLQRQGLLPRYEGQAGDSAIQRHEILNALDRDLAAKWSNSVDPITSNFVELPLYVLRKTALDTQLQPFELGRIFYHLSQRRGFQSNRRASNKDKEEEQGKVKAGISQLEAEIKAAGAETLGAYFAALDPHSQKVRRRWTHRRMFQEEFEIIWERQRSFHPTLLTEELRREISRILFFQRPIREQANLIGHCELEPDQRRASWATLEAQRFRLLQKVNDLEIIYPGQVLGTSLTDAQRLSLYELLDAEGDQKFEAIRKHLGIEKNIGFNLQRGGDTKLRGNLVNKIMRKAFGERWEEMDDEQQRLAVDEWRTIEGEQSLRRRFVEHWGLDDLAASALAEQTPPKGHCQLSRKAIRRLFPLMMLGQRFMAARQEIPEYRPRLKEPLERIPPVRETLNNLRNPAIERALTELRKVVNAMVGEYGKPAEVRIELARDLKKSRAERAKATDIMRRREKERITAKERLLKELGPAFDHPSRADVEKALLWEECGGICPYTGRSIEFASLFGEAPQFDVEHILPLSRIPDDSFQNKTLCYHEENRNRKGNRTPFEAYGADPDTYGQIIGRVKAWKIGNPGKLRRFELRTLDEIEGFSSRQLNDTRYSSRLAMQLLATLYGGDRIPQQDSSNRQIVFASSGSVTATLRKVWGLEEILREAAPSANGQSRGKPRTDHRHHAIDAIVIALTRQGTIQAMNRAAEQAPSWMRTGRAYRGLQQPWRDFVPSTRPVIHGLLVSHRPEHRLTGELHDATNYGAPRKVSGKEVVHVRKPVSGLGVKDVESIVDTVVREAVRAKAKELDGDLSKCNPKEGVEDWPLLRTRNGKTIPIKRVRIQKSLEVETVANGSARERYVALSSNHHVAIFAELDGHGKERRWEPITVSLYEAMNRKRSGLPVVQQAYPGAEDCVFKFSLMGGDTALLHRDCDHARDICRPRAWRIRTITQTGRVALVPINDARMKAEIKSSKDWWEPGIDALRKLGCEKVVIDTLGRPHVTSD

SEQ ID NO: 8894 - protein, 1005 aa, unidentified
  REGION 1..1005: note = Description of Unknown: Cas Enzyme sequence
RRMWRTRQAHKAREKWLDEVMRRTGIEVLHGRNYDKGGNWKPGEPADERLEREFAKPGDSTCYTSCLLRIKLLRGEKLEPWQVYKALHSAIQRRGYDPDIPWKNRAQRKSKSSDADDDEAGTQQRMEQFENDLKAMAPGQSEYRFPCYFDAWKMGLWNPAKPNELKDRTDCRAESTRNQITPRKLVEEEIRRLVTSAANHYPKLKDKAGYILYGPTETAYASFKAELRKKHDLKEGGVNDWQGVLGQKIPRFDNRIIGKCVLIPRLNVCKIRTDDSGELHPQSRIAAETVFLMRLKNMRFQTPKGQACLTAKQIAEVFNDPKRTKLGMTETQWKKYCLGFGAKPMLGQYQEVEEPSFSGRSRFCRPALEILKRLILSGDTPAQAYEREVARLNGNTNPVKGLVKDDLRFLLQMGTTWEGVYIPNQKLDALARSTDDPHEAISRLIGSQNDPIVRHRLALFGKRLDFLATTKKLGTPDYVVLEFVREDFMGKKARFEYFKFQRDRAHDRARAREEAAKAGAKERSAGLKMELLKAQVGECLYTNAKLIPEKLDEYVVDHIVPRAKGGPDAAVNYILTTRRANDDKGDRTPYEWLSGREGWDAYVERVKKRIGTLRNKKVQLLTSPDAERLVEKYTALAETAWISKLAQTIIGLRFGWVNGNDRDGKKRIIVVSGGLTGRIRRKYKLNSLLNPNAKSEEDAETKNRNDDRHHVLDAMVISFIPNWARNAKSTGFFRFPDGVHRELFGKEIAEVIPENVCFEKPALAETIYGARTDHGKKVIVQRAELVSLGMKPTALGKSVFDLKYAGKQIQSIRDPVIQGRLLEFLTTNPDEGAWRTFCAEFHIKHKDGSDGQSVESLTVNVGEPTEYMDMSKDGTGAYRKALKGHKGQIVYVLSRTDKKGVKKDVYAVRPIYAFESAAKVSAALRSEFGEELQVKEILQSGCLVQTDKETSHAKKPLPPGKYLLNTIITDSNAAKLTTMDGRTYPDIPRYSLASLFAAGMKRITL

SEQ ID NO: 8895 - protein, 1041 aa, unidentified
  REGION 1..1041: note = Description of Unknown: Cas Enzyme sequence
MIALNASNDPAALIRAGVRIFEPGVDGTSLDIQEGKDQSKAVDRRTARLHRRQLRRRAARQRELFQLLQQSGLLPTPESGGGASSEQRHDLLNILDQEITCRFDGTLDSDSFAQMPLYFLRKRALDHPLEPTELGRILFHLSQRRGFKSNRKEVKKSAKENEDLGQVKTDIQTLEKEIRDAGARTLGEYFAGLDPHSQKVRRRWTARRMFEEEFAKIWEAQLPHHASILTAELRAKITYLLFYQRPIAAQEHLIGKCELEPGKRRAPWATMAAQRFRILQKVNDLRLIEPGNPLSKPLDEEQRAKLYRFLDREGTQTFVAIRKHLSIPKGTQFNLERGDEKELRGNRTQKSMLKIFGDRWDAFSEGKQNQIIDNWRNSESDEDLIREATEHLGLCPDGAARLVAENPQSDYCALSLTAIGKLMPLMLAGKSFKEAETEVYGSRFSGLTVHDTLPSVHAHLPSLRNPAVERALTEMRKVVNAIVREYGKPYEIRIELARELKRPRQERVQATKSNRKRQKEREEVAKRIAVMCGLENPSRRDIEKALLHIECGGICPYTGRSIPFSNLFHDSEFDIEHIIPSSRYPDDSYQNKTLCYLPENRENKRHRTPFEAYGADEQRWAEMLERIRKWPISNPNKLKRFMLSSTQDLEEFSARQMNDTRYTSVLASRLLETLYGGRDVVESDKIRQVIFASSGAVTATLRRSWGLEGILREIVPSEAGQTSGKPRSDHRHHAIDAVTIALTRSSVIQAMARSASMEPWQQDSRSWRTIPSPWKDFVPSIRPHIEQMVVSHRPEHKISGELHKGSNYARPYIYQGKTTVHSRCSIASLKVADIEAEDTIVDPAVRNAIRSKLEELGGNLKLFEKPENTPYLLSSNGRRIPIRKVRIREKRTPLKVGQGMRERFVASGEIHHVALFVSRDEHRKEKWDSAVVQITEAYERRRQKHPIVSRKLPNHPEAEFLFSVTKDDTIEYADENGTHILRVKMFYDNSQIWFVPVNDAHDDAQQRKLGIAWSKRPNTLKALHPRKVVVDLLGKVRAAND

SEQ ID NO: 8896 - protein, 1355 aa, unidentified
  REGION 1..1355: note = Description of Unknown: Cas Enzyme sequence
MGTDETRILTTKTRSHPVWPPMKIVALPGDTGLASPQQPPSGNVAMNDYVLNQKPEPAANEMVWAFDLGKGSIGEAVRQGTKFLHKASLLIPAELARRGPAKISGTPANRHRALKTREAHYEREHWLERVWRAAKVTSLLTPLRPREVWENPETHKWELKHPADYQLEREFAPAEFRRNSKTGEKEKIVYPNGRAQNDGAPASTSEDFNLCYTSCLLRIKLLNGDSNLKAWQIYKALRAAIQCRGYGIVPWATKEARKQGKSLADLEAEDKKLQQTDHRYQEAVGKWPEFKGNIQKMKLPMFDRMQPRKPDNYYFVPPCYYDASKMGLWNPSTPDKLPPHTNLANSTRNIRFDRIDVRRELIMLGDQAVVLLPEIRDAFARWQREGWKIEHPVTGKELTYPVHAKTFGEFLCDGPAGKPDETSFEAFLNQREKAGLHRGSFEEWMAALGQKTPSFDNRILNDCTLIPRFHVCKVDLKLETAKNGGITGKIISESLLASEVTLLLKLKNLLVSDPVDGQRKLTVEEVRDIFAYAHRQLKALNLIAADGELIKEWPKKVADRFALNKSDWEKIAAEAEFFRKMSTFSLSQGGKNRCLTEVEIYPLQRAAADSKRKLEHELPENLKALFKAAKAEWKKAKVVADDTMLRPLTNHEIVKAPKTSGRSGYSRVALRIIKELILSGQAPSVFHARLLRRESELLGKLGASPAKPLCLFADSTVASEEQRKKEDTENRKRGLLESELNFLLQMRKDGATEDSWKDIFIPSQTLDALQQRHTRGNKLDADAAISELLGSINDPIVRHRLEVFDKRLKKFEFGDEKENIPCFGVPDAIVLEFVREDFMGEKAKRELKDFQDKREAARKKARAKATAAGSEEKSAALKFELAEAQGFICLYCGQPFAPTKLNECRIEHIVPTAQGGPDAMVNYVTAHDECNEAKGKQTPFQWWHHNTSGKAPTISWDGYIALVDKYATTLRNKKVQLLTREDADKLVERYTALAETAWISKLAQAIVNLRFNWSNGYDQNRKKRVIVVSGGLTARVRRKYGLDKLLYNKDTDAEVFAKKLKNRADKRHHALDAMVLTFIPQWARDPGKEGFFRFSAEFGDYEQIRKLFGDSIAKVIPRYLTYERPVLRDRAYGQRDNKTMMVQRTPLRELAYKPVQQKLVYDLTYAADQIKDVRDERIKQELQKFIAASPEEPAWNVFCDRFEKGELESLPGIKVSKVSQNLNGDLSEYKDMSKDGCGAFRRRKERHRGQFVYTDAHGKPRVEVVRVFDSKAKVKAEIEARVEGIKIIGFFQSDCLVKIGKPVVHGAITLAPGTYQLNKIVKEGQGRVQVTSAGGEKSPVISLSKFLEAGFERVD

SEQ ID NO: 8897 - protein, 909 aa, unidentified
  REGION 1..909: note = Description of Unknown: Cas Enzyme sequence
HGLLPVDLVQRNILLQDNQSNNPYELRKRGLEEKLEPFSFGRALYHIAHRRGFQSNRKILLDQEGKIKDAITELRTEMQGRTLGSFLSEQPTKRGRYTERAMYSEEFEQLWNKQATFSPHQLTLALKVDIHNCIFFQRPLKSNNHLIGKCIFNPTHKRAPQASLIAQRFRIFQEVNHLAIRNLVTREFRVLNQNERNVIIEAINNKKSMTFDEIGKIIDLNENGCLDKFELINIFDKKGKIQGNRTASEIRGVLGKSWDLLTIEKQNDLVTDILTIDNKKGLLNRLKNIWGICSTTAEALAKLELEQGYTQLSSKTMRTILPYLELGMIYSDACKAAGYDHSKKDPKTITGKLCLPLNVYSPIVRKLLFETRKVVNAIVRQYGKPEVIRVEIAPDLKLSKLHRFELLKNIKIQKKVNDIASEILKSEFGIQQPTRINIQKYNLWVECNKVCPYTGTPITRAMLFSSEVDIVHILPYSRSLNDSYTNKTLCMASYNRQIKLSNSPYEIGQGDPLAYAAILHRIKSLHLSKRRRFEQTEIETEKYIERQFNENSYVCNVIREYLQGIDVPVEIIKGEATPILRESWRLHVVISPDGCNEINRADHRFHAINSVVIALTTRNMFLNLATMSSQNILLDKSIFDAPLPWNGFYEDVCEKIDKLIVSYAPTRKISGSLHMDTAYGYSESGKCFVSRKSLDQGNLNKLTETDVKKIRDAKVRELVESHIARHDGYFKKAMGSPLFQANGKTPIKSVRISCSFNKDTIFPIQKGQENNYKFFAYGNNHHVEIIENIKTGNREGRFVTVMEAARRARGACNTKKVAIVQRDHGVEWKFVSSLSINDIVYIATDRSEIPYRIQAISKGSQFEITLKRLNDALSSYNENTLRIRSEKALKKILQKISIDPLGNIAQCSD

SEQ ID NO: 8898 - protein, 1078 aa, unidentified
  REGION 1..1078: note = Description of Unknown: Cas Enzyme sequence
MSIKGKITRGTDANLHVSFDVGHSSIGWAVLEKTGEQVSDIKINGCGSVVFRADDCLASSRRAYRRQRRHIRSTRQRIARMKILLNHLGVLTEKELDKPGCAWPWKLAAQILQGGKLLTWPELWDVLRWYAHNRGYDGNRRWSAAEADAQSEDTEKEANANSLLDTYKIKYGREGSMAEVFCDIQEINPLGKKKSSNLSGDKRPKGQNAAFPRKIVEREVRQILQKHFGKLKKADANLEKVLFTDWQAIPCPDLKLPKRYEGGLLFGQLVPRFDNRIISICPISGQKVPSRNCPDFLNFRWAMQLANIRIACAGEKDLRPLTAAERKIIDQVVREKGGVTPFQLKLIVREKTKCVRDDLEQMLMLPDFEKALLLDPVQKMVSLDDFQPLWKLLPDRLQKRLRGKWRRGKVFLLAQIRAQLELLGDTSAFDTELQRQLDAHNIKAKKKEKQITREDLLQKHFPSKPLKLDGRAPFARHLLKQAYEEVMAGKDPNGKDGCLFRSEEIRQKELNREIADQTNNHLVRHRLLILERVLKDIIKEYADGKKERIGKITIEVNRDLREMSGKTNYEKQTDLNNRVKNHHAVAEKLEKAFAEESNGKSIRITAGLIRKARIAEDLGWKCPYTGQSYEPKHLITRFVDKDHIVPRSERASDSLDSLAITFSAVNKMKGKRTAWQFVSEDQGKPVSDLPNLSIMSLTRYKQLVEGLETRGSHEDDRRRKKRRKELLLLPKYEEKEFTQRDLTQTSQLVRLGAQVLKKNLPHLTTGDVTSLPGSVTGTVRKSWDVLGCLSAANSQVLDANKKVKTKTEIRDITHLHHALDACVLGLSSHFIPNNGRVWELIIKRNPNDLEKRQLEALGVFGFNAEKRFEMRDLDNKLKEQIRQRLAEKRVVQHIPARMDGLRVEQNTWRVVAVKDDEVILRQRVRQPDGTRPEKISEEKPAKLLGLNPTNENGKLAKNKGVLIIPDNFGVALDPQPTVIPFHKVWTRLQELKKANGGKMPRVLRNGQLIRVKDGTYKGVWRVFSAKNNATGMALDIGSPDIVRLKNKTEGHKINVLLSSLIKGGLDPLHTPFTGVNPK

SEQ ID NO: 8899 - protein, 954 aa, unidentified
  REGION 1..954: note = Description of Unknown: Cas Enzyme sequence
MKDYVLKNKPEPASNEMVWAFDLGKGSIGEAVRRGNEFLHKASLLIPADLARRGPAKISGTPANRHRALKTREAHYERERWLETVWTAVKLPVLRPREVWENPETKKWELKHPADYQLEREFAPAEFRRNSKTGEKEKIVYPNGRAKKDGAPAATPEDFDLCYTSSLLRIKLLNGDSNLKAWQIYKALRAAIQCRGYGKVPWAAKEARKQGKTAEELELEEEKKLLQADPRYREAVGRWPDFKRSIQKLKLPLFDGMQPRKPDNFYFVPPCYYDAWKMGLWNPSEPDKLLPHSNLANSTRNVRFDRIDVRNELIMLGDQAAALLPEIRDTFSRWQREGWKIGHPVTGKELTYSVHARTFGEFLCDGPAGKPDETSFEAFLNQREKAGLHRGSFEEWMAALGQKTPSFDNRILNDCTLIPRFHVCKVDLKLETAKNGGITGKIISESLLASEVTLLLKLKNLHVSDPVNGQRKLTVEEVRDVFAYANRQLKSLNLIAADGELIKEWPKKVADRFALNKSDWEKIAAEAEFFRKMSAFGLSQGGENRRLTEAEIYLLLRAAADSKRKLEHELPENLKALFKAAKAEWKKAKVAADDTMLRPLTNHEIVKAPKTSGRSGYSRVALRIIKELILSGQAPSVFHARLLRRESELLGKLGASPAKPLCLFANSTAASEDQRKKEDTENRKRGLLESELNFLLQMRKDGATEDSWKDIFIPSQTIDALQQRHTKGNKLDADAAVTELLGSINDPIVRHRLEVFDKRLKKFEFGDEKENIPRLGLPDAIVLEFVREDFMGEKAKRELKDFQDKREAARKKAREKATSAGSEEKSAALKFELCEAQGFICLYCGQPFAPTKLNECRIEHIVPTAQGGPDAMLNYVAAHDECNEAKGKQTPFQWWHHNTSGKAPTISWDGYKALVDKYATTLRNKKVQLLTREDADKLVERYTALAETAWISKL

SEQ ID NO: 8900 - protein, 1088 aa, unidentified
  REGION 1..1088: note = Description of Unknown: Cas Enzyme sequence
MSSVAEKSRKYILGLDLGSASLGWALIGIDAMERPTSLIRAGVRIFEPGVDGSALDIQQGKDQSKAVDRREARLRRRQLRRRVARQRELFGVLQGAGLLPTDDTQVAGIGSEQRHRILNDLDVTLANRYRTGAGQETFAQMPLYALRKKALYEPLALDEMGRVFFHLSQRRGFQSNRKDVKKKTKDSEDQGQVKSAIHELEQAIEAADAKTLGEYLAGLDPHEQRVRRQWTGRKMFEKEFQVIWDKQKEYHTDLLTSELYDRIWGLLFDQRPVSAQKHLVGKCELEPDKRRAPWAALPAQQFRLLQKVNDLRLIEKDGNELPLNEDGRIAVFNLLENQGTQTFAKIKQHLGLPKTAKFNLERGKAKELKGNVTAQSMRKVFGERWKEFSAGKQNQIIENWRNSEKDEELKREAMEHWGLDEAGANALVNEKAPGDYCSLSLVALGKILPLMRAGKSFKEAETEIYGNRFSGAEIHSLIPVLRPNRKHFRNSAPPPQDPLMASIANGLRNPAVERSITEMRKVVNAIVREYGPPYEIRIELARELKKPRSKRLDETARNRKREAENKALAERMHRECGIPQPPSRNDLEKAKLWVEQQGECPYTGRSLPFSRLFDDNNGFDVDHILPRSRHPDDSYQNKVLCWGDTNRMVKRNQTPYEAFAEQDPENWYQVLARVARWKNPGKSRKFEIHSTDELAEFSSRQLNDTRYTSLLAARLLSTLYGGRDSAENGRNRQIIFASTGAVTATLRRNWGFEQILRNIIPLEPTESTGKPRTDHRHHAIDAIVIALTRNDVIQAMARASALEPWQPGTRSWRHVPQPWRTPNFFRSVEEQVREMLTSHRPEHKVSGELHKGSNYGRPYLYKGKPTVHSRVSISALKAQDIEEDDVIVDRTIRDILRAKLAEIGGNPKAFEKPENTPYLLTAAGKRIPIRKVRIRETKNPLRVGEGSSERYVASGGIHHVELFVTRDEKRRETWDSRVVQITEAYERRRAKKPVVARVLEENPEAQFLFSISNDDTIEIKDGDRHKIVRIKKSGENKQIFYVPVNDAHTDADQKRLNIASSKYPSTLKALEPRKVVIDLLGKVHPAND

SEQ ID NO: 8901 - protein, 1098 aa, unidentified
  REGION 1..1098: note = Description of Unknown: Cas Enzyme sequence
MDEKTVQDLELAFDVGHSSIGWAVLQHRPGVKSASDEPRVGILGCGAVVFGADDCLASKRRDYRRQRRHTRSTRHRIAQMEKLLAHLKALSVEELKQKHLQAGGHAAPWLLAARVLAGNGDGKYLLDWPVLWDVLRWYAHNRGYDGNRRWSAHEAQAEGEDTEKEKTAIALMEKFGAKTMAETVCKAIGLDPLGEKQSSQENFKRLNAAFPRNMVEKEVRRLLELHQAKLKTIDDAFLKCLFEDWRAVPVPGLKLPARYQGGLLFGQLVPRFDNRIISACRITGAKVPSKNCAEFFKFRWAMILANIRIAGPQDREMRPMTSAERKQINQVMENEGALTPIGLKKAVRELTQCSRDNLDMMLMLPDAKDGLLLDPIQKLARGDKLKTLWPTFSPRVQKRARDLWQRGKSVTLSGICEIAKKLGEPLGDFETELRRLADAANTKRGKKDGSFDSAAFLKEPLTVKRQDGRAPYSRPILVRAYEQVMAGKHPSEEKDGGCLFVTEEKRQAEQQRQIDQQTNNHLVRHRLLILERLVKDLIADPAYANGDKSRIARATIEVNRDLREMSGKSAKEIQQDLGRRLSNHHSVAAKLERDLNGKTFNGKPIQITAGLIRKARIAEDLGWECPYTGKPYDALDLVSRQVDKDHIIPYSLRPSDSLDSLVITFAEVNRMKGQRTAWQFINDEQGKTVDGLPQLSLMSLTGFKQRAERLECYKGHDDDQRRKKKRKELLLLQAYEEKGFVPRDLTVTSQLVRMGAQIVKKAFAGTAKPPGVISLPGSVTGTVRKGWNLIGCLAMAAPQVKEADGSIKNKTAIRGLTHLHHALDACVISLTSHYLPSNGSLWELMLKRNPTAGEKTILRATGYFDFDAQGRFGLRELPDVLKEQISRRLAEKRVVQYIPADMSGMRVEDNTRGVTLVKDGCVFLRQQTRDPKTGKISVKETEESTGKVIGLKPGKLTPQKGVRVITDNFGVAILDHAKEGEERFVIVPWHKVWPRIQELKPRNGGKIPRLLRIGTLIRVSKKAGRSDYRGLWMVRGVQLNRRVGFLVDLSAPDVIQYRVPGRDDCAQNIRLQALFDGGLEILKTPLTGIASISDNTIK

SEQ ID NO: 8902 - protein, 983 aa, unidentified
  REGION 1..983: note = Description of Unknown: Cas Enzyme sequence
MEYLLKTAESSSWKNHEFYTSSVVLGIDIGMEGIGIYLRKGPQTLHARTYLFTLPESAPLENRRLKRSARRARNSRKRRNILLRAWCEKHGLPTSPFITPNHEPFRLRLDAITEGKGLKSAEALVVCLRHLIGHRGYDYHLTEEGTYPWGEGLNFGDILGWARTTACKPEYGKELKTLLSESGLGEDKLERLYSAIDGAVAHYADKPILKVLEAHFREKKPNLRPPARKNNFPRELVREHLEEICRKNSRFFVQTNLENALSELKQILDYHRKPPGALAEKKTKVCPYAERLGLAPDMKCALNDNLEIRKFKLLQFLAERTFVEKGGARLYAPPGVAQTALQKVEEDAKAVAAKQPRKDVRTLRRDFEREAQVVLARKESHNEDYFDQLRDLLKPNITVLKKRASLGAESARHLYATATQNSTNFDPTSVRANLENYYQLRRDNERGYGIYPQVEFLLGPRRSNDKQAVHGLLKRLMAANTLKEQLGGKEHPDYVVVEVIGDIPRDKKEAKELQKDQKARRGFKDKLFEQLEGVGNTSDRKRLLLFDQQNGICPYTGTDLGDALSPQLQVDHMFPRERGGISEMINLVLTHCQTNSKKSDQTPFEFIGREGLAQHLSKMKWNRAKRELFAREESECPQWQNTTRMAQLARQLRDEVAHWLNIKGDATEMARRIGTPTGYMTSVCREAWGVPKKNRNDLRHHLYDAITLSYIPPGKGLNTVEYGGIFYYPSENKAGSIEMRALQKAGPDAEIFARLPSDECLVIKPRRKKPKQSRMDATIYGQDNEGNLRSRKPLLKKAGDNDDSAVPVKDVDDLLAQSGIPLNKRPTRQRIEAWKEQDWKSADEKKPLKLNDGTKIERVPALASKQPQPIAVIAHFNTREKLPIGFKVATESFIRAEFWVTERRDKKDEIVRSQDGRAEMEYHRRLIPHPRGLMNLRRRMMRCTGEPLSWDRALTVDEIVELGIKDHPEVKRLLKARENIIKR

SEQ ID NO: 8903 - protein, 1376 aa, unidentified
  REGION 1..1376: note = Description of Unknown: Cas Enzyme sequence
MSIKDKLARGTDANLHVSFDVGHSSIGWAVLEKTGQQVSDIKINGCGSVVFRADDCLASSRRAYRRQRRHIRSTRQRIERIARLLAHLLANEESDKAPELVKRLQLYLNSPSQDRAKLQGEVDSAPWKLAAQVLQGGNLLTWPELWDVLRWYAHNRGYDGNQRWSNNSEVENEAAELDNAALDKILKDASATEDEKKDAKKVIEAKNLMQRHDVKTMAQTFCKELGIEPKGEKKSSMKRFKGLNAAFPRKTVETEVLQILQAHKFCDAKIIHLLLAKKLSDEDRKFLKDAGIRLPKRYESGLLFGQLVPHFDNRIISICPITFARTYKKLVADGKAHDEAKHKAEIAAKVPTKKSREFLEFRWAMLLADLTVKSKINGTLRNLSYKERNQIHAEMKRRGYFSKDDLEKNLRDAAPGFEPANLDAMFKITSEREDSLVLDPIKKFVSTNEIASAIWPTLPTQLQKHLENRLRRRKSIKCSEIRARLIAAPYNSPPEKFDSTIIRLVDSENLKNSAKKRRKTDADAEKKKVPLTVQDFLKRQLEGKFPTGRARYHRSVLKQAVAEILRGEDPRKKSIDDIYNGIQKQNNGCLVETEEMQRLNLGQTESAQDAENSYKAWLPKWLKKKSKTGKMVNQARYDKNGDAYARVIYEARLANQWLAAQTNNHLVRHRLLILDRLTTDIINDKNFAGGNPERIGKISIEVANDILAMSGMSSVEKAKAKTSMSKQHEAVKKFVMEKLYEEGLAHCMNGNLLWKAKVADDLKWKCPYTQEAISVPDLVFGKMDVDHIIPKSKKLTNAMGAVVITFKQVNAMKGARTAWEFVNDKQGEEIPNTGKHIRNLKGHLGYEDFIASLKTWGEEPASKIKYWPKYLDETGTKEHPDFLRRKKRIGLLETKHWDKSKDSFTPRDLTVTSHINRLAQQVLLKRFLHLEPHKISAIPGTVTGSLRDLRGWKLLGCLGDKSVCGDDVMTEKPVYDWVTQKKKIDEKNGEVVMKKVPLPKGEIRKKTYLHHALDACVIGLVSHLLPRDGKLWELFALKELTDAERELFQKLSEEFRWKGYYFGDFFETAKISDSEINESPDPDRKWRIVASRNAKDRLHEIKNQIIRCLSEKRVVRHIPADMSGLPADETVWRVADLTNRDELKKILRQKLGYSGENHVDKLADGLLTKLNQEKGNGQVWLVRSIRRDSTPKPLEPKKLLLTTETFYVAYDQVRPEMLIGVTPEGDPEEAKLYKIKGAKQINANYGLAIINGGKSDVSYQVIPWFKVGRNVLKLKKANTDKSVEILKNGQLIQATVLQFEGRGRPKKDAKPNEYPGIWRVDSIKAPATGEIELDLTTADGLDYAFTNRSLQKELKNLKILKTSLTGVAVCPVTSPA

SEQ ID NO: 8904 - protein, 1108 aa, unidentified
  REGION 1..1108: note = Description of Unknown: Cas Enzyme sequence
MAKKYLVGIDLGTDSCGWCLTDETGKIVRKNGKCLWGARLFEESESCAERRSFRSDRRRLQRRNERIKLLQNLLEDEITKVDNKFYIKLNESQLLDEDRSYRYDYNFLEDKEYNKKYPTISHLRYHLLVSNQKEDIRLIYLAVANILKNRGHFLFEGANFSSSGTNEIIECFETINNCLEEIGSEKMVEISDNILNKLLEANKNVFGISKKKYSFDELINPNKDKFVKDVLVSLLAGGTVSISKIVDTKENEYDEFKDIDCNKEDFDLIIQSLGNNFPSEENKIKCLIEIKKVYDFLLLNKILKNSTYISEAMIKDYEKHKEELILLKKYIKLNHKEVYNEVFRLCDKDINNYCAYVGSTNSNNVVIRFKHCSAENFYKYLKKVLGLDKYRSAEEIENQYLKNIYLEMQAGTYLSRQNNSNNRVIPYQINLKELEVILDKQSKFYPSLLVKDQDGLSIIDKIKSIMVFKIPYYVGPLSTHSSFGWISRSNEKIYPWNFNKVVNIPETAEKFITRMQNKCSYLDDKFCLPKDSIIYNKYIILNEINKFSVNGQPITFDDKQDLIKKVYYKKPIVKKKDLEKFFKARYGENVVVSTSSGKELNDISGTLKPFIQLANIFGEKYVDENIDLMENLIRENAIFEEKKIYKERLINTYHITDQKKINSLLALRFTGFGRLSKEFLLDLRGVDANGEIIDNGSIMDILMSTNKNLMEIINDQSYGFKDSIELHNKNEIDIYKKKGEDGVTEYIEKLFVSPGIKRPLIQAYKIINELERIVNHPIDEYYIECTRSNKSKKEKKKSRKDKLLEMYDAAITLCADSEKKELEELKKNIIEKEDSLFRSDVVYLYFTQLGKDVYTGKTIDFDSAIKGNGYDIDHIFPQSVIKDDSLTNRVLVSSVANSLKTDIFPIPYQKLAKDYNPKPFLSLLRSLRLIPEEKFNRLTRNYPLEDSEIFNFVNRQIVYTSQSVKALKDLVLSFKKNANGEEPLVILSKAEVVSDFRKNFDLLKARDANDAHHAHDAFLNIMVGRTVDCYFKHVACFGRTTKNGKTLTTNVDKIFYNYNSEGVSKDNIFDNGENLVWNYQDDATLKYIIKEIKHNYNILFTTRTYVKP

SEQ ID NO: 8905 - protein, 1424 aa, unidentified
  REGION 1..1424: note = Description of Unknown: Cas Enzyme sequence
MGKISKDYYIGLDMGSSSVGWAVTDLDYNILQFRNRDMWGSRLFEEAQVAEERRTFRATRRRIDRRKLRIELLQELFSEEIAKKDFAFFQRLKISNFYYQDKEKGIIEINNEEIDNKIIKAIDSKNSLFNDENYNDKEYYKNYPTIYHLRKALIEKDEKMDIRLVYLAVHNIIKYRGNFLYEGQNFEQGIKINITLQEIQNWLIEREHDNEINFGDIYNLQAVLESKKGTLTQKKADLIKFLKANSPIAKEIISAIVGGSCNLSKLFDDEIEVEGVTNFKFSENKYEEEIKDKLLESLGEDFRIIELLKAVYDWGRLKRFCAGKNYISDAMIEIYDNHKTDLKKLKNVMRDYISTEYDNMFNVADKGINNYCKYTGHLRNKNKQNGLIEKKCSKEDFYKYVKKVLNTYLESIMEINDFKELDNSLKNGKDFVLDSDKLLLIKDKGYEIIVEILKQIAIGDFLPKQLAPDNGVIPYQLHEIELKKILQNASKYYPFLDEKDDDNYSTREKIIKLLKFRIPYYVGPLNNTHLRTEQDKSGFAWVVRKQKGKVTPWNFDDLIDKDKSAENFIRNMTNKCTYLAGKDVLAKNSLLYSKYLAYNTLNKITVNGEFIKVDLKEKIVEGLYKKQKKISINSLKKELLKNGAFDKSKASELEIGGIDIEVKEISGSLSSYITLKNYFNDKVDTNNELMEDIINYATIFDNDSNMLRDTILKKYPNVLDLDEQKCLDKIHFSGWGNFSKEFLLLELTDINGEINTIIDILKNTNLNLNEILYDPKYNAQEVLNAYNKNDNGEEFDYKKVEELYCSPSVKRSIWQTMQIIKEIVKIMDCPPKKIFVEMARDSAAEIKKNKNKRTISRKETLLEKLNNIKNDEDNKNLIEALNDENDQKMRSDRLYFYYAQMGRCAYTGEKIDLSNLFTDSYDIDHILPRALVKDDSLENKVLVKKSANQIKKDIYPLSESIQAKQKANWKLLLDKKLITSKKYEKLTRTEPITQEELLGFVNRQLVTTRQATLSVTKILKNCYGNTEIVYSKAGNISDFRKENDIIKVRDVNNLHHAKDAYLNIVVGNIYNVKYNHNANWYKQPNHEVNLKNLYNYEIKGANGQIVWQPNTTVKLVKNYILKNTPLITRQSYQGKGTMFALNIKSKGGDKLVPLNNNGVLSDTNKYGGYGGICTAYFSMIEYQKGTKIIKCIEPIPIFVAIKIKNQEDLKKYFESKGKKNITIIKEEIKIKSLIEINGVKSYITGVTDNNFSLTNAEELLLDREMEEYLGRIIKFNNKQKENKNKNKEKENQERNQNTDIIVINRDNQNKPIKTISKDDNLKLYEQFTKKLGIKAYKRSEFKTSMNMLIEKKESFVNLNLVDQINFLLQVLKLFKCDAGLADLTLLGGFKNAGKIRHNMNISPDEKITLINYSITGLHCNKKEF

SEQ ID NO: 8906 - protein, 1306 aa, unidentified
  REGION 1..1306: note = Description of Unknown: Cas Enzyme sequence
MKYSLGLDLGIASLGWAVMKLDNENNFERIDDVGVRIFESLENPKDGKRLVEKRREQRGQRRIKRRRVQRISKFKNLFKQFFGVEYGCEEYDKLRNSVLANTDSLGVYNIKKKGLYSLLTKEELYLILLHYCKNRGFKSNRKVSDKTAIKSGEDDGKLLKGISKVEGYIAKEKCFATEYIISSYLNQPIENRRIHNGADNYSNTISRKMYLDEITAILDKQISYGLIDSNFKEKYINIWSKQLDFSDGPESGPYSGNQIEKMMSHCIYEKEEYRAPKGSFSAASFVLLSFLNNIEYKIENGVYQSLKPSTIKAVYEKAQVTSRLTYKSVFNIEKVSNPRIKGVDLSKKEYLEVLNKVKKGIAEEQANKSKDISNDTNKGKKSSIMNVDEPKPENIMIREMVQEKILNKTIPSLDVYIEQKSTFLSYKKEKKTKAEYDEFINDVDNYDIISEILLICKTDDRIIQKCKERGIQNEDIIKTVLQMKPITKTINLSNKACRNINKYLLNGAKYNEAVELAGYGSHSVIVESKKLGYIPPLDKIIAELDLSMTNSNVKHMLNEAIDIINALLRTYTSFETINIELARDLSRNFEDRKKIKRNQQENSENNERTKNEILLKYPEVFKSLYELKRDDIIKYKLFREQKGVCPYTYSEIGFEDKARIEETKLFGPDYEIDHILPFSLSFDDSYSNKILVFADKNQKKKNNIPFKYLKAEEFGRLKEWTKKFGISLEKQDKLLATEISESFIESNLNDTRYATKVIRTIIEKYLDINPTQIICCKGAMTSYLKSRWGLSNLTHSIDSKKMQKINDYRFIGDYFDEEDGNFFPIMENGNKTELDNKSDFIPKDKIRVNKDGVIIESEFEIGYRESYTKVAKNIHQLRECIFNLKAKNLYSFEDVYNYVYRKLVDKNNQTEYEFYSDFIVLLNLIRENIDDAINAKNRDNHLHHACDAVVIACCNRALIQRVTKYYQFNEEGRGKISLLEHSVGIHDKKMFPLPYVNFRNDVKNRIYQRDFSLLKEEIQKMGNYSDVLDDKSYMKRLTILMPSHPVSKKTSGEFHDETIFGFRYTDDSKTTGYYTKRIDVHKLDKCSDIDNIVDIDNGAKYLRLPLQKWLDKDDKTRKECFPVLPNGKKIKHVTLIEPGEYGSKVCLGLINKEDKPRGFANNSTVVRVDLYRNSENTLFFVPIYAYQIALDAKNIDYPAALLSNKKAIYSHHSDLEKNYTKITEIPKYSLVEIVLKSGERGICYTGGVSTGGWEIYSVLGDNSDIIKRYKLMGHHKSGQYQIGISSIAAVYKKEISVLGKIKHYEL

SEQ ID NO: 8907 - protein, 1564 aa, unidentified
  REGION 1..1564: note = Description of Unknown: Cas Enzyme sequence
MKKILGLDLGTNSIGWAVINKENDNLVGIDSAGSRIIPMDAATLSDFAKGNTKSQTADRTLYRSVRRLRERYLLRRERLHRVLHILNFLPAHYDSQIGWDKSDNKTYGKFINNAEPKINWRKVNDKYEFIFMNSFREMLEDFKINSSIKGEVKIPQNWTLYYLRKKALTQKISKGELSWILLNFNHKRGYSQLRDEEENEESEKNKSYEQLKVIKVEDSGELVKGKKLYDIYFDNGLKYDKKTTKPENWLNKVKEFIVTTSTLKDGSTKYSFKAVDSTKDWIAIKKKTEQDVIKSKETVGSYIYDTLLKNQNQKINGKLISTIERKFYKDELNQIITKQIEFHEELRDRDLYKKCIENLYTNNDDYRNSISGRDFKYLLLDNILFYQRPLKTKKSLISNCPYEKRNYRNKETNELVDVPIKCTVKSNPYFQEFRLWQFISNIRIYQKEKYVEITNKKATYNKLETDVDVTSEFIRNEDDRVKLFEWLNDRKEIDQKAFLKNELFKKIKKDIDSYRWNYVEDKKYPCNKTRAAILAKLNKSEKEKLTPVLEYKIWHLLYSIHTKEEIDKALSENKSKNNKIYNLLKESFSQETIVKLKTIKFEEKDYASYSEKAIKKLLSLMRIGKYWKEENINKYVLDRINKILTGEYDENIKEQVRKKSSHFSKISEFKGLSVSLACYVIYNRHSENSDIIKWNTPKDIDDFLNDFKLNSLRNPIVEQVITETLRVVRDIWKKIGHIDEIHVELARDIKNPSNKRKQISERNSNNENTNLRIKAILQEFENPEYDIENVRAYSKSQQDLFKIYEDTVLTSVEVPDDINNIIKKFNESDKKKQPSFSDVKRYRLWLEQKYCSPYTGEVIPLSKLFTSAYEIEHVIPQSRFFDDSFSNKVICESAVNKLKGNLLGHEFILNNHGEKVEVGNGKTVTILSLDSYEEFVSKNYYGNKKKKLLYDDIPEEFSQRQLNDSRYISKYIKGLLSNIVREKLDNGEYEPEAISKNLIVNVGGITDILKKDWGMNDVWNSIILPRFQRLNEITNTQKFTTTTANGHVIPTMPIELQKGFNKKRIDHRHHAMDAIVIACVTRAHVQYISTINSQSGDYKLKRGLANKLRNFKTVKYPKWITNANGVKVPGPEKISRSVPTSYIKPWATFTQDSKKVLENIIVSFKQNLRVVNETSNYYYSYRDSEGKLYLDKNGNKIKKLTKQSDGHNTAIRKPLHKETNYGLVNLKRKTTTNLKEVINNPEVIVNKALKEKIKELLNQNKDYKQIKKYFDNEDSDVWSDINFKKIEIYFYSNDTNNKYVATRFTNDLVNVFSGINKYDKAIKKIESITDESIQKILINHLHNNNDDPLISFSADGIEKMNANIKELNNGKSHHPIYKVRLFETLGEKFALGKIGNKSAKYVEAAKGTNLYYGIYSKKINNKKTGEITYKRVFETIPLNKVIERLKNKLSPVPETNSDGDKLMFYLSPGDLVYVPTKSDIENIDINHSESLKKFQLQDRDKDRIYKAVSFTGKRSYFIKESVAVSIVNKVEFSALNKLEQSLTGEMIKNICIPIKLDRLGNILK

SEQ ID NO: 8908 - protein, 958 aa, unidentified
  REGION 1..958: note = Description of Unknown: Cas Enzyme sequence
MNEEQKYYLGLDIGTDSVGWCVTDYDYHVVRKQGKHLWGARLFEAASPAADRRTNREARRRYQRRRWRINLLQSLFAEEMNKHDANFFDRLNNSAYHKEDKPANCQTPNLLFNGSKTDSVYFKDYPTIYHLRYEMMNNPEKQYDLKQVYLALAHMIKYRGNFLYEGEMKSIGSDPTTLTNLFNDIDELMREDNQEGEDAPDSIATFNCNDDKSQKLITAFITKFKKQELCDSEAEAFGFKVGKDLPSGLLKLVNGSKMSVSALFRDINDSEVSNLSLDFTSDDFEKSVAPSLSSQIGDVRTNIIMLAKQIYDYRILISLLKGKATISEAMIDTYQTHKDQLKVLKRLYKDYAPEKYNNFFRKTIKVEIDPKNKKPKNVAITNYVNYVGYNKIGKKKECLKHSVSNEDLCKVIKKDLPFDKTDDFAWKRPDDRKLLSDIFNQMESGVYLRIQNSKLNGVFPYQLNEMEMKKIIDNQKKYYPFLGECSKEKPNEYKIVTLLKFKVPYYVGPLSPKATIGWSVRKQEDVKITPWNFDDVIDKEKTEERFIDRMKNSCTYIFGEQTLPKSSLLYSEFILLNEMNNWLINGEKITEEDKKYLIDNLYLKQKKVSVTKLKSVLKSKYKNENVLLSQRTKELKEEDLHASLASFIDMANDRGFGEKFYLDEKKRELAEEVIFTLTMFEDGNVASERMRKLGLSESQIKYFSSLHYSGWGKMSQKLLDGLTSEVLDNTTGEYINKTIMDLMRVSPLNFMEIYETKNSFDFKEQVDRLNKTKNLTIDEIIEDEYVSPDMKRALKQTKRIVEELKKILHIDSFSSYFVECTRSEQEKKRTLSRKKQLTDIFKAAKTLAREEVKERLASIPEEKLRAKKYFYYFMQLGYDVYSGEPISFEDLQSGSNYDIDHIIPQAKLKDDSFNNTVLVSKSANNSKSDTYPIPKTILLDKGREIIIKLNSIHDSNKK

SEQ ID NO: 8909 - protein, 1415 aa, unidentified
  REGION 1..1415: note = Description of Unknown: Cas Enzyme sequence
MSKTILGLDLGTSSIGWALVKESDDVDYNSEIVRLGVRVIQYDNFNVVERASGKVKDSRDPVQDFIAGKGLSPNAKRTKDRGARRNLQRFKLRRKNLIRILIENGIINENTPLTEIGKNTTHQTLWLRTQAAHDKIKIEDLAKVLLSINKKRGYKSSRKSKGEEEGLAVDGMSIAKILYDQKLTPGEYVFQLLSEGRHFIPDFYRSDLRNEKLKIWDKQSKFYPDQLTNDLYRALEDKNKGTTWKILEGPWSLKGLKQTGTRDEQRLERYKWRKQSLSEQIDLEKLVIVLQEINGELSNSSGYLGAISDRSKELYFNKITVGEFLYNQIKKNPHISLKKQVFYRQDYLDEFECIWETQAKYYPKILTTKLKEEIRDVIIFYQRKLKSQKGLISFCPFESRQVEYIESNTGKTKTRIIGQRVAPKSSPVFQEFKIWQNINNVVFIHEMSGEIIDLRRLDDAARSDIFVELNTRGNLTPKDIIQIISRHLYINKISDWKCNFEKIEGNSTNKALFDIYQQIAQAEGYGFDWAKKTATEIREELTSIFPLVGINKDILSFDINLESKDFERQPCYQLWHLLYSAEDESKSCEEDRITYGNNDTKLRKKLHEKFGFKPEYAIKLSNISLQQDYGNLSTRAMRKIIPYLQAGHPYAKGSDNDTEVGACELAGYNHSKSVSAEELMNKILKEKLDILPKNSLRNPVVEKILNQMVNLVNQITDEYGKPDEVRIELARELKKTSDEREKMSREIMDATKRNDDIKKLIIKEFQIPNPTKNDIVRYRLWDELKDRGYKTIFTDKYIPKEKLFSKEIDIEHIVPQALLFDDSFSNKTLAFKSENLQKNNRTAYDFIYQDYNSNKTTYEQNVEAWYNNGKGSISKAKRNKLLMPYKDIPEGFIERDLRNTQYISKKARHMLLEVFRTVVPTTGSITDRLREDWGLVNMMKELNLPKYRALGLTEFEDRFDIGLEKPKKVEVITDWTKRNDHRHHAMDALTVAFTTHNHIQYINNLNARRDTNHKQHYAICAIENVITQKRNGSRIFKEPIPNFRNVAKEAIESILVSYKAKNKVVTNNINKTKLSGKLRYKKSLQTTPRGQLHKETVYGKSLRPIAKPIKLNNRFSQEMAQLIIDSKEREAVLQHMSKYENNSNIAFALKTLKNDPILLNNEQLNEVGCFEVIFTIRKPITSDLQLDKVIDNGIRTVLEERLNKFNGNSKEAFSNLEENPIWLNKEKGIAIKNVTISGVSNAVPLHFRRDHLGKEILGNTGERADSDYVQTRNNHHVAIYKDTDGNLQESVVSFYEAVERANQGLPIIDKALNRHLGWEFQFTMKQNEMFVFPASDFDPSEIDLTDPENAILISKNLFRVQKLSTNYYTFRHHLETSVTNDLDFTYRRIRTPNGLKGIIKVRVNHIGKIVCIGEY

SEQ ID NO: 8910 - protein, 1380 aa, unidentified
  REGION 1..1380: note = Description of Unknown: Cas Enzyme sequence
MKKTFGDWYLGLDVGTDSIGWAVTDKNYHIQKLNSKALWGSRLFPEAKPAAERRIFRSARRRNQRATQRIKWLQELFSQEICKVDPGFFQRMKESFFWEEDKTEHQKFSLFNDNTYTDKNYFKQFPTIYHLRAALLDPCQGPFDIRLVYLALHHIIKNRGHFLFDGDMESAPSFKPIFKEIVEYFQNLQEEETAYSFPEESIHQVGLLLSDRSLNRLEKSSKLMELLQVDKSNKSFKTLIEAMVGRKFSLSALFDDENLQNSECNKLCFADGNFADEKIPLLETELDEDRMYLVEKMFAAYDWALLADILDGQHFLSQAKVLAYKEHARQLKELKKVIKEYAPQKYNEVFRSPSQKDNYCCYIGSTMINAKKLSIEKKCNYDDFSKYIKTIIDNIAKTQNGCIDKNVQELLSLIERRELLPKLVTKDNCVIPHQLNCLELKAILKNASNYLPFLNEKDKEGLSVQEKIVSILNYRIPYFVGPLNGSHAQDTGRKFYWACKNSNDRIFPWNFNKVVNLEESAENFILRMTNKCTYLKGEDVLPKESLLYSKFTVLNELNNLRLDGEPITVALKQEIFLNLFLKEKKVTQKKLRNFLHINDNVEISGIDNDFKSSLKPYLDFAQYHDFSKQGDINNRLTEEQIENIIRWIVLFGNEKKILRAKIQKTYPETRFTSADIQYLSSLHYQKWGNFSASFLNLCAPDPHTSMEVSLVDMLWETNNNLMQLLGNDYSYSSMIEEFNNEEPLDKLSYSVVEELQVSPVVKRQIWQTLVIVRELTKVMGHAPLKVFVEMARKKDKKKLRKDPRKDKLKKLYEKCKEENAELLESLNQQPDGNLQQDALYLYYTQMGKCMYSGESIELEDLLSNSHIYDIDHIYPQSLVKDDSLDNRVLVKKTLNGIKSDDYPLSLDCQRKMFLFWKMLREKELISKEKFDRLTRTTELTSDELAGFIQRQLVETRQSTKAIANILKRFFADKSEIIYVKAGLVSDFRKAPPTGKEIKNGYSEEEIKKDALLKVREVNDLHHAKDAYLNIVVGNVYNTKFTSNPYNFINNAEKKRSYNLKRMFDFEVKRGDYSAWVPGVEGTCKLVMDTMLKNNILFTRYASTQRGGLFDQMIVKKGTNDDLFPIKGKIGSPLANTQRYGGYNKTAGAYFMLVEHLEKKEKVRSFEFVPLNLQQYLEESKEHLLQYCIETLHLIKPRILLSRVYINSLLLVDGYPMHIAGRTGNQLSVKGACQLVISQEMQNYLHNVVKYRQKCIKQKKQLSVNEYDGITKEKNLWIYEELVRKHSLMPYKNRPASQASLIAGKIEQFQNLSEDSQCIVLLEVLKLFQTTGVTSDFSLFNEGKKKGYPTLGKKLNQSKTNYLIFQSPTGIFEKEVNLLTL

SEQ ID NO: 8911 - protein, 1337 aa, unidentified
  REGION 1..1337: note = Description of Unknown: Cas Enzyme sequence
MSEKKKFGEYYLGLDIGTDSVGWAITDVDYNLLEFNRKAMWGIHLFKSGETAEDRRLHRCSRRRLQRRHQRIMLLRELFDEEISDIDPSFYSRLDESNCILEDRKEKQKNTLFNDPIFTDVEYLKKYPTIYHLRKDLMVTKSKPDIRSVYLAIHHILKYRGHFLFDGLSKDSNLPEFDELFNRLLNELYSECNIKFSVSEVLPNIKALFLSKDRTVSDKASELSSLMSAESVAEEAVCQLLAGRTVTLDRLFSDKIYKDLKVRFKGTSFEDSREELEDALGETYFGLLDSMKQIYDWSILKSMLEGFDYLSDAKIDEYEQHKKDLVILKAVLKAHSMKMRGDSSLYREVLKYNVPNNYCAYSGMVKGIKLDSQKTCSQEDFCKYLGSVLKDFDFTKDKFTQDMKKSIDEGTFMPKQTSKDNSVIPNDLHRRELVAILDNVSKFYPFLLETDSDGICVSEKILSLCTFRVPYYVGPLNGFSDRAWAIRKTTDHIYPWNFENVIDIDQSAIGFINKLISYCTYIIGERVLPKRSVLYARFELYNELNNLSINGERISAELKSSIVRDIFEIGKGKKVTVKDLKTYINIKYGEKDVEVMGIVDSVKSSISAELQVRRIVGDSCKNCILEEIISCITIFGDDRKRLKSKLSTDFGDKLSNEEINELSKLKFSKWGRLSEKFLTGIYHTWSDGSSMNIITALEQTNCNLMELLSKKYSYMSQIEKINDAIMPKTKDGKITCDIVKDLYCSPAVKRSICRTLSIIKDVLNITGHSPKKIFIETTRETSDNKKIPDSRKILLEGLYKKCLNANNELVKSLQGTDNARLRGKKIFSYYNQMGKCMYCGKKIDLNDLSNNEICDMDHIWPQSLVMDDSIHNNMVLTCRRCNQDKLATYPIKEDIQKEMHSFWNYLYSNKFMTDEKYKRLTRTSPFTDDERNSFIARQLVETSQSVKAVAKTLEKVFGKSSDIVYVKSGNVSRFRQENKFLKCRNVNDYHHAKDAYLNIVVGNVYDVKFTKNPLNFIKNNDKYNLGKMFDYDVSRDGVNAWIAGEDKTISTVKKYMRRNNILYTRYPYKESGQLYDATLMSKGLGQCPVKKNKSIETYGGYNKISGSYFSLVEHTCKGKVVRTLENVPIMDAFKLSSIEDMNSYFAFKGLINPNVRISCIRMDSMLSVNDFRVTISGRTGSSILYMCAEQLILSIDLYNYCKNLYKFAEAKKGNKEIFDAKDYGISAELNLNLYNELLSKIKGLYGKLSIYRSQLETLDKLYSKFKESAIEIQAGILSEILHIFQCNPVGMNLKALGGPSNAGRILLNQDIANTDSIKLINQSPSGLFEIQTDLKQI

SEQ ID NO: 8912 - protein, 1511 aa, unidentified
  REGION 1..1511: note = Description of Unknown: Cas Enzyme sequence
MKKILGLDLGTNSIGWALVEKGENTNEKTDKILGMGSRIIPMDQAQMGEFDKGNSVSQTAERTSYRGVRRLRERTLLRRERLHRVLNILSFLPEHYAKEIDFDKHLGHFFESTEPKLAWNKNIETGKFEFLFQKSFLEMVEDFKANGHNGNIPYDWTIYYLRNKALSRKIDKEELAWLLLNFNQKRGYYQLRGEEEDENPNKLVEFHSLKVVEVVANEPNSKGDIWYTLTLENGWIYRRSSKIPLFDWKDKTRDFIVTTDLNDDGTVKTDKDGVEKRSFRAPSEDDWTLVKKKTETDIEFTQKTVGTYIYDTLLQNPTQKIRGKLVRTIERRYYKDELIAILTKQIELQPELFTEKKYNDCIRELYRSNTDRQMILNSKDFLYLFVNDILFYQRPLRSQKSFISNCTLEFRKHKDKNGNEVTEYLKAVPKSNPLYQEFRLWQWLYNLKIYTKDDDKDVTSQFIASVEDKVHLFEFLNKRKEIEQKPLIQYLLKQKEIKGKNEVDKYRWNYVEDKKYPGNETKTMISTRLAKVANVPEDFLTSEKEYQLWHIIYSVTDKNEFEKALKTFAEKHNLDIDSFVDNFKKLPPFKSEYGSFSEKAIKKLLPLMRLGKYWNWNNIDYTTKVRIDRIITGEYDETIKNRVRDKAIDLNTESHYQGLPLWLVQYIVYDRHSESSSCDKWNSVQDLDNYVQDFKQHSLRNPIVEQVITETLRVVRDIWVKYGQGSKDFFNEIHVELGREMKNTAKDREKITNQVTENENTNLRIKALLAELQNDRNIYNVHAYSPSQQEILRIYEDGVLNSGIEIPDDIKKISTTSQPSNSDLQRYKLWLEQKYRSAYTGEIIPLSKLFTSAYEIEHIIPQSRYFDDSFSNKVICEAAVNKLKDRYLGFEFIKKFPGQIVEIGFGETVRIFDEFAYQDFVKQHYINNRAKKTKLLLEEIPEKMIERQMNDTRYISKFISQVLSNIVREEKEDDGVNSKNILPGNGKITTILKQDWGLNDIWNDLILPRFERMNQLTDTNVFTTWNEQYQKNLPTVPLDLAKGFQKKRIDHRHHAMDALAIAFASRDHINLLNNQHAKSETSRYDLQYKLRNSEKWIDKDGKPRDKFTDFKKPYDNFTLDAKNELAKIVVSFKQNLRVINKATNHYQKYENGNKVEVSQDGTNWAIRKPLHKETVFAKVSLRKTKMVSFKEAMKDWKNILDKPLKEEIKRVIGSYDGKCDAEILNKFFKDQKYKFQDVDISKVEVYYFDNENAAVRKSLDTSFNKKKIKESITDTGIQKILLNYVDAKGNNPEVAFTPEGVEEMNNNIRQYNEGKSHQPICKIRVCETIGNKFQVGTSGNKKDKYVEAAKGTNLFFAIYEDENGNRSFETIPLNIVIERLKQGLNEVPETSEKGYKLLFHLSPNDLVYVPTEDEFAAGIGLNERDLKSERIYKMTDSSDTMANFIPASIAEVIFNYNKETQKKMGIDYPLQNEIGVGSRGSKNQKAVTGEMIKDVCIKLKIDRLGNISISK

SEQ ID NO: 8913 - protein, 1314 aa, unidentified
  REGION 1..1314: note = Description of Unknown: Cas Enzyme sequence
MKRPQDVERYDIGCDMGTGSFGWSVSDENGDLLSFKHRPMWGVRLFDTGETAENRRMFRSTRRRLARRIQRLQWLKELVGQEVEKTDPEFFEKMKYSSLSPHDTQWDSLRSLFGNGHCNEMYCKQYPTIFHLRKDLAESSEKKDFRLIYLAMHHIIKYRGNFLYDGEIGIHGGLDLSGSASSFLSGFLKDDDAVPDLADSLVRILTRQGTSSYDKEKEISNVFYAVFPDKDDKKFCLELSKAIVGRKADFSVLFGSQGSFSLDDESTAEQYAASLDDDALNSFQALQKFYSETLLSKMLSGHVTTISDIYIHRYDEHRKDLLALKKVLRTCCTQEIYKNVFVGKNSLYQQYREHNSKDSSHDKFLGELRKILKDACDPAVEQERTYCLVRIEEGSFLKKPKSTDNGVIPNQLHCEELKAIIDHQKQYYPILAQEEGNILKIASFRIPYYVGPLSPRATEFGWAVRKEKGAVTPWNFEDKIDVMASAEKFITNRTDTCQYMYGEAVLPKNSLLYSNYCVLNELNGIRLDGKRLGCDVKRRLLAEVFSKQKMVSKGTVSKWLFKEGYADRDKGLDITGFQKEDGFASSLSSLIDFTRIFGHVDEKNEAMIENLILWNSLFSDKKILAKKIHKEYPDLGQDIVTAVVRLDYQGWGRLSRKLLTEVTTVNGEGRLMSIMDLLRETQETFMEILFDDAYGFQDAIEKENRKKQPIVSLDDYESVFPDVPISPSVKKASWQGLRVIREIVQVMGREPSHIYIEFTRDDAEKKRTVSRYYALEKLYKRLINDDAFSAVYQELISQKEAYTKKGGPLSDMRLFLYFCQNGKCLYSGTSLDINRLGDYQIDHILPQSYIKDNSIDNLALVLSGENQRKRDSLLLDDTIIKKQKPFWQVLRKNGLISSKKYRALTREAVSEEDFNTFINRQIVETSQAVKILSDVLQAVFPETTRVVGVKAGLSHGFRVQNGITKVREVNDYHHAHDAYLACQVGRFLTGQFGQAVRRKELYEEFQNTTTNARNQKNGFVVYCMSTEYGNWHGTEVVGKIRNAFGFHHYFLSRKTEELTGAFYNQTLLPKGENGGATVPSKEDRDPIIYGGYSGETLAYYDIIEFSKGKKRMMKLVGIPVRIVALGKTRPGAIDQYLASLYSQPIVRKKGICKYQYIRYCEKDGTYNEYYLVSDSEVINARELMLPLDTMKNLAGFNHLDDIGKQQVYLTLCEKMEKYPCYKSIADCLKRHIGDFVDLPSEKQQSCIQGMLTYMQANASRFDFAKQIGGDWKDIRSNRFSKKGLIPERIEFIDRSVTGMFERSYRIGIPDGRDH

SEQ ID NO: 8914 - protein, 1419 aa, unidentified
  REGION 1..1419: note = Description of Unknown: Cas Enzyme sequence
MKKILGLDLGTNSIGWAVVNEKENDQEKSSIVKLGVRVNPLTVDELNNFESGKSITTNADRTLKRSMRRNLQRFKLRRENLISILRQNTILTNDSVLTDSGNASTFQTYHLRAKAVTEEISLEDLARVLLMINKKRGYKSSRKVNSDEDGQLIDGMTVATKLYETGMTPGEYVFSSMKKGNFYIPDFYRSDLKEELDRVWKFQHQFYPEILTDDLKESIQGKNKSQTWAICAKPFGIEGIKRTSKGEELKKENFSWRVKSLSEQMGMEQLAIVIQEVNGSISSSSGYLGAISDRSKELYFDKQTVGQYWMSKLAKNPNYSLRNEVFYRQDYLDEFEKIWETQARYHKELTPELKKLIRDVVIFYQRPLKSKKGLISFCELESRQIEITVDGKKKLKTVGSRVCPKSSPIFQEFKIWQRLNDVTVKGSVVPSNQMNLFGESQMVNGERSLTEEEKEILFVELSFRDKLKKADALKLLFTNYRELNMNFEELEGNRTQTALFKAYESIIEMTGHDALDFNKIKSSEIYEAVYDIFSELGFKTDFLKFDSSLDGDKFEQQPMYALWHLLYSFEGDNTKTGNEKLISKIQSLCGLNKEYAAIIAKVTFQDDYGNLSTKAMRKILPFMREGNKYSIACAYAGYNHSQRSLTSEQLNNKVLKGHLEILPKNSLRNPVVEKILNQMINVVNDIIDSYGKPDEIRVEMARSLKSSAKEREEAIKAISKNTTDNQLLREEIVKEFGKTNVSRNDIIRYKLYKELKANGYYTLYSNQYIRQEDVFSNKVDIEHIIPQAKVFDDSFSNKTLEYKSINIEKGNSTAYDFVKQKYGESRLDDYVARVEKLYKDKVIGKAKYKKLLMAGNDIPSGFIDRDLRNSQYIAKQAIEILESLVKFVVPTVGSITDRLRDDWQLVDVMQELDWAKYDKLGLTEVIHSIDYDGHPYNINRIKDWTKRNDQRHHAMDALTIAFTKRSIIQYLNNLNARVGRDYLRDGLMSVEAKQRSGVIYAIEDKELYRDKNNNLRFNPPIPLNDFRAEAKRQLENVLVSYKSKNKVVTNNVNVTKTKTGVLKKMQRTPRGQLHLETLYGSNTQYVTKLEKVGSSFDLTKIVTVANKREREALLVRLEKFGNDPKKAFTGKNALSKNPIYLDEAHSYQMAPSVKTVTLEQCFTIRKQITPDLKIDKVVDCGIRTILQQRLDSYKGDAKAAFSNLEDNPIWLNKDKNISIKTVTIRGISNAIALHDKRDQYGHPILDSEGHKIPCDFVNTGNNHHVAIYRDAEGNLQENVVSFFEATSRAMDGLPVVDVDYKKSEGWQFLFTMKQNDYFVFPRYESSKDENDVECKRMVFDPKEIDLMNPDNYAAISPNLFRVQKLASYYYVFRHHLETTVEEKNELRAIAWKRVRTAQALSGIVKVRINHIGQIVHIGE

SEQ ID NO: 8915 - protein, 1495 aa, unidentified
  REGION 1..1495: note = Description of Unknown: Cas Enzyme sequence
MKHILGLDLGTNSVGWALIDDKQKQIIKAGSRIIPMDAATMGNYESGNLQSPASQRTTFRGTRRLYQRAELRRERLLRVLHILNFLPPHFEEQIDFTEHPGQFKDHGEPLLPYKKDENGKNEFIFQISFHEMLDDFSINQPEMVSKGKKVPYDWTIYYLRKKALSKPITKEELAWIILNFNTKRGYYQLRGKDEELKSNKNEEYKSLKVKLVEDLGPNTKKKGFNWYQITYENGACQRKSSPIPPRHIGEQVDLIITTTYNKDGSIKTDKEGNSLIKVRDPKEDDWALKKKRTEFHIENSGSTVGNYIYNYLLKNPFAKIRGKYVHTIERKFYKDELIEILNKQAEFLPELKDKELLEKCINELYHHNKNHRESLKNKGFTNLFVNDIIFYQRPLKSKKSEIGNCPFEYYSFKDPQTKERKIQHIKCISKSNPIYQEFRLWQFIQNLKIYAREKEINGRLQTDVDVTCEFLKSPDDICKLYDWLKERKDINQEELFHSPIFNLGKDISNYRWNYVEEKKYPCNPTHFGIQKALKEVKGIPTLNAQQEMQLWHILYSVEDRIDLDKALHHFAERNGIDVDSFTNALIDTEPYPAEYGAYSEKATKKLLQLMRTGKYWNSNDIDKQTKERISNIINGLVDKSISNRTREKSIRLQNINDFQFLPLWLACYIVYDRHSESNDTKIWEKPEDIDSYLHEDFKPNSLRNPIVETVLREALKVTKDIWMTYGTIDEVHIEMGRDLKQPKEKRIKDMKRNLQNQRVNLRIRYLLQEFVDPKYNIESVRPNSPGQQELLKIYEDNALNSDLPVPEDILDIVDHLGSPTRPISQAETMRYRLWLEQKYRSPYTGQPIPLSKLFTPAYEIEHIIPQSRYFDDSLSNKVICESEVNKAKGRMLGYEFITKQGGSIIPGSLGKSFKILDKIQYEGFVKQHYSRNHGKMKKLLMEDIPDAFINRQLNDSRYMAKKALEIFSHLVRERNNDEEAISKNIIATNGSITDRLKKEWGIKDVWNQIITPRFERMNQITGTHNYGEWICKNGKRYFQINIPLSISMGFSKKRIDHRHHAMDAIIIACTTRNHINYLNNSMAASEQKDKRNDLKHLLCTKKSTDDKGNHIWQFNKPWPTFTQDVYKELNSIIVSFKQNLRVINRMSNYYWHYINGQKVCSKQVQGDSWSIRKSLHKATVSGVVRLPERKTVKLAIALKDIHQICNKKKRHIIQDVIKSYSHYDEKTILKYFKDRKYIIEDCDFSKLEIYTLPQEAKWAATRINIDTSFDQKAINSITDSGVRNILSSHLKKYNDANGKEHPEKAFSPEGLQDMNLHLKELNQGKAHKPILKVRKYEALGNKFNIGIWGSKDKKYVEADKGTNLFFAIYEDEEDNRTYDSIPFNIAVEHLKNLENIAPQRKEDGSKLLFTLSPNDLVYLPEEGEHFDKNHLCEDRIYKMVSSSGKQSFFIPCNVATTIEDKKEFSPLNKMEKSIKGVMIKRSCIKINVNRLGNIL

SEQ ID NO: 8916 - protein, 1419 aa, unidentified
  REGION 1..1419: note = Description of Unknown: Cas Enzyme sequence
MKKILGLDLGTNSIGWALVNEAENENEKSSIVKLGVRVNPLTVDEQQNFEKGKSITTNADRTLKRSMRRNLQRYKLRRENLIEILKEHNFICDDTILSENGNFTTFETYKLRAKAATEEVSLEQFARILLMINKKRGYKSSRKAKGTEDGVLIDGMEVAKMLYNENLTPGQYSYQQLDKGKKHLPDFYRSDLQREFNKIFEKQQTFYSEILTEELKKELEGKKRDAVWAICAKAFKEKDIELVGIKRQGTTIEQKIENFLWRTKGLSEKLSLEQIVVVLQQINIQINSSSGYLGAISDRSKELFFNKIKKSDGSFRGQTVGEYQMEVLNKNPNASLRNMVFYRQDYLDEFNTIWEKQAEFHTELTEKLKQEIRDVVIFYQRPLKSQKGLISFCEFESRKIEVEVDGKKKIKTVGSRVIPRSSPLFQEFKIWQVLNNVEVFAKGIKRNKQKEAILFDQNEDPLQFGGRRELYQEEKELLAAELTIRKELKKAEILKLLFDNTKNLDLNFNSIQGNLTQSLLFDTYERIVQLTGHDINTNKKFASEIIKLYEEFFVAIGYNADILKFSSDISLESQAMFRLWHLLYSFEGDDSKTGNEKLVKKISELCGFESEYASILANITFQDDYGSLSSKAISKILPYLKAGHKFDVACEYAGYRHSASSLTKEELENKTYKDRLIILPKNSLRNPVVEKILNQMINVVNTIIDNYGKPDEIRIELARELKKNAKEREELTKSIAETTRLHEQYKEILSKPPYSLSYISRNDIIRYKLYEELKDNSYKTLYSNEYISPSSLFNGDFDVEHIIPQSRLFDDSFSNKTLELRRINIEKGNKTAYDFIKEKYGETGDENSLDNYLNRIDNLHKMGVLSRAKYNKLKIQEKDIPDGFIDRDIRDTQYIAKYAKTMLSDLVKFVVSTSGSITDRLREDWQLVDVMKELNWEKYKSLGLTEDFMNEEGNRIRKIKDWSKRNDHRHHAMDALTIAFTKRAFIQYLNNLNARSDKSSSIYGIEQNELYRNGKGKMLFKPPMPLDEFRTEAKRHLENTLISIKAKNKVVTQNINTTKKSGGTNRKVQLTPRGQLHNETIYGSQKKYIVKEETVNAKFDLAKIATVTKLRYKKALLQRLNEFGNDPKKAFTGTNALSKNPIWLNELHTEKVPEKVKTLSIETVYTIRKDISPDLKIDKVIDKRVKEVLEARLKEFNGNAKQAFSNLDENPIWLNKEKSISIKRVTITGVSNAEPLHDKRDKEGNIILSNDGKKQAVDFVSTSNNHHVAIYRDADGNLQDYVVSFYEAVCRRNLGLPIIDKEFKVKEGWTFLFSMKQNEYFVFPNEKTGFNPLEVDLLNSDNYALISPNLFRVQTMSKVIYGNNIIRDYKFRHHLETSVKDIIELKNITYKQYKTLNFINNIYKVRINHIGQIVSVGEY

SEQ ID NO: 8917 - protein, 1412 aa, unidentified
  REGION 1..1412: note = Description of Unknown: Cas Enzyme sequence
MKKDYYLGLDCGTSSVGWAVTDEDYKILRAKGKSLWGSRLFEESQTAEERRMSRSARRSNYRKVVRLDLLNDFFKSEIDKLDPNFFTRLNDSKYWLEDKTDSSDKNTLFNDRKYKDADFHRQYPTIFHLRSELIHNKDEHDIRLVYLAIHHILKHRGHFIYEGQNIESVQNVKPLFIELQNTYNDIEESVTINYLKDFEEIGKVLADKSIRNRAKILKNYLEVSCDDPKKGNKILSEIIKALLGNKVNLQKLFPFAEIEFDEIDSKGFEFSSSMYDANEEKLKSDIGLDLFAVVTCLKEIYDWSLLDSILHGNSYISDSKIEIFNTHKKELKELKTVVKKYAPDKYDEAFFETKDKLKNYCAYIGHGLTDDGRKDKGDIKSKCTTEDVNKYFKKILDDAKKAGNTSELFNEIYNKLELNILLPKAIVGDNRVVPYQVNLFELEAILNNAKQYLPFLEEKDEEGFSVCNKIIAIMKFRIPYYVGPLVENDGSGKEYQKFSWMIRKENSTGRILPWKFIDQVDLPACGNAFIKRMARKCTYLPNENVLPKNSILYSKFSVLNEINNLKINGEKPSIEVKNQIYSLFKKSKSVTHKKVKKMLVSIGYAKKESEIEFAGVDLKFNSNLKSYIDFKYFLENNILSIDEIDEIIEWAAVFSEGQGLLKNKIIEKYGERLTDDRLKEILIDCKSYSGWGNLSKKFLTEMYDVDKDTGECKNIITMLKETNYNLMELLSSKFTISESVELELDKTAANNLKFTYDSLVEPLLVSPTVKRSIWQTLLVVKELTKVMKKSPTRIFIEMARGGEKGKKKQRTESRKDALLNNYRNITDNPDAIQILNALENEENDSLRKEKLYLYYSQMGRCMYSNEKINLIDLLSTNNIYDVDHIYPQCNVKDNNINNKVLVKSTENRKKADIYPIASDVQNKCRDHWKFLLNHNLISKEKFNRLDRKTQLTDDELQNFIARQLVETRQSTKATARILEKMYPETDIIFSKAGNVSDFRNSFNLHKARSVNDLHHAKDAYLNIVVGNVYHTKFTKNPGIFFTNKRTTTDEKQGINERYNLSKIFDYDVKRNGKYAWIKDSNGRIRSNNGNDYNLYPENGTILTVRKYMAQDNILFTRQKIQRKGQIADLNIVKRGAKKGVLPIKHSDDKLNAVEKYGGYNNVGKAYFFIAEYMDKKKRKVKFFDMPIHKAAEIESHQTTLLDYCINDLNLNSPRIIESKILINTKIKLNDFVYEISGSSGEQIGLKKAIPLKLRHDNYDYVYNLEKYLSKLKEHEKFNNGEKQHELEEFSKTLERRNHITKEKNYLLFEELVDKLNNSIFKNMVTVSSLLDAFNNCSDIFKELSIIEQTKSLEQLILLFACKVGGCDLTKFGKSKSSGVATMTKNINRKFTIINQSVTGIYETERRVKIDGI

SEQ ID NO: 8918 - protein, 907 aa, unidentified
  REGION 1..907: note = Description of Unknown: Cas Enzyme sequence
KDKIISLFLFRVPYYYGPLDSRSPYSNIVLNKEAKGSFTPWNIDQYINDDETRKKFMNSLTNKCTYLFAENVLPKESIIYSDFVILNRLNTMRINESVIDNDLKLKLFKYISSRSKTTIKQIKVYLASIYEGILNQNEISISGVGEDSFISNARSILGRCFDLDKSDAKVMAENIIFLLTVYTDNKDDAIKVINKQYSLNAYQLTCIKSLNYKGWSPLSKKLLIGLRPTNEEGEPVDGNIYSLLMETNENFMQILNNEKYSFSQIIDNENEKAIGSLSKQQIIDEYIENTPPLMHRTIIQILRIINEIKSVVKKEPQKIAIEVTRTNKAKKEVSISRKSGMDKFLKSFKKDFEYYEQSCTLKSQLDELVKNKELFKLKGKHLFLYFKQLGLDMYTGEKININDVLNGTDYDIDHIIPQSLIKNDSFDNTVLTKRKINQEIKKDQYPLPEKIRNNETVKALWKFLFSHKQISDIKYNALIRANPITESELADFVNRQINVVDSSNKVVKDILEKIYPKTKVIFSKAEYPSYIRKEYNIPKIRDLNDTHHAVDAYLNIVAGTILYDTYGNIRIIKARIEKENSADTNFNKDSFNMEHTIDRNLKNNGLLGIVQRICNKHDFLLTYRNSYQDNAFYDMTINAKGESNALIPIHGGEKSVFKNTSKYGGYISVRPEYMIVANRTNKNGKSTRVLVTVPRMVSILSKNDDEIKEKLLNRMGLSNNEITFDFKRRIYPNQKVLIAGCEYLLCTKNELQITLKPVTPIYIEQKDYLSLILKNITKLKNHAGNECEFYTDRFEKNKQIISKDKNLALFKEIVNISLNKKYDYCPMVSNIRNGLNDENLIKFQNLSLENQVKTINDVIVLYGRKSTTTAFISVSNFFSKSKAVFLKDNVIIIDESVTGLYRRETII

SEQ ID NO: 8919 - protein, 1336 aa, unidentified
  REGION 1..1336: note = Description of Unknown: Cas Enzyme sequence
MAKILGLDLGTNSLGWAVIDDEKNTIEQTGVRIFQEGIKADTIGKGDKEVSRNAERREHRQMRKQFYRKRLRKIKLLETLIEQNMCPLSKEELGSWKNWNKTLKSMGREFPTSEAFTNWIQTNPYDLRERAVREEISDYELGRIFYHLIQRRGFLSNRKSSGEDAKGIYEKGNEAENIRPINFTKNQIEKGKAKTLGAYLSKLQCTPYEAYSTVTEEGQETRIRGRYTTRSMYIEEFEQIWETQAKFKDLDAKTVRAKRARDLQGTLASQNNQKRIKQLKEKYGQDNTLVEVKTSGEEGKQKETLHITTFKTMPLKEFLGGQITVEDTEEGQTVKFKSDESILFWQRPLRSQKGTLDACQFEKNMPVIRNDGTFLMKNGEIQRRSKTPCPLSHPSFELFRTYQFVNNIKTSEGNYLLDTYKQQIIDILNKKKAAVTFGAIIKQLKLTNEKFNYDDDFSVPNNTTIASISPLFKEDIWQAHANDIWHCFYFYDDNEKLYQKLVTSYGCTKSLEDIKKVKLKDGYGSVSLKAIHNILPYLKTGWSFDKAVLFGGIRNAFGSRWDRFAEYDQKIVSDIAKLFKIDHKEGELITDVKDYLSDPENHYGFTKDDLHFEYLYHHSQKITISKGELDRVPEAENLRNPIVQQSIYEMRRIVNQLMRKFQQQYGESFRFDRIQVEMGRDLKNGKKRRQEKTFEIRDNAQKNEEARLKLAEFGLRSSRENLQKYQMWKEIADKNGTVQCPYTGKTISLSAAFGEHNLFQIEHILPHSISLDDGFGNKTLCESLFNQKKGQKTPYEFYQENNDPNLWGVKTWDEVEQRAFNLLPYYKAKRFTSKKDPDLSSFIERQLNDSRYIARKSVELLTNICADVRVLPGQLTAEMRHLWGLNSILQPVESINANLDETNVEGTECYAIREEDNSISQVIPKNNPVPEVKENELLIPAEIKDHTLKSRHFSLDIKNKDLEAGPYWVKIAVKDQIQLLPKIVSRPESTENEIIFKGKIEKNKFINASLNTVKCNDEDGTYWARFSIDDKKFFNTIDQKEKPKTSKKQLVLFGHVAEGIFKSYIYTCQTNIEDGKYWLVLDIDYDKVTFIKSFYQQPHIAEDEICITVDVNHQEVTSEIDLHFKRHEQIENGKYYALLKIEEIVDFHPVYQEKPKVDKKQELIEGNLWVDKCTGEIKLDPKKNRDDHRHHAIDAIVIAVTKQVYFQRLSIYNAQKEEKKLGKIDSTEHYQEPWISFREDVKKAASKIIISFKENSKRKALTKNKKGNSVRGQLHKETVYGKRTPLFCEEAYHKRISVTGLDKKGKIDKIVDPTIRKIILEYLREHGVDTSKDFTV

SEQ ID NO: 8920 - protein, 962 aa, unidentified
  REGION 1..962: note = Description of Unknown: Cas Enzyme sequence
MNQSTIKYVLGLDLGIASIGWSLMIKDETGQLTRIENLGIRIFSPLEDGKSGKLANEIRRTKRGQRRLRRRKHLRLQDTKNLFSSSLLPDFEKFEKIDFKSYLNPYEIKIKGLTEPLTKEELSIALYHYMKYRGFKSNRKVEDKKNDGVLIKQFEDVENQLKENNATITQLLYKQFLEARAPERRIHNVDNAGSLYNKKEQTKSIRNKDDKYNFSATRDMYLKEINLLLDHQISCGLINTSFKEQYLQIFNRQRSFSMGPGKGSPYAAPEGMSLISKMIGVCTFDQLPRAPKASFSSESFVLLSFLNNLQFKEKQESNYRGLTEKEIQSIYNFALKTSALTYKNIFNTINIPVYRIKGLEFSKKQYVSILKAYKKKNKINTPSLNEEQYENFQQDVKNELFSSKIVSLSHYHSERKILEKYAKEHSSSEEEINTFIQDTSNFDIINEILLQFKVDQEIINACLKKGISNHVAQAIITLPSIDKTINLSIDLCKKLIPHLLENQGYDKAMDLVGHNHSNINSSIEKTSYLPDINECVEKMNESLTNVNVRHTLVEMRKLINEIIKNYGYIHEIHIEFARELAKNFQDRLDIKNQQLENQTDNIHLKLELINKYPHFFHSLNNIKGETLLKYKLYREQNYKCAYSNRPISENELFDSSATQIDHIMPYSRTFENRSFNKVLVFTSYNQVKKNRLPYEAFKDEKWQKILDFLNDPAVRISAKKKEIILLKEIDDNEWLERNLYDTKYMSVLAKKIIDAFLKPEKCRAITGAITSKIKYSYGLTNLTHSFISNNYRRFEHFYIQSYNFSSNEISFIIKDNLDKTHTILVSKIKNPDKKILSHDETTLNDALQYFLYNQDALIHHVGDGLDESIDFDKLIEQIAIKKSKANDPNQSLELEYLITILGNIKNQLITITNTKDRSNHLHHALDATIIACVDDKMIYRIQNYEKMKEVLYDETTGEELST

SEQ ID NO: 8921 - protein, 1164 aa, unidentified
  REGION 1..1164: note = Description of Unknown: Cas Enzyme sequence
MGLDIGTNSVGWAVTDLDYQLLRMNGKSFWGSRLFPEAQTAEERRLHRCEKRRNLRKKQRIQLLKELFAKEISKEDPSFYQRLQESQLILSDKTKKEKNILFCDENYTDQDFYRDYPTIYHLRKAWIDDQAKKDIRLLYLAIEHIIKNRGHFLFENQDLKGIASFNNAYSALRETLENELEIKLNETPKTIQEIEDILLEKELSKQDRKKKLNKVLDASTKQEKAIVTLICGGKASLSDLFDDSSLKEEANNSISFQDANYEDFKDTLQEVLAEKFIVIEKIKVIYDWSVLKKIMNSEDYRYLSEAKIAIYEKHKKDLQILKKVVKKYFNKSTYDDIFSKDIKNNYAAYVGHPSRKTKVLEKKCTQEDFGKFVKGKIEKIHKNIDIEDRDVSYILEEINNKNFMPKQVQRENGVIPYQLHLEELKLILENASQYFSFLNQIDETKKTVKEKILSIMTFRIPYYVGPLNNHSQYAWVVRLSHQKIYPWNFDEVIDKKASAEDFIKRMTNMCSYLIGEDVLPKNSLLYSEFLVLNELNNLKINGEYLSVKIKQDIFEQLYKKYKTVKIKRIKNYLIHNGIMTEDDNIEGFDLELKASYKVYLDFEKIVGKHVNNTQMIEDLIRWITIFNESKDILKDKIKEVYGDQLTKDQINKISKLNYTGWGRFSKRLLTDVYDTNQETGEMMNIIEALRTTQDNFMQLMRNDKGYVQAIDAINATLKENETAKNMIENLYLSPAIKRSVWQTLKIVNEIRHITGHDPKKLFIETTRSHQEKKRTKSRKDRLLELYKKCKTESRDWIKEIEGKDESLFKRDVLFLYYTQMGKCMYTGKTIHLEDLKNSNIYDVDHILPQSKTKDDGIDNRVLVLKSENSAKGDDFPIKKEIQKKQKKFWDHLLKKQLISKKKYDRLMRTTTLTTDELASFISRQLVETSQSTKAIASVMKQQLKETEIVYVKARNVSEFRYHRDNKNYTNEDQFVKVREVNDFHHAKDAYLNIVVGNVFNTKFTHSPQNYIKNLKKQPNEKYSLNRMYNFNIKGAWKRGNNGTIQTVRDVMSRDDCLYSRYTTEAKGTLFDVTLMKAGNGQSPIKAQKDNPLSNIERYGGYNKVKGAYFCLVESSKKGQRIRTIEFVSIMKKEFFEASEENKLNYCKNTLKLEEPKILIAKIKM

SEQ ID NO: 8922 - protein, 1136 aa, unidentified
  REGION 1..1136: note = Description of Unknown: Cas Enzyme sequence
MDWRLGLDLGTNSIGWTVLGLSKQNESLEPNELINMGSRIFSDGRDPKTKEPLAVARRDARGIRKNIRRRKQRRHQLFRQLQIDNLFPTERSEAAKLKAINPYEARIKALDSKLEPYELGRALFNLGVRRGFKSNRKDNAEEKVTTEQTENKTSDKMSQGDKCLHLEKVIKESGCRTIGEFLWTNQKENKGIRFVPDRTTYYPLRKLYEEEFEAIKAKQEQYYPNINWNKIQEIIFYQRPLKPQERGKCQFMKDKERTFKAMPCSHEYRILQEVYNLDYHDTEGKPVKLTEEQIAKLIFELNQKKEMTFDQIRKLLKINSPFNLESDIRSKLNGNVTAAILRSEKKFGKLWDSFTLEEQDSITEELIIADEDSEVLKMLEKYDLTEAQKSSICGVTLSSGTTSYCKELTEKLVHLMQGDSLDTLNNPSLKAKLSNTEGHRFQFDVALGFLGYTHSDDTVEHCDLLPYYGKILTGSTIGGGKSDDEKKPEQKYGKIGNPTVHVALNQTRIVVNALIKKYGKPKQIVVELSRDLKASKDAKADMIKTQSANVKQNAILNKNITDLVPTIQYPSRVERLKYKLWTELGVDSLSRKCPYCGKVISGSELFTKNIEIEHILPFSRTLLDSESNKTLAHAHCNAKKGEHSPYEAFGQITSGDYCWDDIMERVSHFNKTKRSRFNSDAMESFEKDSGFLIRQLNDNKYLSKVARKYLTAVTEKPTDVWVNTGAMTKMLRDRWEMDSILMRKIDQNIIAQFNLKDNMVGEYKKNRYDHRHHAIDAMVIGLTDRSMVQAIAKANAQRTTYRLEVPPCPFTRFDITEHVKNIVVSFKPDHGTQGKLSKETLLGLIKQEQTVDIKSLTKDDIPNIKVPKIRDEFEEVIADNKDDIKKAIKVLQDTYPQVKIFKSQFVSRTPLTSLKTENNLEDIVDSKIRSNLQDYIAQHKGQKFEQCVMEFSNTTGIKKVRCKTRIQTPIVIQPDSDNPLSVTRYLNPEDYFTAIIWEIPPAKEGKKATYQAQYVRRTDIDKNGNPIENKPHPAAKKICQLCKNDYLEFSEKGIWKKARIAGYATTCNKLDIRPIYATGTMEDWIIATNDNVKESGWKPQEGHNFVAVNVLFGELSAHKITVDPIGQVFRNTKGCK

SEQ ID NO: 8923 - protein, 1065 aa, unidentified
  REGION 1..1065: note = Description of Unknown: Cas Enzyme sequence
MKKRILGLDTGTNSLGWAVVDRDDTNNYQLIRQGDLIFQEGVKVEKGKESSKASDRTQHRALRKQYFRRRLRKIEVLKVLVRHNLCPYLSDEQLHEWHVHKIYPKSDDFMLWQRTNDNEDKNPYYYRHLCLHEKLDGNVIEDRYILGRALYHLAQRRGFLSNRLDNSEDQNEKGAVKVGITELTKEMEKSGCEYLADYFYKMYSDPDNHERLRKRFTDREEHYEKEFHAICQKQELVDELVDELAKALYFQRPLKSQRQGVGKCTFEPRKPRCADSHPDYEEFRMLSFINNIKIQGPHDLELRGLNVEEKGKTLHCFYRISKPNFDFEDIAKVLAGKNNYQYFKDKGDKAYKFNYRMTQGVPGCPVTAQLIKIFGDDWKNTIAESYLRMETKNGQKTVDNAVNDVWNVLYSFSSKDKLKDWAKQNLQLDNDTAKSFSKIKLSHSFAALSLKAIRKTLPFLRKGMIYSHAVEMANIPSIVGCYVWNDEEKRDFIIKNVETFLEDRDQPTKDFCIKGFLQDNFDLKPGATDKLYHPSMIDVYQDAKQVNGIYQLGSPRTNAIRNPMAMRSLHEIRKVINQMLKEKIIDNNTEVHVEYARELNDANKRKAIADYQLSQDKKHKEYAEEMVKLFKEETGQTITPNKNDILKFQLWEEQDHRCLYTGKQIGITDFLGNNPKFDIEHTIPRSVGGDFTLENLTLCESKFNRDVKGAQLPSQLSNYQDILPRIEKWKEQYISLTKQIDGCTTFSGMAKENKDRIIQKRHRLQMERNYWRGKYEHFTMTEVPEGFSLRQGAGIGLVSKYAGLYLKSLFHDSTDRHKGNVFTVKGTTTAEFRKMWGLQDNYEKKSRDNHCHHCIDAITIACIGKYEYSKMAEYYHNEELFDEGKGIKPQFKEPWPTFTQDVLNLENNLIVVHSTPDNMPKKAKKYIKTKQGKLLTQGDCARGSLHNETYYGAIERDGEIKYVIRRPITSFEKDTDLNSIVDGTVKDIIMTAVEGKNFKEAIAQPIYMNKEKGILIKKVRCYVSGVKKPLHIRMMRDLSQKDYKRNYYVANDTNYCMAIYEGSVK

SEQ ID NO: 8924 - protein, 1075 aa, unidentified
  REGION 1..1075: note = Description of Unknown: Cas Enzyme sequence
MKTLGLDLGTASIGWAVIDTDTCEIERSGVRIFEEGMSKIGQGNKETSRNAVRQEKRQTRRQFYRKRLRKIKLLETLIEQDMCPLTLEELNPWKSWDKNKKSAGRHFPSNKYFNAWIHLNPYELRKKGLKEALTPYEFGRVLYHLIQRRGFLSSRKSDATESKGIYEKGLPKENIKSINFTRDHIGKHQLGSYLATLLPPENKSFTPIFEDGLDTRIRGRYTARQQYMEEFEALWLVQARSSNLEERKVTVKRNRQLRGTLNANRNKTKIKNLEHKYGKQNITILEKKGHLEVESTEMLPLKKFLAGNITETIDTEGEKKISFKSKESVLFWQRPLRSQKSNLAPCTFENNLPVINEDNTFRLNKTGKIQRRSKTPCISAHPLAERFRALQFINNIKYDNGVRLYPEKREEAIKILSKTDKSSLKFKEFVKKLKMTDVVFNFEDDTEVPGCPTTAQLQTLFKPMTFDPTRWDNKAQRLWDCIYFYEDADKLYEKLVRDFQYKGTLEKIKKINIKEGYGKLSFKAIKLILPYLETGSQYARAVILGGVRNAFGTRWSYFENSHSTIEQKIKSILNQKGLKEGEAIQQIKEYLSDPKMHYGFKQNDPHFTQLYHPSQQIDKPKTITNKIPIVEDLRNPIVQTSLQELRRLINKLLISYQEEYGESFTFDQIRVEMGRDLKNSKKAREQMFHNNKDNKAKNDKARVCLAEFGLQPSRQNLQKYRMWKEIEERNGIAQDPYTGRTLSIKDCLGVQGNIQIEHIVPYSVSLNDSFSNKTLCDATFNKNKGERTPYQYWQKNPDPKIWDVSTWDDVVTRAFHLLPYQKAKRFTSAQIPDKEDFIERQLNDSRYIARKAVELLSNISPNVQMMPGQLTAELRHLWGLNSILEPTEPIKTTVLENYLRNENKEESKSLNKAYYAVRDKKTHTIHKLYCIQNDRPQTGKNELNLPVDIRKDKVTSAHLQIQISTKGLSDGAYWAKCKVNKEFQLIPKIVSRPEQGEEYIVFKGNVKNHKFSNDTTGGYMASNTEDGRYWAIFKIENSTFLNVRETNKKPKAKKEQVVLYGRVTNNIFKSYIYTC

SEQ ID NO: 8925 - protein, 1102 aa, unidentified
  REGION 1..1102: note = Description of Unknown: Cas Enzyme sequence
GYKSSRKAKGTEEGVLIDGMEIAKKLYNDNLTPGQLCLQLLQSGKKYLPDFYRSDLQAEFDRIWNKQKEYYSEIFTDKLKDNLRGKNEKATWAICKEPFNLVGIARTTKGEELKKENFVWRVKALSEKMDLENLAVVLQKVNGQLNASSGYLGAISDRSKELYFNKQTVGQYQMEVLDENPNASLRNMVFYRQDYLDEFNTIWNKQAEFYTELTNELKAEIRDVIIFYQRQLKSQKGLISFCEFESRQIELEIDGRKKIKTVGCRVIPRSSPLFQEFKIWQVLNNLEVSGQGKKSKKKLKKDDPTLFADQQDKFQIYGRRELSQEEKEILAYELSIKEKLTKAEILKLLFENPQELDLNFPLVQGNLTTANLFKAYQQIIELSGHELDLKKSADNILKDANNIFDALGWNKDILKFNSNAYKLDNEPMYKLWHLLYSFEGDSSNTGNANLIAKISELYGFEKEYASILAAITFQEDYGSLSSKAIRKILPYLHEGNTYDVAVALAGYGKHSKSSLTKEEIENKVLVDKLDILPKNSLRNPVVEKILNQMINVINSIIDTYGKPDEIRVELARELKKNAKEREELTKAISKTTGEHEEYRKILSQPPFNLTYISRNDIIRYKLYQELKDNGYKTLYSNQYISPAQLFSGDVDIEHIIPQSRLFDDSFSNKTIEFRAVNLKKGNLTAADFVKQEYGESGNEKSLDNYLQKLDDLLQKGIISKTKYRHLTWKEPDIPEGFINRDLGNTQYIAKYARTMLETLCKRVTATTGSITDSLREDWQLVDVMKELNWEKYKMLGLTEEFTKTDYNGNIVRIQRIKDWTKRNDHRHHAMDALTVAFTKDALIQYFNNLNASLKPNSNEYALKQLYIENGKVKSPMPLNEFRAEAKHHLENTLISIKAKNKVVTTNINITKKTGGTNKKAQLTPRGQLHLETVYGSYQKPIVKTDKKTGIKTVTFETIYTIRKEISPDLKIDKVVDNKIQEILKNRLEEFGGDAKKAFSNLDENPIWLNKGKGISIKRVTITGISNGEPLHTKKDKDGKDIFDGEGNRIPVDFVNTGNNHHVAVYRFPVMDKKTGMQKLDSIGEPMFELQENVMSFYEAVTR

SEQ ID NO: 8926 - protein, 911 aa, unidentified
  REGION 1..911: note = Description of Unknown: Cas Enzyme sequence
EQLKRFIEDRDHKVRANDNKYHFSDYQREMDALLKTQGIKEELIKEIKDIAFSRRSFEEGPGSATSPTPYGRFLSYGAEPINLIEKMRGKCSIYPDQLRAPKMSFSAELHNFLNDLNNLNIGKRKITTEEKENIIESIIPNKGGMTFKQFATFIGESEENITGYRIDKKDKPILTDFVGLKKIKKALKDAEIDSFDISCDSKLIDSIFEVLTKSKIVEKRIEDIKKINNKSLTPKVIEVLARIPGVSGYHSLSLKALRELNEEMIEEPLNQQQIKMNNKIGEMVEVKTKNGVIQLDDAAILNPVVKRSVNESFKILHAVEKKYGKLYSVMIEMTRSKNSDEEKDKIKKSQASNEERRNAVGEIVKGYVDDISSLSGKLITKIMLYEEQGGKSVYSGKPIDLKRLINDSGYCEIDHIIPLSVSCDDSYNNKVLVIADENQIKGQRTPYGVFKDRPAGWQSWEEFVFNVSHNVNLSKRETYRKKENLLFTGDISLSKVQKEFIERNIVDTGYSCKYVMNILKRYYSQKNIPTIVDVINGKLTHDFRKRAKYIDKDRSMYCHHAVDALIIASFKRSKFIDKMLMLDRVDIDTGEIIGAINDDEAFDPSVIAFAAKLAELDPVLDYKFSYKIDTKPNRSICYDTIYSARNIDGEYTVIKKYREIHNAQRKDGENLAKTIRSGDMSKIENLLVYRNDRRTYEILKKVVDTYSLEKNPFAKYLDDNGDYVRKYSKKGNGPTIISIKYIEDRLNYCLDIGDKLLIKPIEKKVIKLQLSPYRMDLYKNRDGKYRFVTIRYTDILQKGKLFYIDNDNYEKMKKESKISEEASFVGTFYRGDLIERKFDDGTIAIDMFKVVCNSDTQRIELEYLGQETIRNDAKFQYMVTLGKCVEVKKVLTDILGNRYYEQNPKLKLEWK

SEQ ID NO: 8927 - protein, 874 aa, unidentified
  REGION 1..874: note = Description of Unknown: Cas Enzyme sequence
MKKILGLDLGTNSIGWAVVNEAEKEGEKSSIVKLGVRVNPLTVDEQHNFELGKSITTNADRTLKRSMRRNLQRYKLRRENLIEVLKEHHFISNETILSEAGNKTTFQTYRLRAKAATEKISLEDFARVLLMINKKRGYKSSRKTDNKDDGQLIDGMDIAKTLYEKDLTPGQYALEQLQKGKKHIPDFYRSDLQNEFNKVWESQAKFYPGILTAALKENLRNKNSKQTWAICKEPMQLVGIKRETKRGEEQKKEDYQWRVDALTQQMDLEKLVIVLQNINGQLASSSGYLGAISDHSKELYFNKQTIGQYQMAELEKNPNYSLKKQVFYRQDYLDEFEKLWSTQALFHQELTPELKKEIRDVVIFYQRPLKSQKGLISFCEFEHKTIKVTLDGKEKAKTIGLKVCPRSSPLFQEFKIWQNINNLEVNGRQIELDDKKILFNELSIKEKISDRNALKLLFKNDKELELNFKAIEGNRTQAKLFSVYQRIISLSGHGEYDFDKMPTNDAMEIVEKVFNGLGYNTKILHFDSCLPDPAFEEQPAYKLWHLLYSFEGDSSKTGNEKLVAKISELCGFEKEYAAILAGLTFEPDYGSLSAKAIRKILPSLKEGNDYSQACADAGYRHSSRALTKEELDKKIYKDKLPILPKNSLRNPVVEKILNQMVNVVNAAVDAYGKPDEIRIELARELKKSAKERQEMAEAISKSTKEFEEYKKILQKEFGLINVSRNDITRYRLYRELEGNGYKTLYSNTYIPQEKLFGKEFDIEHIIPQAKLFDDSFSNKTLEKRQVNIDKSNSTAYDFVSERYGEKELEDYVSRVEKLFKDGAISKTKHNKLLTKEADIPNGFIERDLRDTQYIAKKAREMLEDMVKFVVPTTG

SEQ ID NO: 8928 - protein, 923 aa, unidentified
  REGION 1..923: note = Description of Unknown: Cas Enzyme sequence
MEKQKLSIYADVRSMGWIITQGKKIIARGIKRINVDFDTYYEFIAGNVISKRVNRRIKRTMRRNLWRRKSRKETLHRLLEKHCMLPTDVLMKSLNTFRYRLRVRALSEKIDPQMLGLCFISLQNKRGYKSMRGVMGEGSDYLAEIRRHEENLKQYPSIAAYLLTLDSEKQIIFTRESYEAEFRAICKAQELDHKLEAELYRAIYFQRPLRKGAISNCPLEPNRKVTHRSHPTYQAFRCFRDANNIVIIDPQMHEVEIPFECRQDWAAHLLSGKDLTKARCCKDLGISKSTAYTWLSGKSLEGNLIAKTLGKYPCNTNELWHDLYSATDEVMLAELLKRKWKCTPEQVDELIDIDFKSAGWGEYSHKAMEKLAPYLYKGLRLKQAILKAYGRVDMGKDVTLRNLVMEQVFESAKSLVEAIKKEYQVDELQIELNQLLKAGNKSRKTMASGTRKTDKWQKENAPEIEKAGAKPTDYNYQKLKLWEEWKGFSPYQPDKPITLEELFTDDYNIDHIVPKSKIMERGFSNQCLAPRKLNEDKNRLTGIEYAEKHGIVEGYKKVVESCNLSDTKRRFLFMHSDEIPSDYVSSQAGGDYNTRCFLTLHPNSVCIPNKIINRYYREWNLNNYSDDDARSSLMKALVLANCGRETVEYFDKLKEEADTRVGAYDLRPEIPSIDVDNVAIYLPKLKLYRKIKGKYSPRYQLHKETVFGKRKHYSRNAKGQLVEETFYSIRKPILSLTAAMLGKISGGFEKQMIKRRLEETGSYEKLMESLRENPIMHNGQPVKSVAIRVNGNVLIPIHSTDKNGKIGPKAKFNQPVDYVYSSTNSMIGFRHENGKLTATPVPLIQYIDNLNRGQKQDFEFTIQKNDVLEYEGQLWFVSGLSIPIDIRPLYQMAAIGETNLGLSKIDEIKKINIDQLGAIKNTN

SEQ ID NO: 8929 - protein, 1506 aa, unidentified
  REGION 1..1506: note = Description of Unknown: Cas Enzyme sequence
MKKILGLDLGTNSIGWALIDQNFPEKKGQILGLGSRIIPMDQGTLGEFERGNTISQTKERTAFRGVRRLRERHLLRRSRLHSVLNILGYLPEHYAHDIDFETHFGQFKMDCEPKLVYKPKGNNGKPEFIFKQSFNEMLNEFHGKHPDLLEHNRKVPYDWTIYYLRKKALTQKIEKQELAWLLLNFNQKRGYFQLRGEDEEDSVKKLVEFHALQVVDVIDSGDRKSKDEIWYNVILENGWIYRCTSKIPLDWVGKTKEFIVTTDLNEDGSVKKIKDGKEKRSFRAPLPNDWTLVKKKTEFEIGQSHKTVGCFIYDTLIQNPAQKIKGKLVSTIERKFYKTELKRILEKQMEFHPELKDRQIYSHCIHELYKKNEIHRKSLEEKDFVHLFMNDIIFFQRPLKSKKSLIADCRYEARAYKNKDGSLDSEPVKCIAKSHPLFQEFRLWQFLQNLKIYRKNVEVDGKIVSELDVTAQFLKSEDDWVALFDWLNNKKEIKQEVFLKYLPFKLKKEIGNYRWNYVEDKSYPANETRALILSRLEKCSNIPEGFLNRQIEEGLWHILYSVEDTEEIEKALTTFARKHGLDSDFVENFKKFPRLKREYGSYSAKAIKKLLPLMRRGKYWREEDVDEIVRSRIDAITERLISIGYDQTKILDITDDDIPKQVLKSFIDCKNPLQALNTYQACYAVYGRHSEEGEILKWKNPSEVDHYLKTVFRQHSLRNPIVEQVITETLRVVRDVWDHYGNGMEDFFSEIHVEMGREMKNPADKRRQMTEQISANENTNLRIKALLAEMSNDPDIDNVRPYSPAQIEILKIYEDGVLKSDLELPEDIVKISQTAQPSRSELNRYKLWLEQKYRSPYTGEVIPLGKLFTPEYEIEHIIPQSRFFDDSLNNKVICEAEVNKDKGNSTGFEYIRDNSGKILQLSLGKMVRLFTLEAYQDYVKFHFSANRGKMKRLLMDDIPDAFIARQLNDTRYISKVVKNLLSNIVREDEEQETTSKNVAASNGSITSELKKAWGLNDVWNEIISPRFMRLNQLTNSNQFGEWINRDGKHVFQNRVPLELQKGFNKKRIDHRHHAMDALVIACATRNHINYLNNESAGSSKRYDLRSLLCFKDKSDGNGNYKWNFYKPWDGFTTEAKNKMETIIVSFKQNNRVINKTVNRYQKWKMDEDGKLRKVFVTQEKGDHWAIRKPMHKDTVAGAVTLQLKKQVQLASALEQVEMIADKPLKKKIKDLILLGNDKKAILKYFKANMNQFQERDISRVEVYYFDQQNVASRVAIDKDLNSSAIGKITDTGVQKILYNHLARYNENKDGAFIEHPELAFSPDGLDDLNKSIKALNDGNDHKPIFKVRGFEPKGNKFNVGFTGNKKSKFVEAAKGTNLFFAIYQNSEGKRSYASIPLNIVIERQKQGLLVVPEVDENGSTLLFYLSPNDLVALSTTFKDKEVLEVYKFVSCTENEGHFVPNSYSSPIIKNELGSNNKSQNSIGGIQIKAKCIKLSVNRLGMNSSLH

SEQ ID NO: 8930 - protein, 1079 aa, unidentified
  REGION 1..1079: note = Description of Unknown: Cas Enzyme sequence
VRYTLGLDIGITSVGWAIINNDKQRIEDLGVRMFAKAENPKDGSSLALPRRLARSARRRLDRRSERLQRIRYLFVQHGLIEAEYIDKIFLTSSGRKDPWQIRAEGLDKLLTGEELARALYHIAKHRGFKSSRKIEVGDKKSEEGKLLEGVKRTGSLLNDKGYRTVGEMFFQDESFAEQKRNRQGAYLNTVERSLLEAEIREIFRCQREFDSSLVNHEFETEFLENFNWQKSFASGDDILRLIGKCTFEGASGELRAPRNAYTSERFTLLSAVNNLSLLTNNGTVFLTPEQRQIVINLAYASPRVDYARLRKVLNLEDDIRFASLSYYHKCKGEEVDKFDCEKKVFAQLFGYHEMRKAFERAGKWEIVKIDPDILDTIAEALTFYKTDEDITKHLKACGLTDDMVDIAMGIGSFIKVKHLSIKAMRRIIPYLEDGDKYHEACTKAGYDHSRPQSTARQDRLPPIGEEIRNPVVLRSLSQARKVVNAIIERYNAPYAINVEMARDMSRTADERKEIEKRQEENRQARDIAKEDVRKHYAEFFSADNSNPANDDVLKWLLYREQSGQCAYSLHPFDLSRLLEPGYAEIDHIIPYSRSFDDSRSNKILVRGVENRNKQNLTPFEYFGADKERWEEFEGWVKVNIKDIRKRQKLLKLSVSNEEEQEWKERNLNDTRYITRYFSNFITGNLKFADDAPAVPVCQVNGQVTGLLRAKWGLVKNREESDLHHALDAAIVTTISRSLIQRITNYRKDRETGRVGAGEPYVDPETGEIMEFRRDWNFAFPEPWVGFRSELLARLSSDPISAISALGPVAYRGKGDISPIFVSRMPIRKVSGQAHKETIKSKKYLQEGFSVVKKPLNKLKMQDLDKIFKPESDRCLYEEIRKRLEQYDGDGAKAFKDPLYKPTRDAGLGPLVRSIKICTPQNSGVAVNGGVAGNGDMVRIDIFAKEGKYYLVPIYVADFVREELPNRAIVAHTSSDKWVEINENHNFCFSLYPYDLVHIMLKDGTDFMGYYITCDSNTGAIRVCPQDKHTETSQQRFGIKTARLIEKYEVGILGDVHKVKGEIRRGVENCCHSKPGASVG

SEQ ID NO: 8931 - protein, 1179 aa, unidentified
  REGION 1..1179: note = Description of Unknown: Cas Enzyme sequence
VILLGVFMKKILGLDLGTNSIGWAVVNEAEKEGEKSSIMKLGVRVNPLTVDEKSNFEKGKSITTNADRTLKRSARRNLQRYKLRRENLIEILKENKFISDDSILSEYGNKTTFETYRLRAKAAKEDVSLEQLARVLLMINKKRGYKSSRKAKSNDEGQLIDGMEVAKKLYEKDLTPGQFAFELLKSGKKYIPDFYRSDLQAEFDRVFDKQMSFYPEFLSLELKEELRGKKRDAVWAICAKRFKEKGFDLVGVKKQKAAEQKIENYSWRSKALSEKMDLEQFVIIIQQINIQLNDSSGYLGAISDRSKELFFNHQTVGEYLMAELSKDPHYSLRNKVFYRQDYLDEFETIWQTQAKYHKELTSELKKELRDVIIFYQRPLKSQKGLISFCEFENRKIEVEIEGVKKIKTVGLRVCPKSSPVFQEFKIWQILNNIQVINTETKESFPLDEECKRMLFAELNLKEKLSKTEVLKLLNTSKNHDLNYKEVEGNRTQARLFKAYERIIEMTGHGEPNFSKMEASKIIEMTTSVFEALGYKTDFLTFNSDLEGKGFEKQPFYALWHLLYSFEGDDSKTGNEKLIQKISDLCGFEKSYASILAGVTFEDDYGSLSTKAIRKILPHLKDGLEYSVACEYAGYRHSKRSLTKEELENKEYKEKLNLLPRNSLRNPVVEKILNQMINVVNTVVDTYGKPDEIRIELARELKKSAKEREEMTKSISQTTADHEGYRKILQEKFGLTNPSRNDLVRYKLYLELSENGYKTLYSNTYIPQEKLFSKDFDIEHIIPQAKIFDDSFSNKTIEVRQVNIEKSNSTAYDFVKEKYGEEEANAYTNRIEDLLKKGVLSKTKYKKLLMKEPEIPSGFIERDLRDSQYIAKKAREILEDLVKFVVPTTGSITDRLREDWQLIDVMQELNWDKYDKLGLTEVYKDKDGRSIRRIKDWTKRNDHRHHAMDALTIAFTKRSFIQYLNNLNARIGKSVDEYIDLANYDLRHINPKERTSVIYAIEKLELHRDRNGRLRFNPPIPLDEFRAEAKKQLENTLISIKAKNKVVTRNINTTKGKNGDVNKKIQLTPRGQLHNETIYGSMQRLVSKEEKVDSKFTIEKIATVTSQKYRDALLARLSQFEGDTKKAFTGKNSLEKNPIYLNEQHTEQVPLKVKTITYETIYTIRKAVGPDLSLEKVIDE

SEQ ID NO: 8932 - protein, 1419 aa, unidentified
  REGION 1..1419: note = Description of Unknown: Cas Enzyme sequence
MEKRILGLDLGTNSIGWALIKHSFEEKKGEILGMGSRIIPMDAAKVGDFERGNPVSATADRTKFRSVRRLYERDILRRERLHRVLHILGFLPTHYTEDIDFEYRPGQFKKNKEPKLPYKEISNKKYDFIFKESFQEMVEDFRITQPQLFYLKTNGKESKIPYDWTIYYLRKKALKEKIGKEELAWILLNFNQKRGYYQLRGEDEEVVENKVITFETLKVDKVVDSGEKIKSSGAILYDIYFENGWKYDKRIIKTEDWIDKTKEFIVTTSVLVSGEISRSYKAVNSEEDWIAIKQKTEQDIETTNKTVGEYIYDTLLIKPNQKIRGRLIRTIERKFYKEELKQILDKQKEFHSELRDRDFYKACIEELYTNNEAHRNNICNRDFTYLFLDDIIFYQRPLKSKKSLISNCPFEFRYFIKEDGTIEKTGVKCIAKSHPLYQEFRLLQWMKNLRIFSKEEINEVDITDELIPTIKDREKLFEWLNDRTEIDQKTLLKYVPFNLEGRIKKRLGESQYQIYKKDKEQGLDTYYRWNYVEDKKYPLNETRSEILKRLRKTGIDIEVLDYEIEMHLWHILYSVEDKAEVERALKTFAKKLNLPDIFVNEFKKFPRIEKAYGAYSAKAIKKLLPLMRFGKWWDWTRIDESTRQKIDKIFTGEYDEKIKNRVREKAIDLKERGDIQNLPLWLVSYIVYNRHSETSDIQYWKTSQDIELLKQHSLRNPIVEQIINETLQTVREIWEHFGEGKEKFFDEIHVELGRSLKEPAEKRKKVSERNTENENTNIRIKSLLVELFNDAEIENVRPYSPVQQELLKIYEEGIYKNPDVTYSMVSETEINKIRKKNQPSSSDIKKYKLWLEQGYRSPYTGEIIPLSKLFTPAYEIEHIIPKAKFFDDSLSNKIICESEVNSLKDNQLAYPFIKNNKEQKIELSHGKHVKLLSPEAYEANVKRYFGNNKAKLRKLLLDEIPEEFTQRQMNDTRYISKVVKTVLSNIVREEDEEEAVAKNVVATTGGVTAMLKQDWGLNDVWNSLITPRFERLNRIEGHEKYGSWENKTGKVIFQINTMEPDLLKLNKKRIDHRHHALDALVVACSSRSHINYINNDNANGKDKSKPKRFDLRNQLRYINEEEVNTTVNGVLQRKRIKVAKEFLKPWGTFTQDAKEELDRIIVTFKKNNRVINKTVNYYQKWVKQPDGTMKKCFVQQTKGDHWAIRKPLHKETVSALVNLQIQKQVNLSLALDNSEVIVNKSLRKKIKLLKSEGFDKKQIQKHFKQLDNRWEGEDISKVNMYIYTSDKESSMLAASRVKLDESFNEKNIESITDTGIRRILLAHLEKYNGLIDENGKPIPPESLAFSPNGIEELNRNLAALNGGNKHAPIYKVRKFEKFGEKFNVGATGNNKNKFVEAAKGTNLFFAIYLDDDGKRNYDT

SEQ ID NO: 8933 - protein, 922 aa, unidentified
  REGION 1..922: note = Description of Unknown: Cas Enzyme sequence
ELEGYDEDLLKLRSKDEIDVSELKASASEIKNMVKQIFKVLGIDIEILEFNPELEGKSFENQASYRLWHLLYSYEGDNSPSGNETLYRLLAEKFGFKREHAQILANVVLLDGYGNLSSKAMRKIYPFIKEQTYDKAAAMAGYRHSASSLTKEEIETRPLKSKLELLKKNSLRNPVVEKILNQMVNVVNALIDTENTKLKAQGLPEDFHFDEIRIELARELKKNAKERAEMTSNINASKIENETIFKLLQSEFGIKNPTRNDIIRFRLYEELKNNGYKDLYTNTYIPREIIFGKKIDIEHIIPQSKMFDDSFSNKTIVYRQTNLEKGNQTAFDYIESKFGNEELGKYKARVEALYQSGLKNKEGGISKAKYRKLLKQETEIGDGFIERDLRDSQYIAKKARNMLYEICRVVTPTTGSVTDRLREDWGLINIMQELNFNKFKVLGLTEMVEKKDGTFKERIVDWSKRNDHRHHAMDALTIAFTKQSYIQYLNYLNARGDEKHKLHNNIIGIETKETEIRIDDEGNKKRIFRLPITNFRTQAKEHLENVLVSYKTKNKVVTKNKNKTKSKNGEKVKIELTPRGQLHKETVYGKYRFYVSKEEKIGTRFDKEKIGEVSKPLYRRLLFQRLSENGNDSKKAFSGENALSKNPIYLNDEKTETLPEIVKLTWLEEDFSIRKDITPENFKDIKTIEKVLDAGIRRILLDRLKESENDPKKAFSDLDKNPIWLNKDKGISIKRVTISGVNNAESLHYKKDHLGNYIVDEKGKRIPVDFVSTGNNHHVAIYQDENGNLQERVVSLFDAIQLVNEGLPVIDKEFNTGLGWQFLFTMKQNEYFVFPNEKTGFNPKEINLLDTNNYKIISPNLFRVQKLASKNYFFRHHLETSVEEKKELKDIAYKPQLGLNAIKDIVKVRINHIGEIIKIGEY

SEQ ID NO: 8934 - protein, 1353 aa, unidentified
  REGION 1..1353: note = Description of Unknown: Cas Enzyme sequence
MSIILGLDLGTNSIGCTLRNTSEKEDQIVFATSLTFEKGVGEEKGVEVPLVQQRTLSRGKRRNYNARRYRKWLLLETLINSSPPMCPLTLDELNKWRKYDSSSESEYPKSESFLQWLKLDFNGDNISDFINPYELRVMAVKEKFTNPLILGRVFYHMTQKRGFKGRDEAESETILKGSEEKGIQGAERTIDLMESDNISLSEALLIDHNINKKRIRNRYNLRNLVENEFNTICNVQCIDQSSELYKNLLKSIIWQRPLRSQKGNIGICTFEPKKQRCPISHPLFEEYRALAFINNIKITPIESQNSNYLSDEQKGLIYHRLFFRKSKVAFEFSEIIKVLDPKKNLYKFNFKEYTNVSGCPVKAQLEDFFGCNLNEIKITNSLNNTTGKGYYDYEDLWHVLYSFSDNESIIKFAKEKLGLSEERAVKFSKVRLPQGFASLSIYAIKKILKYLKKGYIYSDSVFLANLDKVVGKKLNEDKENEIITKIRNLQHKHKSLQQTNAIINNLINNHINNDEESEIKSGKYLSIERLNELVEIEIINVLGIEKWNRFDEQEKNHLIVEIRAHFEKFLANKYTHSLGLMFYKTPRFDDMLKGLLKKEFPDWEEERFKYLYHPAESEFYPAAKVVNGKKILGSPEPISKGFKNPMALKTLHVMKKLINHLILTEKIDSETRIVVEIARELNDANKRAAIARWQNDREKENKLFADKIIEMAEGLGYPDLEVDDNLILKYRLWHDQKGQCLYTGRVIDFAELIDGTTVDIEHTIPASISFDNELGNLTLADSRYNRDIKGNKIPAQLPNYENGIEINGISYPAILKTASFLEDKVKHFEKLIEEAKKRSKHAQTKEQKDAQIQKRHYFKMELDYWKKKKRTFFDKEIKNSWKNSQLVDTQIITKYALHYLKTVFNNVEVQKGSVTAAFRKIFNVGFKKDRDNSVHHAIDAAILTLIPSSRKRDVLLQRYFSALDLDRSFHIIPEGWANFSPTQILDLQKKVFVNFYKKNTTLLPTYKNVRKRGKIQYVKKQLENGKFEYLLDENGNKIPLIAQGDSIRGQLHEETFFGAIQLGKNSKGISEKYKTEKKPLLFVVRVPIQSFTKMEDLNKIIDDKVRNDIQKTINKKISIGKTFVDSINEDIWLLDKNEKEIKQDKNGNTLFPIRHVRCVSAVGRGILTSEKALQIKQHTFLSKQEYKQYYYAKNEEISVCLFYEKNDNSKVIRGTRLIGLFELSQIQIKHLNELFSIPEYAIYPKNNLPLKYIITTGCRVIIYENSPEELRELSKPELIKRVYRIYKFNNAGADYIYLQCHAEARQDKDLGVGDTTVDFSKYQPRLKLVPNNFNCLLENYDFEISIDGEITFK

SEQ ID NO: 8935 - protein, 1075 aa, unidentified
  REGION 1..1075: note = Description of Unknown: Cas Enzyme sequence
MQTKNFPYTLGLDIGMASVGAALLLPDQQRILALHVRTFDKAETAKEGESLNKIRRDSRLTRRRIRRRAHRLVRLARLMKRVGLITDANPEAFALPGISPWHLRADGLDRQLDPKEWASVLYHLVKHRGFQSNRKSEAKADEKAGQMLSGVGRNQTLLKEAGYRTVGELAARHEAFKEAKRNKGGSYSHTFARADLDAELNLLFERQRALGSCLASADFQENIRDLLMARRPTLSGTNLLKMVGKCTFEKSQDRAPKSGYRAERFVWLGKLNNLKIVGGGDARPLTDTERRTIINLPFTQAKLTFKQVRKALDLKAHERFNLLSYRPDPKGKDKDPEDAPPFFEAKSFHILRKAYEGAGLKAEWQRDSLNPDRLDALAYALTCYKDDAESRQWLAAQGIETSIIEAVLVESFDKFIHLSQKALKAILPHMEAGQRFDEAAKAAGYDHSQPDADIGKRVTLPPPDKDTIRNPVVYRALNQARKLVNAIVAEYGPPAAVHIELARDLSKPIDERRDIEKGQKEFQELKEKLAAAFEETFHRKPGGLDLLKYRLFREQLDQCPYCQKALIVDRLFETGYAQVDHALPYSRSFDDGMNNKVVVHVACNQDKGNRTPYEFLDGAGDSERWQRFVAWVQGNKAIRQAKRNRLLRVNFGADEASEFRDRNLNDTRYICREFKRMVEVHLQWHPESTADNRCVVLSGQLTSLLRARWGLLKVREEGDLHHAMDAAVIAAASRGLVKRMSDYSRRNELEMVRNRYIDPETGEVINVASLRQIEDHFPKPWPQFREELLAQLSPNPALQLTSVPGYDEVSRASIRPIRVSRAPTRRGMGAAHQETIRSVRDGSLSAVKTPLASLMLKDLENIVGFERDTALIDAIRTRLEAFGGDGKKAFDDKQPPLRKPSKDPAKAPIIRSVKLLTTQKSGIPIRGGIANNGAMLRADIFTKGGKFNIVPVYAADAVKAELPNRAVVAFKPEEEWTVMDESYQFLFSLHPNDWITIRLKNEVREGYYSGLNRATGNIDLWIHDRNQTQGKKGMLEGNGIKTALAVEKYHVDLLGNLHRVHKEDRQPIHTKQNKG

SEQ ID NO: 8936 - protein, 1121 aa, unidentified
  REGION 1..1121: note = Description of Unknown: Cas Enzyme sequence
MIDKPKRGEKLTFGFDIGIASVGWCVLASEQQYLVDLGVRCFDKAETERGESLNLARRTARLMRRRLRRRAWRLTKLGRLLKGVGLIDDANYFSQRFESVKTPWELRVEGLDRQLTNQEWARVIYHLCKHRGFYWVSQAEEKKATTEAEGGKVKQGLTNTQKLMRSKGYRSIAEMMTTEFPKGQRNKQGDYSKALPRVMLGTELLLLFERQRVLGNPFADTKLETALLGSGDRKNGLFWEQKPPLAGADLLKMLGKCTFEQEEYRAPKANFTAERHVWLTRLNNLRIVVQGQARSLNETERQVALPLPYQQAGDLTYKQLRTAWHKTGLLTDDFLFAGLSYPTATQEAEGKTKDPEAQKLISVPAWQTLSKVLKTHGLVTEWQGMAGAATGGRPEQLDQIALILSVFKDDEEVTRELKKLALPGGERMIAALSEISFDKFHALSLKALRKIVPYMESGLRYDEACLKAGYQHSAMNNERGRKQKYLPPFYIGRDHDGRLLLNNDADIPRNPVVLRALNQARKVLNALVRRYGSPSAVHIEMARDLSRPLDERQKIKKAQDEFRERNEKIKAEFESDHGFVAKSRELEKYQLYREQHGKCAYSLEPLDLSLVLSDPEYVQIDHALPYSRSYDNSKNNKVLVLSSENQNKGNRTAYEYLTSFPGGEESERWQRYFMYVESNKQYRLAKRSRLLRKDFSKAAAEGFRDRNLNDTRYICRFFKNYVEQHLLLADDNHKKHCVVLSGQLTAFLRARWGFEKVRGESDRHHALDAAIVAACSASLVKRLSDYSRRKELKNARDVIDADTGEIVDRVQLAKLEAHFPKPWEHFREELLLRLNVDDPLVLKSEAARFGYPAAFTETLKPLFVSRAPQRRNGGAAHKDTIYSQPERLKAEGSVTQKVPLSSLSGKDVDRLIDPHRNEKLYAAIRARLEAHGGKGDKAFTADQPLYKPDRNGEPTGPMVRSVTLIIDKLSGIPIRGGIAKNDTMLRVDVFRHPKDKKYHLVPVYVHHSVAKDLPKRAIVAFKDEKDWTLIDDSFDFQFSLYPNDLIRITQKNKPSILGYYGSCHRGTGNINIWLHDRNQAGGKKGAIEGIGVKTALSLEKFNVDVLGNIYPAMPEVRHGLA

SEQ ID NO: 8937 - protein, 1106 aa, unidentified
  REGION 1..1106: note = Description of Unknown: Cas Enzyme sequence
VDSVRYTIGIDVGERSVGCAAIEFDDDGFAAKALALVSNIHDGGEDPASGQSKVSRLASAGVARRTRRLHLRRRKRIERLSELLAANGYVTTTDGDTYDAWHARDELSCSFIEDAEERNSMIATAALHIARHRGWRNPWHGYDRLASSDFPSANLANTLARATDWANVDEGALDTLGQAVSAVLDTRGTKATIRPRGGADEPLMQEQVLASDQLHELRQILETQRLPEDLIDQICRTTFHSEKPHVPTSRIGHDVMPGMKAYPRATRATLEFQEFRIRAFVGNLRLKEAGSKRRLTAEEYDAVVSSLMSWRASDNPKVADIADVLDVKPSAINRDLLDADSLAVPIDRTTRDIEAMLPKRHALRTWWDGASEQARAEWVAAIVDVSDSADVDDDVLSEPLAIMSDDDDAPQLVEKVVDALQSGRTSYSRESLTRLIAHMRETRCDEFVARCEVFDLPEDWREPLPTLDDPIEHPALQRVNTIVRRFIEGCNAKWGQPERVVIEHVRGAFLGPATLQEFRIEAKRNQTRNSNRRKDLETAGVANPSMRDVRRHLSLQRQNSTCLYCGGTIDMTTCQMDHIVPDSLGGANTRENLVAVCRTCNALKGKVSFVEFAATTNRPGVSLEEAVARVRTWQRIDESSVQLRRLKTDVSRRLRMTAADIEDADERSMATTAYAALEMRRRIAGSLEIELARVDVYRGGITREARRAGGVDAMLRVRGEDDKSRFDRRHHAIDAAVITTLYPLTSRTLAERSSMRTAEGLEDDPNKKWREYDGRTKNAREDFELWRQRVGSVADVIKKSLDADRIVVTRPLRLTPSSGRAHLDGIHRLAHKSLMDEWSAAEIDRITDPDIYSAMLGLIGSKTTLAADDARRSLLSSDAGTKGVVSLFPGGGAQTLVRGGAADLGEVHHARVYAWQTKQGFGFGWIRVFAGELRPLGIANGDVLAAALPMHSASMRTANRGLRTRIENGSAIQIGWLTSDDEIELNPLTERLQSGKIGNFLSSIPERRWLIQNFDQPDKVGIAPALLAREGLPQRFTAEAEGGSLSAAAVVNIINKPGVVLAVNVLLQDPTLTVIRRTSLGRPRWNSDSLPVSWSPWKAAERAFKR

SEQ ID NO: 8938 - protein, 1088 aa, unidentified
  REGION 1..1088: note = Description of Unknown: Cas Enzyme sequence
VGIRIGVDVGEKSLGLAAIDYDDDGWPIRILAAVSHIHDGGMDPETAKSPQSRLATAGVARRTRRLIRNRRRRLQALDEMLRKHGFDVPSEEIPQTYEAWDARDRLSREFVTDDEERNRLLVLALRHLARHRGWRNPWSSYARLEQEPTPSAALTAILDKAKERYGEVAIDEAATLGQVVAGVARSRDSIRLTKAAKSAEQDPVILTQVKQEDSLAEAKLILQTQRVPETTIDEICRVLMFQNKPKIPKDRIGACALIPGEVRASLATLEFQEYRVRSTVANLKIGKAKQPLTPEQHDLVCEWLLAWRESDRPKWREVADLLGIPPRELPIPSVDDAHFAMAPVQRTYMTLESVFNAKSEIGSWWRSASQQDQGEFIAGIADLSGDDGELESANVAALMTSLTDKSREALDKLQLETGRAAYSREALRRLNEVMRADHCDAHTARKKAFDLDDNWKPPQPSFSDHIEHPTVARINILIRRFLTTAVEQWGMPERIVVEHVRGAFMGPSALAELKSEIRFNTARREKTRADLRIQGISEPRDADIRRNECVQRQNSQCLYCGTSIGLTTSELDHVVPRAAGGGNRRDNLVAVCKPCNAAKGKLPFAVFADQSQNPEITVEAAKTRVRSWQKLPGVTPRQLSTLKTDVQYRLGLVADDDDFGDRSIESTAYAAREMRARIQSFVLERGGDPNSVWVFGGAVTSEARKAGGIDGMMRLREFTKKSRFDRRHHAIDAAVMTSLRPAIAETLRHRTNLQNENRMTGKYSNWKEYRGQQPGDEVNFEEWKQRVGLLAELLTQHIRDDRVPVMRQLRLSPRIGSVHADTVEPLEHRLINGPFAKEEVRRVVNNRLYESLLEESAGKDLEPDSERGGRLHWAAERIVDLYPSTAAFIPVRGGAVAIGSTVRYARIYAWRIKAGFAYGMVRMYVGELALIGLLAPGVDLFTAPLPVYSQAMRTANPALVARIVSGEARQIGWVSIGDEIEIDPENFLVGEGKIERFLKEVPEKHWLISGFFDPAKFSIAPALLASEGLDETMPEIVRQVVADNRIPTAVNVLLGSPECVIVRRTITGSVRWRSEGLPIAWKPREAAE

SEQ ID NO: 8939 - protein, 1034 aa, unidentified
  REGION 1..1034: note = Description of Unknown: Cas Enzyme sequence
MRYRLALDLGSTSLGWAMIRLNAANQPCAVIKAGVRIFSNGRNPKDGSSLAVTRREARAMRRRRDRLLKRKARMMRTLIEYGFFPAEEAQRKMLETINPFTLRAKGLNEALTPAEFARALFHINQRRGFKSNRKTDKKDGDSGALKIAINNVRATIASEGCRTVGEWLNKRDVAGLTVRARYHQDKVIKDDGKTKIDKYYDLYIDRAMIEHEFDVLWKKQSELNPTLFNDKARDDLKDVLLHQRPLKPVKPGRCTFMPDEERAPLALPSTQRFRMYQEVNNLRILRDGLKEEPLTLQQRDDLIAALEENNKRTFTQIKKLLGLGGIVKFNFEDPKREELKGNTTSAILSKDDHFGADWYKFDEAKQDAIVLQLVKEENEAKLVRWLQDETGVDEKRAEAIASVGLPEGYGSLCVAALARILPELRREVVTYDKAVQAAGFDHHSRMNNNAEIPDVTFKVEYIDQDTGEISPKPFHIHKTLPYYGEYLQRHVGFGSGNPEDVPEKRYGKIANPTVHIGLNQVRLVVNALIKRYGHPSEVIVELARDLKQSKDQRDEENKRQTTNQNRNKRLRTAIAEVLRISEERVRRDDIEKMILWEELSFDPADRRCPYSGEQISAAMLLSDEVEIEHILPFSQTLDDSLNNKTVALRKANRVKGNRTPWDAFGAQSTAGFDYASILARAEQMPKAKRYRFAEDGLQRWLKDDAGFLARALNDTRHMSKVAREYMSLICPNTRVIPGRMTAMLRGKFGLNDVLGLNGEKNRNDHRHHAVDACVIAVTDQGLLQRFAKASASAREQQLNRLVENMPLPWENYRGHVERAIDAIWVSHKPDHSHEGAMHNDTAYGLLGDGKVSVHKMVEGKRERIEENLKVIAFANAKANDRHGVLENGNPKPYKGYKGDSNYCIEIVRNEKGKWDGEVIATFDAYQLVREHGVARLRHPTLSVSGKPLVMRLMIDDALRLDVEGKIRAMRIATLSGNGQVFMAETSEANVDTRNRSKDDSFAYVSKMAGSLQKAKARHISISPIGELRDPGFKE

SEQ ID NO: 8940 - protein, 1122 aa, unidentified
  REGION 1..1122: note = Description of Unknown: Cas Enzyme sequence
MKYKYRIGLDIGIDSVGWAALEHDHEENPIKIINLGTRIFSAAENPKDGKTLTQLRREARGARRRLRRRAHRIDRVKRLFLKYGLLKEEELNSLYDKENLMPTPDYPFGFDVYKARYLALEKKIGNQDLARILICIAKRRGFKSNRKSDIIQDKEGKELLKALEKNKAYRIENGYRTVGEMFYKDPRFQEQFYSDKRQSFLSRPLIRNSENDYSKTILLEENVEEVKTIFERQSELGNQLPQEFCEEYINILTSRRAFDEGPGEPSKYRGTFKVGNCTFEKDELRASKGCYTFEYFRALNNINHIKISLRYGKIGEPLTEDQRIKLIEKIKSVKSFTYAQARNLLGLTEEAQFSNLNYGVYDRKKKEYKDPEKAAISNFENSAKIKKVIRDASIEELDAIAMVLAFNKSDEKIKNALIEKTLIRPFSEEQISLLQDIKFEKFGHLSLKAMRKINEQMEKYGYTYDKACEAAGYDFRAQKMGNKTKFLNTKEVYEQVMDIPNPVVRRSVSQTIKVLNAIIREYGSPQAIMIELSREMAKSFEERNEIRRMQEENREYNESIKKAVREIKPNAVGIDFLKWKLFLEQQGICAYSLKKIDPSRVFEEGYTEVDHIIPYSRSSNNSNVNKVLVFKTENQAKKNMTPYEYYKSIGRDFSELEAFAENYIKNKKKKSYLLNKNFTEQDALAMQERALADTRYITKLIKNLIRDNLYFEESKKFRKSPVNPVNGSVTSFLRTRWGLSKIREKGDLHHAQDAVVIACTTRSMIKKVTTFFQKLENPYAKEFIDFETGEILTREEFFDRYSEKFPSPYPNFRKELIIRLFGDPLKECYIDELIKSGYTHEDIRGINRVFVSRMAKYKKKGKIFKDPIYSAKYKNTEGVYVIRTDIKNIKLDKNGEIEGYFKKESDWPTYNALKKRLIEHNGDAKKAFIEPIYKPKKDGTSGNIIRKVKIEHKKSLQELKNHNKSSAANDSQIRVDIFKKDNKFYMVPVYVLDYYKNRLPNKAIKANKPYEEWPEIDENYQFCFSLYPYELVYARKDKGFNMKSVANKLNKDKKTEKITIKEEYLYYVSINRRNGASSVCNHDNSFIGEVCFMGFDELKKCHIDLLGRVRIIDKYEKRKPLR

SEQ ID NO: 8941 - protein, 1094 aa, unidentified
  REGION 1..1094: note = Description of Unknown: Cas Enzyme sequence
MKYFLGLDIGITSVGWGVIDKNNNIIKCGVRLFDEADQKNNADRRAFRGSRRLIRRRKLRIDDVKSLLMEKGLINNKFKPFKDPYKLRKKGLTEKLTDKELATVLLFYAKRRGSSLEVAEEITTKSEESTKFILNENKQLLKKEGFIVDVQLKRKKELGSIRGINNVFKTEDYLYELKAILNNQNLDENFKKELIEIIFRRRHFSEGPGNLYSPSPYGRYRLVEGKLLKELKEYLITNFNNKYLKEEIIFNYEGKNYLAYKNGEIVNKDKYDLIALMRGNCSIYEDEFRAPKNAFSAELFNLLNDLNNLKFTNREEKITGEEKHEVINVIREKGNITFNQLLKLLGVTLIDVTGYRIDKNDKPILTEFNGYKKVLKIIKDLKKKMLDDETIDQIMEILTETVVVEERFDKINRIVKDELLAMSLSNLTGINGYHNLSLKAIYQLKEELLITSLNQQQIITNKNLTQKTDSSKLVLDESAILSPVARRAHREALRVVDELSKEYGTFDTIIIETTRDKNSADQRKRIRDTQKYFEKSKKEAEEVVKDYDMEVISSSLILKLRLYKEQHGKCAYSGKSISLGTLIRDHQTYQIDHIIPLSISFDDSYNNKVLITALENQRKANKTPFGYFVSGMVDKNNPINNWNDFETTVKGNTNYSSVKKRNLLFKKDISKYEVLEEFKNRNIVDTSYAVRSLMTTLRNYYQSNEIDTKVRTIRGKQTNHFRKIGANLWFHKYQNSKEVNPFLKDRNKYIHHVIDALIIAGLSKQNYLRSLYRDKMSLNDDLDEITKAILNIDSPYNDPNLKQYLLQIASLKEDEINYSWKIDTKINRTLADQTIYSTRIVDDVHRVVKKYDNIYELNNERLEKVFSEKQRENLLVFKHDPQTYEILYKAYMQYAHEKYPFKAYYEEHGFLQKYAKNNNGPVIKQLKYLEDKLGSHLDITPQGAIDKKVVKLQVKSYRADIYYSKKENRYKFITIRHSDIVLRKGSYLIEEDWYNKEKKKKEINESYQFLFSLNRNNIIEITKLDKKDKIVEISRFIGVNNDIANKIEVKPLNYYEKKQLMPTIGRNTLKIRKFNVSLTGKIAEAVNEPLKLVF

SEQ ID NO: 8942 - protein, 1198 aa, unidentified
  REGION 1..1198: note = Description of Unknown: Cas Enzyme sequence
MKTLGIDLGTNSLGWAILDEQTVLKAGVLVFEEGVNREQSDSLETPAAVRRAKRMARRLRFRRHLRRRLILRILIDNNMCPLSVEELKAWTQTGHFPKDNVTFIDWLKSTDTRNPYCDRARSAAEKVDPLTLGRAIYHLAQRRGFKSGRKDQPEEGDEGTSARAKELGVVKGDIARISAELEKTGLTLGQFFYHEIKAGRKVRKQHTGRNEHYQKEWERIAKVQNLDKTLAERLARTLFWQRPLREQSFLVGKCPLEPTRNRAQIGHPEFEAFRALSFVNNIRVIDGEKRIPLTGEQRALAANCFIRKTLFDFKVIRQKLEKQFKELKGAQFNYEDSVSLASSRITASLVEILPDGTDSQKAFDALTFFDDNVKLNAWAQKNLGLSQEAADRFVKIRIPEGRGGYSLHAIRKINRFLRKGVELSEAIFLAKLPDIIPEFDLKENEIIAKVHEHNELYRENKRTAYHDIRTENRVGVLSLEKRLGSWLEQEFGINGNTTGMLYFRDPKADTSYATLTNDERHEVEKGFLPKVNLGMIRNPLVQRSMTMLRRLVNELRKKGAIDADTRIHIELARDVNSRNDRMAIQDWQKQNEKKRADARAKLQEYGFVNPADDLVLKYVLAEEQNWVCPYTGREISMKALVEGGFDIEHTIPRSRSGDDSQANKTLCDAVFNRNIKKGMMPSELSNHEEILTRLGPWLDTITELQKLRGKQSKIAKSFSKDNPEARAKARQKFLVTKLTLKYWEDKYHRFTKKPEDITPSFISRQLVDTGIMTRHAVALLKSVYADVYPVNGQAVAFARKLWKVQDEDAVKDRSDHTHHAKDAMVIAALSRDRFQKICAELKADDERKNPKIIVTPPFAEFAPTVFKTTQGVLVKHVTRHNELKQTKRSSIRLASPKETSIGMITRAPTAGSTVRGQLHKETFYGKIKKPGATETVCVIRKELNAGNFPQASALEKIIDPAVRSAIQNEIARRGGDFKKAMDAAVEEGTFKLPGERGAAIKKVRVEAGFVKNPQIVRLRTVTPSRHDYKNAYWAESGANSNFRLAVYECSNATSSPREFEFIAENLLKCVQGVIRPSICGGACIGYILPGAMALARRTENAGMPLLYKVVAFGNMETEKRITLRLHTEARGSVDLGKDLSEAGRNKAGESSVRMDDPYPLLRLQMRAAWNAFLFEGIHFKMGLDGEIDYTPMGTEQDV

SEQ ID NO: 8943 - protein, 1254 aa, unidentified
  REGION 1..1254: note = Description of Unknown: Cas Enzyme sequence
MAKKQYIGLDIGTNSVGWAVTNENYEVVKAKGKLLYGSRIFPEASDAKARRSFRANRRRMNRRKERMALLESIFAEPISKVDFDFFQRMKESAFYGGDKTVKGNFSLFNDDNFTDKDYYQEYPTIYHLRKAMIEKDQKFDIRLLYLAVHHLIKYRGNFLLEGQKLNGQGQSDNEFIINLFNDIKQYYAENEINIDISLNETNIDDLIGIFIKEKGINSTKLAWIKKFGVNDTISKSIFNALAGGKVKIDNFYPMLEIEGIDPDSLQFSKSNFEDELLPQLVSQLGDDALVIEKLFGIYSWLIYKKILNRAPYYSFAMVDRFETYKQDLRDLKNLYRKYLTRDEYNRMFKVGDKNNYSAYNKGTQYKGKKKYVKGCKYDDFIKDLKKEFEKNIAKLTIETIDADGNKTKEKVPEYQHILDRIESKDFLKKIVVSDNGVLPYQLNELELDKILSNQAKYYDFLNRVDDGWTISDKIKKLLTFRVPYYVGPLNDYHKKAEGNGFSWLVRRHEGKITPWNFNSMVDLDKSEDNFILNMTNKCTYLPTEDVLPKQSLLYQEYLVLNELNNIKFENKRLDVECKKRIFNELFCKRKRVTIKAVANWLKQNNYCDENINASEMITGLDKDFKSSLSSYISFAKILGPFDMNDAPMVEEIIKWMVISPDRKRLQKRIRANYLKEMISDEQIDGILHISLSGWGKFSRKLLNSDEISYENPIDKVNLSIIDLLYQTNKNFMEILFDKGYGLDKKINEYNDELMDKNKKITYEDIDALPISPLVKRPVNQSLKIVREIRKITKKDPDKIFVEVTREHQDKKHKSVTESRKETLSKLYESLKKDCADYDRLINELKGKEVSNLRQDKLYLYFTQLGKDMYTGKPIDIEELSGQKYDIDHIYPQSIIKDDSLSNRVLVNKQDNARKTNVYPIDEATRQRMRGFWHLLHEKKLISDEKYNRLIRSSRISAEEISSFVSRQIVTTSQSTKAVINLLQLMYPQAKIIWSKAKHVTKFRNDNKMLKSRDANDYHHAKDAYLNIVVGNVFYTKYTLLMATKNFNEMNSEYYQNHSLNYDNIYERNVPGAWSIEKDNKTLDTVKKYMDYNCVLFTVMPTQNKGQLFDQNIVPKSESSALIPLKESGALANTSKYGGYNKAAIAYFFLVESLDKKGKKQLTIESMPVMFAKRYEKDSDFATALLEKHFNLKNPKILVKKILINSLIKINNTPCRITGKGGKQLLIAHNIQWNIDQDMTNYLHLLEKYRDREKK

SEQ ID NO: 8944 - protein, 1517 aa, unidentified
  REGION 1..1517: note = Description of Unknown: Cas Enzyme sequence
MKKVLGLDLGTNSIGWAVIDEDESCIEDAGVRIFQEGVVAKTIGTGDKEESRNATRRNSRQMRRQFYRKRLRKIKLLELLIHEQMCPLSIEELNAWKNWNPEKKSLMRTFPESPLFMEWIRLNPYDLRARALHEEVTDNELGRIFYHLIQRRGFLSSRKVDEKESKTIYEKGLPSSNILPINATKEKIKDSTLGEYLQTLTHKQNEPYQEPLSAGEDVRIRGRYTTRDMYVAEFDAIWKTQCQFKNLENRLVLSKRTRKLKGSIQSNRNVLRINYLKGKYGENNVVVEEQKGGILITTKQEIPFKEFLAGKIDTIENENGETTLKYKSNESVLFWQRPLRSQKGTLAPCQFEQDMPVITAKHEFLLDKKGNIQRRSKKPCPVSHPEFELFRAYQFVNNISYGRKMYLTTEQKELAVDVINTNKSAFKFSKIIAKLGLGYEKFNFEADFSVAPNVTIATLSPLFDQETWADHYEEIWHCFYFYEDNDKLYEKLCNSFGYTKSIDNLKKVKLKEDYGSVSLKAIRNILPFLKKGYSFDRAVILGGVKNAFGNRWDRFLDFQEEIEHAVISILREDNKEGEAILKIKKYLSAPENHYGFLENDPYFSYLYHHSQEVNISAGCSERLPLVESLRNPIVQQSVNEMRRLVNNIIKNLRHKYGDDFTFDRIHVEMGRDLRNGKKKREELSQQIKKNTTKNEEAVRRLNEYGLQPTRNNIQKYLMWKEIEEKAGVVRCPYTGKTLSISSVLGSENLIQIEHIIPYSISLNDSFGNKTLCEANFNREKGEKTPYEFYQSNPSPELWGVDSWEAVEERAFKLLPYIKAKTFTTKREFEKSTFIERQLNDSRYIAKKSVELLSHICKDVRVMPGQLTAELRHLWGLNNILQSTDVIDCEVPDLKDDLMCNCYAVRNDEGKIIRLAKVENERPMTLSNEILIPANVFKKQVKSKYFTLNINLPEDQSFENGEYWAKFQVSDDIRIYPKYMERPSSDEDHIIFRGQIQKKIFSHDTVGKVHTEQDDGSYWATFLIKDKKFIDTDMQREKPKSKPNQILLFGSIVNGLFKCYIYSCQTNINDGKYWLLLDIDRDNVDFLRSSYPQPMITENQICITAEIKDNTIETETDLNFNPHVENRSDGKYYAVLTILNDPILYPIKVCPPSLCENEKLVEGMIWIDKYTGEIKFDPKKNRDDHRHHAIDAITIALTKQSFLQRLSTYNADCGDKLRGKLNTTEKFPEPWAHFRMDVKKVIDGILVSIRKSNKTLTKNKKGFSVRGQLHKENVFGKRQSPLQSETYHRRIKITELKDMKQVGKIVDKSICELVRAHLVEKYGLKGEDEKIPADAFFNDGKWLLYLPNKKGDPVPVKKVRIGENLSNAVQLKLSVNQYVNPRNNHHVTIYEDNEGNLQEEVVQFWTAVQNKLDGLNIYQLPSDARRVICYLEVNDMYLLGMSDEEYSDNKNNYQFLSQHLYRVQKLSSMFYTFRHHLASTLDNKNAEVYIQSMKRWIELNPIKVRINEMGKIIQKDNA

SEQ ID NO: 8945 - protein, 1458 aa, unidentified
  REGION 1..1458: note = Description of Unknown: Cas Enzyme sequence
MSNMNEEQNEKKYYLGLDIGTDSVGWCVTDRNYNIVRKESKHLWGARLFSEAQDASSRRGAREARRRLERRRWRILLLQDIFKDEMDMKDPDFFDRLNNSAFHMEDKAENTRLPCLLFNDENYSDKEYYKEYPTIYHLREKMIDHPEIKFDIRMIYLVMAHMIKYRGNFIKVGKMENIGNDPKTIIDLFNQINDAFDNLYQPDQDNDDSPMPYEKINCTDTAALKLIEVFKKNNKATEMTEEVKKALEIDKKCDKKTQSLLSLICGSEVKISKLFVFDEELSKEDDVIIELGSSTFDGTTLPEISSNFGDEKTNIIILAKSLYDYRVLANILQGKEYISEAMVEIYNEHKKQLKELKDLIKRYSPKSYSSFFRKTFDEKGKLIEANYSNYVGYCNVKGKEYCGKHSTNEENLYKAIKAILPIKEAENPEYQLLKEEDRKTLIDISKLMEANKYLPRQNSGSNGVLPYQLNEMEMNKIIDNQKKYYPFLGEMDTDYLNPKSQSYKINSILTFKIPYYVGPLSDRLNPDTNEKFDNHWAVKSKQGVKITPWNFHDIVDKGATEEQFIENLKNPCSYLIDETTLPKFSLLYTEFVLLNEMNNWLINGLPITSDDKKYLFEKVYLKYKKPGIKAIKASLKDKYSQEVSLKTRNGKDVEAEDIHANLSNWIDMASERGFGPGFYNDLEKRKLAEDVIYNISVFEDKKVVSERLDSLPLTEPQKRYFSSLSYKGWGKLSERLLNGMTVEMTDTDTGEVLPLTVIQIMRKTSQNFMEIVRTGDASNGFMQQIYKENVANNPTLDDLIDSEYASPAMKRSLRQTMKIIAELKKILHIDHFDTCFVECTRSPDAKKERTMSRKTQLQQVYAAAKGLASEINLGTLKNELESVDEQKLRSKKYFLYFMQLGKSVYTGEPISLDDIDKNYDIDHIIPQAKVKDDSFNNTVLVERGLNIKKSDLYPIPDNCITEKGREWVDKLSHIGNKHFSLMPSDKAKKIKRPSSDYLTDDELVGFVNRQLTMTDQSVKAVCDLIKQTDSKTKVVFSKASLVSDFRNVFDIAKCREINDFHHAHDAYLNIVVGNVYNKTFSSCFDKSMLERSKDYAESLKINPDNFFRKDKTIFNTDTKVWIAKHYDFDEHGNPIEDPESKGTIDLIRKSISRNDPLVTQMMLTQTGFINKTHIHSPAEKSSVMPLKFSGPFSSEGWQEKYGGYNELTAPFYMLIRSESKPKKGKPSKHIYSLENIPTVDLIQNKTKEQQIEYLKAKYNLLNPEIVLDKILIRGILEFSNSSDPSDFKKCTRMGISCKSNNVISYVNLFEFKCDVTRLKYIKQVEKKSQEYIKAMGKDNQSNVVRSDGTLLLKSLVTKEKNIELFEYLLSEIQKRDCIKNIRGIQKLIPQIVDKKDAFVSLSILEQCYVISQLIVLINCKKMTSDLVLIGLPKNGGSKTTNKKLPVGTRILAQSVTGF

SEQ ID NO: 8946 - protein, 1044 aa, unidentified
  REGION 1..1044: note = Description of Unknown: Cas Enzyme sequence
MNKEIVLGLDIGIGSIGWGLIDKQTGEIIDKGVRLFSEANPENNVDRRLFRSTRRSIRRKEFRLYRTRRVLLEMGLIDDIAFLPLDNPYEIRCKGLENKLRNDELATAILHLMKRNGFRYEIVDDKESSGVSRISDEYLCQHQLKILQAYGKVRGQENRYHFKLYEKEFKKLLEIQNIDSSFQERLLDIFTRRRHYAEGPGCKTSPSAYGRYLSFNSQPINLIEKMRGHCSVFQDELRAPKVCPSAELFNFLSDINNITIHGNHIPVDKKVDMIETFVLGKNKITIKQLENFLGESLANIDGLRVNASGEPLITEFKSLKKIKDAIKKADLSDYPINSIEDFYILDDIFEILTQEKTIEGREERLNKLSIPELSNEHLKCFAKIKETTGYHSLSLKALREINSEMLQTSKNAQQIIVTLRNNNEQFDQGLRLPENTIMSPVVRKALNQTFLIVKAIIKKYGHLHSIILEMAREKNSGDLKKKISETQKRRVQEKEKVLALLEGLNIQEIKGDLIEKILLYIEQDSKSIYSGKPMNLNEIINDPSAYEIDHIIPYSLSLDDSRSNKVLVYSHENQNKGRRTPFQVFQNKPADWWTWTEFEAFSRFQYIKNRSKLSKLLEKRDIESYDVQEEFISRNLNDTRYICKQALLTLKMYFSHHDIDTKVHVVNGLLTNRVRRIANLKKDRNFHCHHAIDALIIASFLKSKYLENGLNNELIDYDTGEIFTNNCDDDIFGPVVENVVKQLISLDQIDDFRFSYKVDAKANRSLFDSTLYGTRLEKNDLYVIKKYANIYDKPGEKLAENIRKNKDIENLLIYRNDKNTFVLLQKIVASYPNEKNPFSAYKNEHGDYVRKVSKKGKNAPAVISIRYVEDKANISLPLSNKYPKPVAGRGYPIKLQLSPYRMDLYLNEDDGKYRFLTIRYSDVRQKGNEYIINEAWYEKEKERYGIGSNFHFVNSFYRCDLIKCTFRDGTTKLDVFKVVNNQLSQRIEIDSFGQNIIDYSNGVPKKKQVTISIGRNVSIVQKYGTDILGNLYLIRNEPLKLRWQ

SEQ ID NO: 8947 - protein, 1419 aa, unidentified
  REGION 1..1419: note = Description of Unknown: Cas Enzyme sequence
MTQKILGIDLGTSSIGLALRDVDLGDNLKDQLVYFSSDIFKAGVGKDKTGEYSFAAERTKHRQSRRLYETRRRKQWATLHLLKDHYLCPISEESLHQWETYDKAKGLRRKYPVNDEAFARWIALDFNDDGKPDYFSPYQLRRELVTIQLDFTLEENRFKLGRALYHIAQRRGFKSSKGETLATQGNEEKDLTSDDLTQEMKKSEIKLAKDLATYMQEHDCKTVGQAFAFLEDEGIRIRNSIYKAVRTQYEEEITEIFKFQFGLSLSSELYVRLISKKKGEGTIFYKKPLRSQKGLIGKCTLEPGKARCPESHPEYERFRALSLLNNIKYRPSTDDVFRPISLSIRQQIYKELFVGRMKPDFSFVEIRQRLEKILGQSLSSDAANKTINYKDNQSLSGCPVTARLNKMLGTGWESWQQTSTKVHNGKKTKAQEKHSVNYSAKDLWHVCFESDDPEDVMEFATHSLGWEDGQAKQLVRLWSAMSTGYAMLSLKAIKNINRFLVLGLKYSDAVLLAKIPDILKDEHLDLPKLADDYQNNVKQSVDQEKDIFFIANSLIADYKSLNVEDRFADHNTSYKLIKYDDQDILKHIIGYVGQNSWELMDADEQEKLIDGVTRLYQQFFSSVKREFYKVPRVDDRLKSYLMETFPNVEPRKWEKLYHPSQINLYDVPNVKLDRDLWRLGSPNIGSIRNPVALRTLNVLRRKINAMLDNGLIFWDDTRLVVETTRSLNDANMRWAIEAYQREREKENKEIESILSDYYPKRAINKTDVDMARYAIEQSDTDVYKVDKRNQFAKDVAKYRLWLEQGGICLYTGKTINLTHLFDGNAFDIEHTLPRSKSFDSSGSNLTICDAHYNRSVKKNMMPTELPNYEHDTKDYTAIKPRLQKWEERVGRLQKNVEFWKAQSKRAQEKTRKDYCIRQRHLWKMELDYWHAKLEAFKVTEIKDGFRNSQLVDTGIITRYATLYLKSVFQNVDVEKGTITDSFRKILGVQSIDEKKIRDQHSHHAIDAAMLTVMPVAAKRDRMLKLFYELDEKESFLNHSSYPDSRDYIAQEIQGLKVKLAQEAQDCHIGRDVSSVGEFIESNILINHHTKDQTLTSHRRRVRTRGKVVMVKNPEGNMVEKWTDGDAIRGRLHNESYYGAIRLPKEEGEGLDRKPLTKDGKFVYADSNDISMVMRVDIQSFKSPKDLEKIIDPSVRQIIMKTITERMDDGQSFAEAINENIYMLDKYGHEVTTDKHGRIVSPIRHVRCKVAAGRGYMTKDKSLEVRHHIEKSTKQLINVPDRSYKEVVYAQNDSNYLFLLYEGIKKGKLVRQSRIINTFEAAALAKNGDYVDLSKDLFNEPFYASFTYKKVDYRLSAILKEGMRILMWKETPDEIKELSKEEMSKRLFVVVKFNETGSIHLYLRNHLTATTTIDQELVAD

SEQ ID NO: 8948 - protein, 1132 aa, unidentified
  REGION 1..1132: note = Description of Unknown: Cas Enzyme sequence
MSKKQYIGLDLGTNSVGWAVTNEEYKVEKAKGKLLYGSRLFEAGKDASERRAYRSTRRRMKRRKDRISLLQSLFADPISKVDFEFFQRLNESAYYGGDKTVKGKFSLFNDKGFTDKEYYEKYPTIYHLRKDLIENDEKKDIRLLYLALHHMIKYRGNFLLQGQKLNNEGSQDNTYIVDLFNKINDYYLEYGINTNFVLNKPDEFVSSILRCKGKSNTKNELINLFETNDKLCKNLLNVLAGGSVAVNSLYDGILECDGIEPAKIQMSKASFEEEDKPKLMSALGEDGALIETLHLIYSWIQFKRILNGSQYYSFAMVERYNQYKKDLADLKHLYRTYLTSEDYKNMFRLSGEKLNNYTAYNRGTQYGDKKHYAKGCNYADFIKAVAKDLEKNADKLSVKETDEEGNIVLIKNEEYESIFKRLKQEDFLKKIVTTDNGVLPYQINKLEVEKILENQSRYYDFLTIKDGEYTIVDKIIKLLEYRIPYYVGPLNAHFTKESGDGFAWAVRKRDGKVNPWNFKEMIDEDKSETRFIRNMTNKCSYLLGEDVLPKESITYQKYMVLNELNNIRINGERLSVELKKEIFNNLFCERKKVTINILRKFIVASGKCSQTDFKEVVISGLADDFKSSMSTYIEFKKIVGKIDINNIDIFESIVNWITISPDIKRIQKRIKENYMDRLSKSQISAISKLKFQGWGKFSKKLLDSEDISYVDPVQGEELSIINLLLNTKLNFMEILNNRQYCISDRISDFNSEIGVEKHKVGNADVDELYISPTVKRPVKQTLKIIRELKKVTKKKPDKIFVEVTRERLDENRRKTPDSRKNQLLKLFNENRKAIKQTIDNYNELLEEINGKDVGKLRQDKLFLYFSQLGKDMYTGKPINIEELSGRKYDIDHIYPQSLIKDDSLTNRVLVSKENNAIKTDEYPLDISIRNKQRKFWKDLMDMKLISAEKYNRLIRNTGISAEELSGFIAKQIVTTSQAMKAVINLLQTEYPEAKVIWSKGGHVSKFRQKFELLKSREANDYHHAKDAYLNIVVGNIFYTKYTQMSFIEMAKKKLTNEKYSINPKNIYNTDITGAWNISSKNKTIDIVKKYMSYNNVLFTVMPYIKKGEFYSQNLSRKGDNTSLAPIKESGTL

SEQ ID NO: 8949 - protein, 1172 aa, unidentified
  REGION 1..1172: note = Description of Unknown: Cas Enzyme sequence
KIDFKSYLNPYEIKIKGLTEPLTKEELSIALYHYMKYRGFKSNRKVEDKKNDGVLIKQFEDVENQLKENNATITQLLYKQFLEARAPERRIHNVDNAGSLYNKKEQTKSIRNKDDKYNFSATRDMYLKEINLLLDHQISCGLINTSFKEQYLQIFNRQRSFSMGPGKGSPYAAPEGMSLISKMIGVCTFDQLPRAPKASFSSESFVLLSFLNNLQFKEKQESNYRGLTEKEIQSIYNFALKTSALTYKNIFNTINIPVYRIKGLEFSKKQYVSILKAYKKKNEINTPSLNEEQYENFQQHVKNELFSSKIVSLSHYHSERKILEKYAKEHSSSEEEINTFIQDTSNFDIINEILLQFKVDQEIINACLKKGISNHVAQAIITLPSIDKTINLSIDLCKKLIPHLLENQGYDKAMDLVGHNHSNINSSIEKTSYLPDINECVEKMNESLTNVNVRHTLVEMRKLINEIIKNYGYIHEIHIEFARELAKNFQDRLDIKNQQLENQTDNIHLKLELINKYPHFFHSLNNIKGETLLKYKLYREQNYKCAYSNRPISENELFDSSATQIDHIMPYSRTFENRSFNKVLVFTSYNQVKKNRLPYEAFKDEKWQKILDFLNDPAVRISAKKKEIILLKEIDDSEWLERNLNDTKYMSVLAKKIIDAFLKPEKCRAITGAITSKIKYSYGLTNLTHSFISNNYRRFEHFYIQSYNFSSNEISFIIKDNLDKTHTILVSKIKNPDKKILSHDETTLNDALQYFLYNQDALIHHVGDGLDESIDFDKLIEQIAIKKSKANDPNQSLELEDLITILGNIKNQLITITNTKDRSNHLHHALDATIIACVDDKMIYRIQNYEKMKEVLYDETTGEELSTCDFELPYPDFRNEVIYRIYERNYETLLKKLSALSNYKNYNFDGNHCYVIYPSRSVKKVTNGPLTKDTMFGFDEKLQVITKRVSVHEISEKNIDSIINKNGGSNAQYECIKKWLADGKPTQFPILPGKGNYIKKVILEESDNIRKRVQLKEKRFAANSKVSRVNIYKQKNNDEQLYFVPIYLYQLMREQLRKKGHKIQEVFYQLMPSPTDKQEFISSEQLDLHFDKILSLPRYSLIQINLKKGPFGYCYSAGLTSSGKFEIYSILGDDEDLFNFNLITSFQKQYQQSISTFESIELHKVSILGKIT

SEQ ID NO: 8950 - protein, 1092 aa, unidentified
  REGION 1..1092: note = Description of Unknown: Cas Enzyme sequence
MIEKQYIGLDIGTNSVGWAVTNEKYEVVKAKGKLLYGSRIFSEASDASSRRVFRTNRRRMQRRKERIALLEAIFSDSVSKVDFEFFQRLKESAYYDGDKSVKGDFSLFNDADYTDRNFYAQYPTIYHLRKAMIESDRKFDIRLIYLVAHHIVKYRGNFLMEGQNLNNKGQEDNSYIVNLFKQINEYYEKYDINLNYNLSNVGDFVNLILNSKGINKLTKDFNELFDAKENLAKSISKILAGGSLKVSALFPMFDLEGMDPDAIKFSKSGFEDDDLPKIISALDEDSKIVQILFNIYSWMQYKRILNGNTYYSFAMVKRYDDYKNDLLDLKSIYHKYLTAADYNAMFRVAEEKANNYSSYNRGTQYKNEKHYVKGCKYEDFISFLKKELEKNKDKLTVSRIDDAGNSIVENREEYQRILDRISEGEFLKKIVTSDNGVLPYQLNAIELQIILDKQAKYYDFLNKKEDGLTVKEKIIKLLTFRIPYYVGPLNDAHKKSENNGFAWVVRTKRGKVTPWNFDEMVDRDQSENMFINSMTNKCTYLPMEDVLPKQSLIYQEYMVLTELNNLKLNNERLDVNTKQRIFNELFSKCKKVTIKKLKDWFVNSGIKTKSEVENLEISGLADGFKSSLSTYIDFSNILGDFDMNSMDMVEEIVKWIVISPDKTRVERRIKKFYREELSDNQIDKITHITLSGWGRFSKKLLNSEEISYKDPITGVNRSIINLLYNYNLNLMEIFENNVFKIREVIEKYNENLVDDENKISYDDIENLPVSPTVKRPVNQSLKIIREIKKITKREPDKIFIEVTREHMEDKKTPSSRKDSLLTSLNSVKDDCDNYNTLMEELNKSEVSRLRQDKLYLYFTQLGKDMYSGEPIDIEELSSQRYDIDHIYPQSLIKDDSLNNRVLVSKESNANKLDVYPIDEPIRNKMIPFWRMLKTKGIISVEKYNRLTRSEGLSAEEIASFVNKQIVSTSQATKAVINLLSHEYPNAKMVWAKASHVSDFRRDNNMYKSREANDYHHAKDAYLNVVVGNVFDTKYTVNSAIAIAKMKISDTKFSINPDRIYNSDIPGAWSIDSGSKSIDIVRKYMNYNNVLFT

SEQ ID NO: 8951 - protein, 1026 aa, unidentified
  REGION 1..1026: note = Description of Unknown: Cas Enzyme sequence
MSNGDSGEKNSKKYYVGLDIGTDSVGCAVTDQDYHLVRKQGKHLWGSRLFDEAQTAEGRRMARGTRRRLERRKWRILLLQDLFKPEMDKVDPDFFDRLNNSALHAEDKPEKCRKPFLLFNDNGMTDKKFYQDYPTIYHLRMEMMTHPEKKYDIREVYLVMAHMVKYRGNFLMEGNLTDKPVSDPQILVDDFNGLDDLLSQEENSLLSFQVTTKQAEELIKVFQEKTRISELAEEISKALNVDRKDPRENYIKLISGSSMALSALYPDIEDEDIKKTKLDFTNEDFRENLPSLAANIGDNRFQILAQIGILYDYRILINFLKGKDSLSEAMIGVYTDHQCQLKILKDLVKRYNRPAYAGFFRRMDTVKGQEIKNYANYVGYLSVKGKAVSGGHRTSQEDLYKAIKGILPFDQIGKGYAWQQPEDEGKLKDILASMEANKYLPRQNSKENGVFPYQLNLREMDKIIANQSKYYPFLAEKAKDYTNPDKTTYKIDSILEFRIPYYVGPLSNRPVPEGKESNRWAVRKGEEKITPWNFHDVIDEEASARGFMDRLKNPCTYLIGEKTLPLGSLIYQDYILYNEMNSWLINGKPITEEDKDYLVENVYKKAKKVTINPLKAALKAKYKSSVRISTKGSGKELDAEDVHASLSSYIVMSDSRAFGPGFEKDGKKLELAEEVIENLTSFEDKTMKERSLKKLGLSDSQIGFLSPVSFSGWGKLSKKLLDGLTTEVVNTSTGETLDATILYLLKHTSYNFMEIYNGSSDGKDLGYTFRKQVEELNHKSNPSEEDIIEAEYASPAMKRALMQTLKVVKEIKEILKVDHIDSYFVEATRGATDQGRTTSRKRALQKTYQAAKSLVTKELSDALENSTDSELRSKRLYLYFMQLGRDVYSGKPIDLNQINKDYDIDHIIPQAKVKDDSFLNTVLVARGLNNTKSDTYPIPEGTISEEGKKWIETLNRIDKGALMPKEKMERLLRPASDHLTVEEETGFVQRQLVMTNQSVKAVCDILRQIDPEAKTVFSKAGQVSDF

SEQ ID NO: 8952 - protein, 983 aa, unidentified
  REGION 1..983: note = Description of Unknown: Cas Enzyme sequence
DFLHLDKKTIKNYSWNYGEDVKKQGNTTRATLLKNLDKAGITHDFLTEERFYHLWHMLYSITDNKQLRKALTHFAEQEHLSEMFVNVFMKTKPFESDYGSYSEKAIKKLLPLRRCGKYWSASAIDSQTMDRIRHIIDGEIDEAISDRIREQSQKQELQNIDDFQGLPEWLACYVVYNRHSEVAEITKWQSPEDLQAYLQNFKQYSLYNPIVEQVVLETLRVVHDLWKQFGSINEIHVELSRDLKNPAKKRAVLFSQNQKNEQRNLRIRLLLEEMSHDNTYQDVRPNSPTQQEILKIYEEGAVLGAQSIPADIEKIISSKQPSTSDLNRYKLWLEQKYCSPYTGEIIPLSRLFTTDYQIEHVIPRARYFDDSFNNKVICESEVNKIKSNLLAFEFISQAEGKPVQCSNGRSVQILSLKSYEQRVRQLYSGKQYQTKLKNLLANDIPQSFIERQMNDSRYISKFMISVLSNIVREPDEKESTSKNLIPCTGRITDRLKKDWGLNDIWNDLVYKRFERLNEKSGTSDYGYFDNKNGRRVFQTQVPLDRQQNFSKKRIDHRHHAMDALTIACASRSIVRYLNNENAGNIKQREESKAKLVSNKLIHKPWSTFTEDAKKALTETLASFKQHPRVLSKASNSYQHYNQEGKKVYTPQIGRQLVIRKSLHKETFYGLVNLRFEKQVSLNDALKADIHRLVDKDFKNFILTQTNNGISYEEILKSLKAADYEWQGKNVKKVSIYAFTNEEKDNHYYAKRKPLDTSFDNKAIEKITDSGIRQILYRYLEAKGGDPKIAFSPESIEELNRDITQYNNGHPHQPIYKVRWAEQSGKFAVGAAACKSHQFVEQNKGTNIYFAIYVDEDGHRFYTTPRLIEIVECLKQGLQAVPEVDSQGHKILFTLSPNELVYVPSEEERQEATGVLHQERIYKLVSAENHRCFFIPCNVALSIANKLEFSPLNKMERALSGEMIKDICWKLKTDRLGHILQVIR

SEQ ID NO: 8953 - protein, 951 aa, unidentified
  REGION 1..951: note = Description of Unknown: Cas Enzyme sequence
MNKINNYFVGIDAGSDSIGWAATDENYNLLRLKGKTAWGARIFNEASDAKARRIFRTSGRRMERRKHRLDLLQSLFETEINKVDDTFFLRLSESNYCIEDRNEKIRLDCPLFKNIDQEKAYYKKYPTIWHLRKALLENDSNIVWDIRLVYLAIHHILKYRGNFLKSGSIDPKKFNYSIFNEINSIFKTIIAEEEGLEVDDIDFQLISEKNYQEVIKILLNKDLYKTKQKTEIKALLTSADKDSIVSKYIELFVTLIVGGSFDSSKIFPDNEKINIEFNGSFDDKVGVLQQMFEDNYALIEYLKSIFDFVYVSKILGSENSLSCAYVRTYQDHKKQLIELKEVIKEIDIARGLKGHDRVYYDMFHNPKEQANYCALVNVDSDCKKRIPIDEFDKYVKKILLANESYVKNKKAYKELLKLAENNELLQYIAIVSNSTIPYQLHYNELVTILDNSAKHFDIIKANKDKIISLFLFRVPYYYGPLDSRSPYSNIVLNKEAKGSFTPWNIDQYINDDETRKKFMNSLTNKCTYLFAENVLPKESIIYSDFVILNRLNTMRINESVIDNDLKLKLFKYISSRSKTTIKQIKVYLASIYEGILNQNEISISGVGEDSFISNARSILGRCFDLDKSDAKVMAENIIFLLTVYTDNKDDAIKVINKQYSLNAYQLTCIKSLNYKGWSPLSKKLLIGLRPTNEEGEPVDGNIYSLLMETNENFMQILNNEKYSFSQIIDNENEKAIGSLSKQQIIDEYIENTPPLMHRTIIQILRIINEIKSVVKKEPQKIAIEVTRTNKAKKEVSISRKSGMDKFLKSFKKDFEYYEQSCTLKSQLDELVKNKELFKLKGKHLFLYFKQLGLDMYTGEKININDVLNGTDYDIDHIIPQSLIKNDSFDNTVLTKRKINQEIKKDQYPLPEKIRNNETVKALWKFLFSHKQISDIKYNALIRANPITESEL

SEQ ID NO: 8954 - protein, 929 aa, unidentified
  REGION 1..929: note = Description of Unknown: Cas Enzyme sequence
LDKFLNDIETDNKKVKNLFNKLKKYIKYLKANNNLEFEEERNKLLNIINKKENLGPVKKSIRQLSEDIINSGHEYLGEYFYYLYCKKEKIRNQYTDREEHYLKEFYKICEVQNFSDEQIEDLKKAIFYQRPLKSQKGLVGKCVFEKNKHRCPISHPEFEKYRMLCFLNNVKIKTPFDSELRDLTNDERAKCIPLFYRKSKVNFDFEDICKQLIPRKATYGYIKEREASGKEYLFNYHLKTAVSGCPTCASLKNIFGEDWEYSLYNAYTNRSMKNGEKTINEVIHDVWHVLFSFEDEERLEKWCLEKLNQSTEAARKFSKIILKQGYASLSLKAIKKILPYLENGYKYSHAVYFANLDAVMGKLWIDDNIRNKILHDIGKILNNQSNYQISIDIINGIIANYRQNKNSLYSLPKYTSDLKSDLTDILKNKFGKDKWAAFTETEKEYYSNFIIETFSKQAELKMGKGIFYPGMRIDEQIKEYLKNNYNIDDHNLKKIYHPSDIEVYKPAKRNADGKYYLGNPIIEGLKNPMVMRVMHQLRKVVNELIKQEIVDKNTRVHIELARELNDANMRAAITHWQNNLQKRRSEYRDKIKELYYEECNKEIEPTETDILKYQLWEEQSHICLYTGKTIGISQFIGDNPIYDIEHTIPRSLSFDNSRENLTLCDNYYNRNLKKNKIPYDLSNYNEILQRIEPWKKKIDEINKNIQFAIRQSKNAQTKEQKDRAIQKKHELQLEYDYWEKKYSYFEMKDVPDGFKRSQLADTRIITKYSRMYLQSVFDKVYTVQGKIVSDFRKIWGIQDEYEKKSRINHVHHCFDAVTIACITRDNYDLLAHYYYQIESAENKRGEYKPSGFPKPWPTFTQDIKELDKKVLISHYTPDNLLVQSKKKIRKKGVIQHNHKNQPIYQKGDTVRGSLHKETYYGAIEGPEGG

SEQ ID NO: 8955 - protein, 1012 aa, unidentified
  REGION 1..1012: note = Description of Unknown: Cas Enzyme sequence
MPSERILGLDITKKRIGWSLIKHNPNDPSENVIVDCGGFDFNAGEIPKTGESPNLPRRNARLARRTIKKRRKRKATLLKLFIESGLIETNDTDTLFRNHLVTSPWDLRAKALDNALNGEELARVLYHIGGRRGYQFTRAEEMDAMDGESGKLKEGGRALILAMEESGARTIGEHIASLDRQRNRPQLNEKKGIKESVYDRSIHRSLLRREIEGIFAAQQALGSTIATNELRASFEEIAFFVPDPQSTEKLLGKCTFYPNETRAVKASMDAEAFVALTRFINCVVEMPGTGTEKKLTSLIELDRLMKMAKDKPSISHADIRKLLNLGDEWIFKGVKYDTKTKKASKKAAKSKVGLFEEGEESQEEIVLDYKYEKKALVEMKAYHHLKASLGDMFDAIQDHYENVVFILTVERGENSITERLKKIGIKEPWLIEALINALDPKIFKETIMLSNKALSTILPQMREGKRYDEAVLELGMPTFEKTHLLPALEKTHIEVNNPIVLRVVAKLRTLVNEIIRFHGAFHKVHIELGRDMSTKAEQKMIDSAQRERETQKKVARTRIEELFGDSVKPSRRNIEKMMLWAQQNEICLYTGKHIELERLYEDGYAVVDYVLPRSRSFDESFGNMVLTFAQEKIEKESMTPFEWFGDNGDKWESFKSLLSSPAFIYKLGRGKVHRLLKENFNDQSATDAASKRLENSRAYAAKVIKELFEDYLEMPKSPLGGKIQVFTRSAWLTAELRRQWIGYEAQHEYDDRISVLNAILVAFSTQNMIQNLSQHFKWKEAKWTKEWLQNKRDAGKDVQSWEKEKKQFTLPYPSFRTDVAELLKYDRSEFDKNGVWRKRLLISHAPQRTTTGQVHDATVLSPKHLKDSGFTLVRGGIGACKTPDIARVDVYKVGDKNGFHILSLVDMAKPYKPNIFIKDGCVSPVKSDNSEFKFSLTTSENDLIGIVDKKGEEHLVWLSSIARSSFQATVYHPDGRKWQPVISSVELKKYTITPLGFVYQVKSEQMQKTKGK

SEQ ID NO: 8956 - protein, 1339 aa, unidentified
  REGION 1..1339: note = Description of Unknown: Cas Enzyme sequence
MAKILGLDLGTNSIGWAMVDDKKKIILKTGVGTFQEGVEVSDSGTEESLNVQRRNARQIRRQLFRKDFRKDLIIKVLLAHKMFPNFELAVTPDKLNGVISAALIFYPLTERESKLYNFDRIKDQNAKLLKLIKLILQKGFHKINGTPEPLKTVIVSILNFVKLNPYELRQKGLVKPLSLIEFGRVLYHFAQRRGFKSSRIVDDTTTEQEEKRIKQDERSTKKKSINDLQQRINESGLKTLGNYFAHQDPYELFENGKRPIRTQETSRKMFADEFDELWNVQTKNKSTYHPELNNIFLKRTKIFNKGNKRKEIRKDFKISLKDYLSAINNTEHYFTGVLFYQRPLKSQKHLVGKCPFEANKSRCPISHPVFEKFRALSQINNISITENGNTRKLSNLERDKLLILFNQQEHISVSTIKKTLELDKSTKVTGSTEDDNLEKKNSNNENPKAAFIGNYTTKKIIELFGEGRWNSFSQEQQNDIWHCFYFFDESEKLNTKLEKTYQLKTGLEEIAKIKLKSGYGSLSIMAMRKIIPFLESGLQYTYAVFLANLKEVFKGSKYLKDISIVEKEIVRIIDDYHEEKEQQTSYERIVPIYDRIFEFLKDNFQLDGNKIDKLWHPSKIQRFPISPDKLSDFNFKELRNPIVTQAMFALKATINTIWKDKELGKPDIIRIELARELNNKNKRIAIRKWQNKLKYQNEQYRTEIEDIQQKYNKKIKYFAITGEVIEKYRLWKELQELNGTAVCPYTNKSISVTDLFGEHPRFDVEHTIPRSRSMDDSQTNKTLCDIDYNRKIKKAKIPFELDDYSEILKRVEGWNIKAYNLRERIEKLKQETKFIQSPDLRDRKIQERHLLQFEHDYIYGKYKRFATETVRDPEDETFLNSQRVDTGYITKIAASYLKATFGDNNVEVVKGKATAMLRSEWDLRKKDRSLYLHHAEDAVIVALTSRENYKHLATHIKSGASSKNRKILSPPWETFKKDVQTALANTLIYHKQRDRIITTYNKTIQQKGRLQIVKSVSPRGELHKDTMFGKVKFQTNAIKRGKILTDTKEFYTNRTAIADLTLADFTKERIPRTLKKKGSSTPYTKEDIEKGIAIQKVTLIKSGNKYRKPVKELLFSDIANISGSPRTIIKKRLADLKIELNESDSKLPKEFYNDPIFMPIKRLRTHNSFPSRLREIRDGVYVNLRNNHHIAIYRSAITGELYKDVVPFIDVVPTELNNLKNKEHNIPIIKPVLENGDKLVTYLKIDDMFVLGISDDDFENKLKSPSLLSDYLYRVQKLSGGDYYMELCFRKHIDARMDKEAKKDYIYIKGFGDGKTGWQTYNPIKVKITLTGKIEVKKE

SEQ ID NO: 8957 - protein, 1520 aa, unidentified
  REGION 1..1520: note = Description of Unknown: Cas Enzyme sequence
MKKILGLDLGTNSIGWALVDVDEKKIEGIGSRIIPMSQDVLGKFDSGSSISQTAERTGYRGVRRLRERHLLRRERLHRVLHVMGFLPKHYEQYIDFENRLGKFLTDTEPKLVWKETENGNFEFIFKKSFNEMVKDFKVTQPLLFEDNKLIPYDWTIYFLRKKALQYQIEKEELAWLLLNFNQKRGYYQLRGEEEEENPNKLVEFHALKIIDVTADEPQKGKLEIWYNLILENGWIYRRSSKTSLEDWKGKTKEFIVTTDLNDDGSVKTDKEGKERRSFRAPSEDDWTLLKKKTETDINSSHKTVGTYIYDTLLQNPKQKINGKLVRTIERQFYKCELKAILEKQKEFHSELNDNSLFSVCVEELYPNNDTHRNTLLSTDFTKLFVDDIIFYQRPLKSKKSLISNCKFEYRTYKNSDGILQKEPLKSAPKSHPLYQELRLWKFVKDLKIYEREKNINGKLFADYNVTGEFIKSEDDLVALFDWLNDRKEIKQDTLLSSFFKVKKKKGEEKLSFRWNYVEDKEYPCNVTHAQIINRFSKIKSAPADFLTLDAEMKLWHILYSVSDKLEIEKALNTYARKNKLPAEFVDIFKKFPPFRSEYGAYSEKALKKLLPIIRMGKYWNYDAINTQTQERIAKLISGEFDDSIKNQVREKAIDLSEPIHFKGLPESLAAYVVYNRHSEAGEYIKWKTYHDLEKYLEEFKQHSLRNPIVEQVITETLRVVRDIWKKYGDISEIHVELGREMKNPADKRAEMTKRVTENENTNLRIKALLAELANDNEVENVRPYSPSQQEILKIYEDGVIKSDIELPDDISKISKQSQPTKSELIRYKLWLEQKYRSPYTGEIIPLGKLFTSAYQIEHIIPQSRYFDDSLSNKVICESEVNELKDNALGYEFISNFHGQKVELNFGRTVEIFSVDGYETFIKKHYANNPGKKKKLLMEDIPEAFIERQLNDTRYISKVVKGLLSNIVREENEEESTSKHVISTSGNITDTLKKDWGLNDVWNKIITPRFVRMNELTQSNLFGQWENKDGKQVFQTQVPLDLQKGFNKKRIDHRHHAMDALVIACATRSHVNYLNNESAKADAKESRYDLKHKLCFKAKMDEKGNYKWQFIKPWDIFTVDAQNALENIVVSFKQNLRVINKSVNYYQHIVDGVRVIDKQVKGDNWAIRKPLHKETVAGQVNLRFKKQVNLSVAIDQWEMLVDKSLKTKVKQLISEGLDKKKIQRFFAANENKWQEKDISKPEIYYFSNEKDILVASRTSLNESFNLKTIDSITDTGIQKILRSHLAKYNEEKDGNMIEHPELAFSAEGIEDMNKNIKDLNGGKAHQSILKVRTYEPKGNKFNVGITGNKKSKFVVAATGTNLYFAIYSDIEGKRSYETIPLNVVIERLKQGCGPVEKEKSDENGNVFSLMFFINPNDIIYVPTSEQIESGMKLSINDIDKNRIYKFVDSSDTTANFVPIFSAMPLFNISKKEQEKRGLSFSIQNEFGIGSPQSKNQKALTGEMVKEVCVKLNIDRLGNISI

SEQ ID NO: 8958 - protein, 1046 aa, unidentified
  REGION 1..1046: note = Description of Unknown: Cas Enzyme sequence
MAKTLGLDLGTNSIGWAIRNSDAEVNQIEKYGVAIFEKGVGSEKGAEFSYAAKRTQKRSVRRLYQARKYRLWETLEVLINFGYCPMTMDQLDSWRKYDKINKRKYPDITEFEQWIRLDFNNDGKSDFSSPYQLRALLVDQKFDLNILRNKYMLGRAFYHIAQRRGFKSSRKDAVTDESGERKDAKSEIKKDNEFSNSFINKYGKNLSDFSTIGSALAFIENQGDRVRLEWLQHTFRKHYRDEIIKIFEFQGIDTSSDFFTKLVEKSKNKYNGAIFYQRPLRSQKGLVGNCTIEKDKPRCPMSHPAFETFRAWSFLNNIEYRPIGEAKTPLQQISLELRKDIYNEKFIGRIKPDFLFIEIIDFIKKRGHLWELNYKEKTHISACPISARLSDIFGEDWENIKIPKEIRKDSKVQKNYYNIEDMWHVLFSFDDDESVKEFAIEKLKLSEDKTKKFVSAWKALPEGYSMLSLNVIKKINKFLLKGYIYTEAVLLANVPDILGEELFGENEELITTSLKKVMDENRKEKQLFNIVNTLISKYKSLPYENRFGYKDLTYKLQESDKTEILKTTKEAFGEKTWEKKEQTEQTIILDKIAILYQQFFESSKREYFQLPKLADSLKGFIYNHFPELSSEKLDKLYHPSMIDIYPASERNDDGKFYLQSPKTGAFKNPMAMRTLFVLRNQVNYLIKTGQIDEETRIVVELSRELNNANMRKAIEIYQRQRQAENIEFAEAIRGLLQSETNQNIVANADSDDDIDKMRLWFEQINLNTYGTGKGEYAQNKWDKQGNDLFTSLAQAKTAIEKYRLWKEQKCTCMYTGRLISITDLFDENKIDFEHTIPRSISMDNSLENLTVCYAKYNRYVKKNQIPTQLPNYETSATIDGETYTAIKPRLKDWQDKIDHIKINIEFWKGKSKAATTKDFKDDAIRQKHLWNMELEYWQKKLSRFTMTEITTGFKNSQLTDTQLISKYAFHYLKSVFGKVELQKGAHTAEFRKIYGIQPKDEKKDRTKHSHHAVDAAVLTLIPYSKNREEILHKTFVQSERYKLGFE

SEQ ID NO: 8959 - protein, 1199 aa, unidentified
  REGION 1..1199: note = Description of Unknown: Cas Enzyme sequence
MASKQNNFGALTFGLDIGIASVGWAVLGENRIIDLGVRCFDKAETAKEGESLNLARRTARLLRRRLRRRAWRLTKLARTLKREGVIGDANLFKHSPEKGTPAAHPWQLRADALNRKLEAEEWARVIYHLVKHRGFHWISKAEEKAAENDNEGGKVKKGLADTKKLMDAKKYRTAAEMVLKEFPDAQRNKHGDYSKALSRVLLADELKILFEHQRKFGNPHASAELEAAILGNGDKKSGLFWKQEPALSGGALLKMLGKCTFEKSEYRAPKASFTAERHVWLTRLNNLRIVVDGKTRPLTDEERRIALPLPYETGELKYGKLHKALVKVGLSDEFRFAGLAYPSERQRTEEKAKDPEDEKLAKLPGWQELRKTLKDAGQEDDWQQISTDALEGKPQLLDEIARVLTVYKEDEEVERELSKLDLPNKEKMVKALSFIRFDKFSNLSLKALYNILPHMEAGLRYDEACVKAGYHHSQLHKVGTGEHKYLPPFYSGREKDGRMKFDEDMDIPRNPVVMRALNQARKVVNALIRVYGSPHEVHIEMARDLTRPLKGHWTENGKYIEGRQDIQKMQEEYREKNDGDWKEFVRNAASMGLREPPDRDRHGKDFAKWQLYREQQGKCAYSIEPFEIYRLLERGYAEIDHALPRSRSFDNSKNNKVLVHIKENQDKGNRTAYEYLTSFSGGENGERWRQFVAFVESNKSYRQAKRSRLLRKNFGEKESREFRERNLNDTRYICRFFKNYVEQYLQLHEDSEAKRCVVLSGQMTSFLRARWGLVKVRSDSDRHHALDAAVVAACSHGMVKRLSDYSRRKELDQVREGFVDVDTGEIVNPAMFQQMNEHFPDPWPYFRDELKARLSIDDPALLRAEMERLGTYLPEALEALRPLFVSRAPQRRNSGAAHMDTIYTKPRDGHVLMIEDKEAKKLVKNKVEKILRPATTEEKASMAIARIGVTDKDSKGNYKLTLEKLDDIVDPRRNGRMIEALRHWIASREAREKAAKVIEASFGRGKEKRKPTDAENAELERLRALPRKPLQDDPDSGPFTGPIIRAVKVNTGKTTGISVRNGIAANDTMLRVDVFTKAGKFHLVPVYVHHSVAKALPNKAVVSKKDESRWTVMDDSYAFHLSLYPNDLLQLKIDGESILGYFAGININDGGLKYFPHDQRGADSLRKRGISGAELFTKLNVDVLGNRYPAPPEKRRDLA

SEQ ID NO: 8960 - protein, 1365 aa, unidentified
  REGION 1..1365: note = Description of Unknown: Cas Enzyme sequence
MNLRNIPSYNVGLDIGTGSVGWAVTDENGNLCHFKNRPTWGSRIFPSANTAAETRLKRGQRRRYDRRRQRLDLLQSLFDEEMTKVDPEFFIRLRQSKLRVEDREEGHREYRYPFFNSSDFTERMYYKSYPTIYHLRKHLIESDQQEDLRLIYLAFHNIVKTRGNFLYQDTPSLSAKDASMSEAIEELLNALVLWADAAYDFEIDEVDSEKLRKVFEDSSLTRAEKKDEALKVLTLEDKKIAKELINAVLGYKANFNTIFKIEAEKSAFSFDNDEQKEAFIASVPDEGMALYEALQKAYSAYILMDIIEDANGKSVSYSMVAKYNKYGEDLKTLKDLVKEYCSTKYSEFFRGEHYDAPYQKDYDKSKAKGYTKYNEVRGAKYDDFKKEVENLFKDTAAISDSRYREMMTKFANGKFLRRLKTSDNGSIPFQLHLEEMNAIIDAQEKFYPFLSEIRHKLNSLVTFRIPYYVGPLTQKGAALDASGKPRFAWSKRQEGKEGDKIYPWNWEEIIDKGASAREFIQRMTGTCTYLYGEPVLPKCSLLYEKFCVLNELNGARWSQDNDKWYRFDAEDRLSIYEELFERYKSVSFKKLEDWLKQRGEAFPHVKGGQGEGKFESKLSSHHFFKELLGTDEWSDQTKQMIEELILWNTLFEDKKILKEETTKKYGDVLTAEQIKKFCGHRFTGWGRLSKKLLTGIKTEVDFRKMSVMDLLVEGDPYGEHVGSSLILMEILHNKNFEFNKEIEAHNEKYFSKDQSVEDLPGSPAVRRSVNQALRIVEEIAKIAGKPAAHIYIESTRDEDEEKRGKRTSKRNENIKKMLSEIKDEYKNADIFKQLAEHSDGQLGKRLSLYFMQNGKSMYSGKAIDIRRISDNTYCQIDHVLPQSYIKDDSFENTVLVLSDENQRKGDSLLLDADVRRKMADLWHELHRVKLIGDKKYKNLTRSVVTDRQMEGFINRQLVETSQIVKFVRMLLKSQYPDTEICSIKASLSHEIREKYNLPKIREVNDYHHAHDAFLACEMGRFLSIRYEEAFTNPVGLTKLMRKFVKKESEEAQKQHRIPGTTPFFVASFSKPGFDLETGEVTRDEWNPIEEVEKIRRTFDFKDCYISRMPEMTNGTFWDETIYSPKGKVKTLIETKKNLSVEKYGGYSGENSAFFFIYKSKGESEHLNFAPFPLSLATRKDDIYHLIETYAVDLCREAKETFTGIIIPQIYKYQKIEWNGQQFYITGKQEIRSAASIFFSQQDQLCLIKYDSNSSSVGEEMLEVFERFSQRAYKQSEKLYKQLKLEDSRQVICDLSNQQVYEIICGLASIFNGKINMLNLSMIGGSKYSGCMRPSISSEINKKENAFFVIDQSVTGMFERRRRIGL

SEQ ID NO: 8961 - protein, 1129 aa, unidentified
  REGION 1..1129: note = Description of Unknown: Cas Enzyme sequence
LGLDIGTNSCGWSVINLDKKRIEDLGVRIFNEAEHPKTGQSLATPRREKRGMRKRLHRRRIRLNFLKQFFIQQKILSSQQIESLLAPHKNQIDPYIVREKALSEKLAPEELFVALYHISKRRGYKSNSRTESSSDTSENKKTLSAIAANQEFLKEYRTVAEALNHAEKFKAHKRNKPDDYSNSFARVDFENEITRIISKQAEFYPFLNEDSIKDLLYRPNFGVFFQRRFLTPKQIEEMRGKCQFEKDKPRAQRASYSFELFRLASDLVHLTYNMGNKLTIDEIAACIEKAKELSVLKYSHIQKILAENMSDEINFDYVRGLKRKDLLKDEAEAKKKALEQKFGELKFYNAIKKALKDQPAEWKDIESNIELFDNIGFVLTANKEDDSVREELEKLGLNPSVIDGISNIKQSFAGFCHLSLEALRKITPFIVQGETYDKAVLNAGYVFTAKLSGDMNRLPALSKEENSQITNPVVKRAISQSIKVVNAIILKYGAPTRIHVECASELAKSFEKRNEIIKTQDENRENNEKIIARLKDEFHILSPTALQVTKFKLYEQQDGKCLYSGYPIDLNRLFSDEHYCEIDHIIPKSRCGNDSMINKALVFNQENQEKRDQTPFEAWGSDEKRWQSFVARVESNPKIFVKKRARLLAKTPPKEDWNARALNDTRYITRFLSNYFKQNLKFADYTEGKKVVYTPTGNITSYLRHVWHIGKKDRSKNLHHAVDAVITALVTDEVVRQCALMNKMIELGAKYKTKGINLADYQNGMLAATDPVTGEIVDLAKYEEVCESVLPWPNFDHEVRFRAAPLACFMTEDKEDKKKTETGQLSEEAKAHLQNASINTLAEWRDQFREVYKDQDEKFKNSIHPIFVSRMPKRKGTGSLHDDTFRSPKGILIDQKTGIISANPNRSSFIRKKIQDIKLADLENSILKQSDAVLYQQLKSLLEANGDDPKKAFKEPVYKNNVKVDKNGRSLSPVTTIKINDDKNVKSGILLNRGTQFANNSPGSMVRLDVYQKEIKGNKKLFYVPVYTHQVRRGLNRILPTTCGYDFVDGTFKKLFSLYPNDYLIMKKGDEIFQGYYIGFDTDSARISYVSNLLSGNSVFNRVPGRSLIELHRLDVSVLGDNYPWERLY

SEQ ID NO: 8962 - protein, 1365 aa, unidentified
  REGION 1..1365: note = Description of Unknown: Cas Enzyme sequence
MNLRNIPSYNVGLDIGTGSVGWAVTDENGNLCHFKNRPTWGSRIFPSANTAAETRLKRGQRRRYDRRRQRLDLLQSLFDEEMIKVDPEFFIRLRQSKLRVEDREEGHREYRYPFFNSSDFTERMYYKAYPTIYHLRKHLIEFNQQEDLRLIYLAFHNIVKTRGNFLYQDTPSLSAKDASMSEAIEELLNALVLWADAAYDFEIDEVDSEKLRKVFEDTSLTRAEKKDEALKILTLEEKKIAEELIKAVLGYEANFNIIFKIEAEKFKFSFDNDEKKEAFISSVPDEGMALYEALQKAYSAYILMDIIEDANGKSVSYSMVAKYNKYGEDLKTLKDLVKEYCSTKYSEFFRGEHYDAPYQKDYDKSKAKGYTKYNEVRGAKYDDFKKEVENLFKDTAAISDSRYREMMTKFANGKFLRRLKTSDNGSIPFQLHLEEMNAIIDAQEKFYPFLSEIRHKLNSLVTFRIPYYVGPLTQKGAALDASGKPRFAWSKRQEGKEGDKIYPWNWEEIIDKGASAREFIQRMTGTCTYLYGEPVLPKCSLLYEKFCVLNELNGARWSQDNDKWYRFDAEDRLSIYEELFERYKSVSFKKLEDWLKQRGEAFPHVKGGQGEGKFESKLSSHHFFKELLGTDEWSDQTKQMIEELILWNTLFEDKKILKEETTKKYGDVLTAEQIKKFCGHRFTGWGRLSKKLLTGIKTEVDFRKMSVMDLLVEGDPYGEHVGSSLILMEILHNKNFEFNKEIEAHNEKYFSKDQLVEDLPGSPAVRRSVNQALRIVEEIAKIAGKPAAHIYIESTRDEDEKKRGKRTTKRNENIRKMLSELKEEYKNADIFTQLAKHSDEQLSKRLSLYFMQNGKSMYSGKAIDINRIADNTYCQIDHVLPQSYIKDDSFENTVLVLSEENQRKGDSLLLDADIRRKMAGIWHELHRVKLIGDKKYKNLTRSVVTDRQMEGFINRQLVETSQIVKFVRMLLKSQYSDTEICSIKASLSHEIREKYNLPKIREVNDYHHAHDAFLACEMGRFLSIRYEEAFTNPVGLTKLVRKFVKKESEEAQKQHRIPGTTPFLVASFSKPGFDLETGEVTRDEWNPIEEVEKIKKTFDFKDCFISRMPEMTSGTFWDETVYSPKGKVKTLIETKKNLSVEKYGGYSGENSAFFFIYKSKGESEHLNFAPFPLSLATREDDVHQLIESYAVELCREAKEIFTGIVIPQIYKYQKIEWNGQQFYLTGKKEIRSAVSVFFSQDEMSKLISHQNDISLENGEMVEILDNFLLRAQKRSEKLYKQLKIDENKGKVVELSSSQIYELLCGLTSIFNGKINMLNLSSIGGSKYAGCIQPAINKEINKKENTFYVIDQSVTGMFERRRRIGL

SEQ ID NO: 8963 - protein, 1233 aa, unidentified
  REGION 1..1233: note = Description of Unknown: Cas Enzyme sequence
MTKIFLLFLRKNYNLMMKKRILGLDTGTNSLGWAVVDCDEYSNYELVKYGDLIFQEGVKIEKGIESSKASERTGHRSLRKQYFRRRLRKIEVLKVLVKHGLCPYLSEEQLHNWHVRKVYPKTDDFMLWQRTNDNEDKNPYYYRHLSLHTKFNLDRQDERFMLGRALYHLAQRRGFLSNRLDSTPENDNGKVHKCISNLSHEMELAGCEYLGDYFYQIYSNPDNHERIRTRYTDREEHYKKEFQAICEMQQLSPEMVRELEKALYFQRPLKSQRQGVGKCTFEPRCPRCADSHPDFEEFRMLCLLNSIKIQTPYDLELRPLNEEEKEKIVSLFYRTSKPNFDFEDIAKALAGKGTYKYYKDEGGKPYKFNYRMTQGVAACATTGKLRKIFGENWKEAIAETYRLANTRKGQKTVAQMVDDVWNVLSTFESEDKLKHWAQLNLQLDEDQSKRFAAINLSHGFASLSLKAIHKILPFLRQGYIYSHAVMLANIPAIVGEEVWNDADKRSFILNHVLTYLQSEDQTTKDFCIKDFLLNNYNLKPGAVDKLYHPSMIETYQDAKQQGDVYQLGSPRTNAIRNPMAMRSLHEVRKVVNQLLKEKIIDQNTEVHVEYARGLNDANMRKAIADYQRAQDKKHKTDADSIKDLYFRETGNNIEPTETDIKKFELWEEQSHKCLYTGAEIGIADFLGDNPKYDIEHTIPRSSGGDSTMENLTLCDSNFNRNVKKTQLPAQLANHEEILTRIEGWKKRYETLTSQMDKCRTFSGMAKDIKDSVIQKRHKLKMERDYWKGKYERFTMTEVPDGFSRRQGAGIGLVSKYAGLYLKSLFHDPHDRSKSRVFTVKGTTTAEFRRMWGLQNEYEKKSRDNHCHHCIDAITIACIGKQQYEAVAKFYRDEALYDDGRGKKPQFRKPWPTFTEDVLSLERTLLVVHETPDNMPKKARKYVKTNRGEFLAKGDCARGSLHNDTYYGAIERDGKIRYVVRKPLASFEKESDIDNIVDDTVKEIVREAVRGKNFKEAISQPVYMNKEKGILIKKVRCYARRMVNPLNIRQHRDTSSKDYKQTFHVANDTNYCMAIYEGLIKNKVKQDFELVKTIEAATYFKGSTCRTDYPDLVPVKSKRALPFKTMLKIGTMVLLYEETPAEIDFSDKTDLARRLYKVTGFSYLPIGGNIYGVISLRHHQEARQSKDIKSKNGVYKMREEYRPAITLLHTQFRALVKGIDFHINVLGEVELINR

SEQ ID NO: 8964 - protein, 1100 aa, unidentified
  REGION 1..1100: note = Description of Unknown: Cas Enzyme sequence
ARRRYTRRRNRILYLQEIFSTEMATLDDAFFQRLDDSFLVPDDKRDSKYPIFGNLVEEKAYHDEFPTIYHLRKHLADSKEKTDLRLIYLALAHMIKYRGHFLYEESFDIKNNDIQKIFSEFISIYDNTFEGSSLSGQNAQVEAIFTDKISKSAKRERILKLFAYEKSTDLFSEFLKLIVGNQADFKKHFDLEEKAPLQFSKDTYDEDLENLLGQIGDDFADLFLVAKKLYDAILLSGILTVTDSSTKAPLSASMIERYENHQKDLAALKQFIQNNLQEKYDEVFSDQSKDGYARYINGKTTQEAFYKYIKNLLSKFEGSDYFLDKIEREDFLRKQRTFDNGSIPHQIHLQEMNAIIRRQGEHYPFLKEYKEKIETILTFRIPYYVGPLARGNRNFAWLTRNSDQAIRPWNFEEIVDQASSAEEFINKMTNYDLYLPEEKVLPKHSLLYETFAVYNELTKVKFIAEGLRDYQFLDSGQKKQIVNQLFKEKRKVTEKDIIQYLHNVDGYDGIELKGIEKQFNASLSTYHDLLKIIKDKEFMDDPKNEEILENIVHTLTIFEDREMIKQRLAQYASIFDKKVIKALTRRHYTGWGKLSAKLINGICDKKTGKTILDYLIDDGYSNRNFMQLINDDGLSFKDIIQKAQVVGKTNDVKQVVQELPGSPAIKKGILQSIKLVDELVKVMGHAPESIVIEIARENQTTARGKKNSQQRYKRIEDALKNLAPGLDSNILKEHPTDNIQLQNDRLFLYYLQNGKDMYTGEALDINQLSSYDIDHIVPQAFIKDDSLDNRVLTSSKDNRGKSDNVPSLEVVQKRKAFWQQLLDSKLISEHKFNNLTKAERGGLDERDKVGFIRRQLVETRQITKHVAQILDARFNTEVNEKDKKNRTVKIITLKSNLVSNFRKEFKLYKVREINDYHHAHDAYLNAVVAKAILKKYPKLEPEFVYGDYQKYDIKRYISRSKDPKEVEKATEKYFFYSNLLNFFKEEVHYADGTIVKRENIEYSKDTGEIAWNKEKDFATIKKVLSLPQVNIVKKTEIQTHGLDRGKPRGLFNSNPSPKPSEDRKENLVPIKQGLDPRKYGGYAGISNSYAVLVKGIIEKG

SEQ ID NO: 8965 - protein, 1190 aa, unidentified
  REGION 1..1190: note = Description of Unknown: Cas Enzyme sequence
DGPYDVRLVFLAVHHIIKNRGHFLFDSLGEAQNFGSIYGAFRDYLQEEYECAVECTDEKAFGAVLKDKSLSKSRKTAAAAELFGVTKKSAPQLYACLALACGATVKLKDLFNDDTLVEAEKPSIAFTGSYEDNEPEYQSLLEERFDLVVRIKALYDWAILDEILAGHQYLCEAKVATYEQHKTDLQRLKIYVKTYRSELYKKIFKLSSKNDNYVAYSGHIKENGHTGVLEKICNQEAFCAYLKKTLGDNGDPAYADMFAAIENGTFMPKQVSKDNGVIPMQLQKKELEGILNRAQRYLPFLTEKDETGLTVREKIISLCEHRIPYYVGPLNKHSKKAWIVRKEEKIYPWNFDQVVDLDRSAEAFIENLTSKCTYLPQYDVIPKYSLLYTKFMVLNELNNLTLDGQRVEVKLKQEIYRDLFEKRGKVTGKGLKNYLQSRGIAYEVMGGFDENFKASLKPWQDLAPYDLTYDEKEEVVRLITIFGDDKKLLKKRLRDLFGDRLTETERGKLARLKYTGWSRLSREFLTQVAGTDKNTGEVTNIISALWDTNLNLMQLLYSADYMPTFGEQVAACNQFDKDVSLRQMVEDLYVSPKVKRPIYQSLLIAREIEKIQKCPPKKIFIEVARGEEKKERKKSRKAQLLELYQSCKKEYADLYAQLEGTEEDRLRSDKLYLYYTQMGRCMYTGEHIDLNSLLSGNVYDIDHIFPRSKVKDDSLNNRVLVKKVDNAKKTDVYPLDRETQAKMHGFWQLLLSKNLISKVKYQRLIRTTPLTDEELGAFISRQLVETRQSTKAVAKIMEQLYDKEQTEIVYVKAALASDFRHTYDMLKCREVNDFHHAKDAYLNVVVGNVYNVRCTHNLRNFIRGLQENGPRGYSMNAMFKWDIPGAWVAENGELQKTQTKSLEIVKQMMAKNNIRYTRYAFCQHGGLFDQMPVKKGKGQIPLKQDGPKSDMTKYGAYNKAMSKYFALISYLDKKGKEVRQLVPIDAVTEKVYLADPDEYVSNCVGVPAKVLIPCIKYNACLSFDGFRMHLSSKSGNQLGYKPAMQLVLSYEQEKYVRNITKYLSQNKDRPLNKYDGITPDKNIALFDTLVDKMSNSILSLRFGDMGAKIVDKREAFCVLTPEEQCVVLAEVLKILHANVMRGDLTNIKLAKTAGALVSNMKLSEIKGVTSIKLIHQSITGLFEQQVELLP

SEQ ID NO: 8966 - protein, 1172 aa, unidentified
  REGION 1..1172: note = Description of Unknown: Cas Enzyme sequence
MNYKLKNHEFDLQLSFDVGHSSIGWAVLEAQNHQAPTMLGCGSVVFQADDCLASERRGFRRQRRHIRATRLRIARMRRLFEHLGVLTKDALESPGCAWPWLLAARVLRGGEKLSWSELWDVLRWYAHNRGYDGNKGWSKHDVVSAEDSDKEKRAGELLTGFQKKYGRAGTMAEVFCDVLKIDPLGPLKSSMLRVRNLGAAFPREGVEAEVEQILRAHIGVLAQLDDRLINTLMRDFTALPGPDFRLPARYGQRLSDGSLSPGGLLFGQLVPRFDNRIIASCPITFERVYQAVKTETGDEKQAKEEAEKQAKVPSVDCIEFYRFRWAMELAKIKIATSDPRAPRNLTVAERKAVNAEMEKHGYLTPGALKKFVRALTGDALDNLNQILTHPDAERALVLDPVRRYIHSDQLVSALWPVLSNQLQKRLVGQWRRGHSITVAKLLDECGGNRAVAEAVCEKHLDEQNTKKRKKDEPLTREAMLRNPLSVELPKGRAPHTRRVMREVVEFIFSTDRHPAEEGGPLYRSEAIRHAQLKRALDEQTNNHLVRHRLKILERLHADLLKEYAGDNPARITRINIEVNRDLREMSGKSVQEQAKLLGQQLANFKSVAKKLTEAYEGLGVHVGPGLIRKGRIAEDLHWTCPYTGKLYDALDLLHRRVDKDHIIPRSDRASDSLDSLVITFSEINKMKGKRTAVRFVEEFQGKPVEGLPQLMIKPLATYLKDMAALNTFAPHADDERRKKNRKRLLLLRDYVEKKFTPGDLTQTSQLVRLGAQALQKHYVGMEKQPAIVSLPGSVTGAVRKSWNLVGCLAAANPLVLNPDELDEDGRPKVRTKTEIRGITHLHHALDACVLGFASCFLPRDGGAWELLIKRRLNEAEQSRAKIIFGSQVEITKDGELRLADLAPALKAQICERLKERRVVQHLPADVSGLRCKETVWRVFDPADTHRNLQRLARWLKQKEVAIPAPDAKTALIICRKRRAADVSSEESAGGKVFRETKTWRWVYDIKDKSALLGLAPEGDVSAAKLKRIKAVKVLGDNFGLALDPEPTLIRPHKVWHQLETLRQRNAGKIPRLLRIGTIIRVKEKSPRSDYRGTWMVRGMSFKQRDGLVLEIAPADYVPSRRVQGVFESASVATIMKCKLEVVKVPLCGVAPCTELASHIISETKACPTTSSV

SEQ ID NO: 8967 - protein, 1053 aa, unidentified
  REGION 1..1053: note = Description of Unknown: Cas Enzyme sequence
MPRLKTSDLVLGLDIGTNSIGWALLREDGDDKPCEIVHAGVRIFEAGVEGMEKDGRGDPRNKTRRDARGVRRRLERRARRKSVLFHRLQKVGLLPPTPEHLDPLIDPRKPNRAQERHSVIQPLDRKLLSEWPERFGEEADPALLPYMLRARALDDKLERHELGRALYHLAQRRGFKSNRKADRDEKDEGVVKEGISDLHKRMKETGARTLGEFFAKRDPHLRRIRQQWTARAMFEDEFEQIWRAQVPHHPDLLSDDLKKTIIDATFKQRPLKSQKHLIGKCELEKDRHRAPWCCLDAQRFRFLQRVNDLEIYMEGEIPRPLTQDEREAVIALLESKASATFRQIAKVIGQRKAHFNLEHGGEKSLPGNKTASHMRKVFGDRWNHFSHGEQSAIIDDLHSIEKPETATKRGIEAYGLDEETAGVFSVLRLEEGYCNFSRKALRRLLPELEKGMRLQAAIKQIYNVQQEVKDPLDMLPPLQDVLTELRNPVVARALSELRKVVNAIVRKYGKPKRIRIELARDVRNSPKRRQDIIKRNRDNEKVREKATAILVDYGIGNPSRNDVMKYLLAEESRWLCPYTGKQISMDALFGPNPQFDIEHIIPYERSLDNSYMNKTLCELHENRHVKQGRTPYETYASNTETWSAILTRISGISGLPRGKVWRFTMDDDEIERFLEDFTHQQLTDTAYASRLAAQYLGCLYGGDIDADRKRRIHVVNGRATWIIRNELDLNAILGDGGLKSRNDHRHHAVDAIVIAMTTPGMIKNLSRAAQAAAKSGIRTYGLVEKPWDTFWRDANIAIEDIIVSHRVDHRVQGGLHEESFYSPSRNEDGVIEDGGKYVHIRKPLVSLTGKDIDNIVDPVVRELVREAADGVAPSKVFSDAAKMPAYPGGNDKPRTIKKVRIRKAQSTLKMGSGGGARYVAAGSNHHIEILEAKDGRGNPKWEGVVVSRHEAMQRKRRGEQIVQRDHGADRRFVFSLCGGDILELTNDENKELFKVRKISEYATGQRVISGVPLNDARKVKDLSFLHKTPDPLRKMCCRKVCVDPLGEVRYAND

SEQ ID NO: 8968 - protein, 1076 aa, unidentified
  REGION 1..1076: note = Description of Unknown: Cas Enzyme sequence
MRILGLDAGVASVGWALLEIENENFERPAQGRIVAAGVWMFDPAEERTRNGSQPKSVVRRAQRSQRRTLRRRRQRMNEVRRLLHRHGLLPAADRHALRLPGLDPWQLRARALGQALSPLEFAVALGHIARRRGFKSHLRPAAARGAEEGSKLIQALEETRAKLERFETPARLFCEDESFRLPGSAARRLRNRPGDYSRLQHRDDLAREVGAIFRAQRRLAAPHATRELETEFARAALSQRPLGDRFADLGPCPFEPDQRRASKHAYSFELFRLLARLAHMQIVEGGAPRRLTAAQIDLAAADFGQSAKFTYAELRRRLALSEETVFPGVAREAECEIDIVARDGAAVGAHALRREICAAADDAAWRALLLRPERLDDIAEALAFRRSMEARRAALARCGLPQELIEELLRAGARGVWDGFMGAAHVSAKAARRLIPHLGRGLAYPQACHAAGYDPESSRERRAFDVGAHGKEALRRILTQQRISEDLVASPTARKALIEAIKQVKAIVERFGAPDRIHVEMAREIGKSAEARRALERAAQRREAEAARLRRLFQETFGRAPHPGDAGAEDLLRFELWREQKGVCLYTGAPIDVAQILDHRDSVQVDHVLPRGRFGDDSFANKVLCLAAANRAKRDRTPAEWFAKEKPAQAWRDFVARVEALDLKRAKRRNLLLEAVEAAASKFDARNLSDTRRVCRLLSEALQQIYPESGARHVFARPGALTARLRRAYGLQLAKTTADGARRADDRHHALDAIIVAATTEATLQRATRAIQRADRYARGAHLGLPPPPWPGFRDDALRTLERVFVARSERRRARGKAHDATLLHVATRGDKPIVYERKTIADLKLADVDRIKDLDRNGALAASLRAWFEAGKPMDTPPRGPNGGAIRRIRLATSERVNLSISTGDPGRRASANRSEMARIDVFRKRGRDGAWRHHFTPIYRHEIVAKAPPTKIMRSGDESLWPTIDESYEFLWSLHPMSLVELTKPDGETIRGYFRNLDRSTGALTLCDIADARVLRRGIGARKLLRFRKLQVDRLGVFSVVEREPRLWRGRVWSNEAMGEPETARDSSRGDERK

SEQ ID NO: 8969 - protein, 1156 aa, unidentified
  REGION 1..1156: note = Description of Unknown: Cas Enzyme sequence
VTDRKSRPWRLGLDLGTNSLGWCVFDLKKGDDGRQHPAGIRRMGVRIFTDGRDPQSGASLAQERRGPRGARRRRDRYLDRRADLLKALIRHGLMPADPAARKKLEDLDPWRQRGEGLDRPLSLHELGRAIFHLNQRRGFKSNRKAERGRDDKEAKDAQDMKAAAKKLDAAIGPGHKDARTLGEYLYKKHRATFDGAAWQPTTPAKAGTVRSRPTTVKGRNTYEFYPLRSMIGAEFDALWAAQAAHHPELTDAVRDELRDIVFYQRPLRPVDPGPCTLDPEEDLDKRDRRAPLALPIQQDFRILQELANLRLAHKTNPTISRRLTLAERDAVYAALKRSEKVTFKRIRILLKIEDIWSFNLESEKRDHLKGDIVSVRLARDGVFGKRWYDGLGDVERQTIVQKLLDEEDPAEIVRIGVESWNLTPEEAEKAADTALPDGYGRIGLKALSKIVPIMKERADKDGGPIGFAEAVQAAGYLHHSDFRDGELLDELPYYGEALQRYTAQVRSESAPAWEREYGRLANPTVHIGLNQLRKLVNALIEKYGPPEEIVVELARDLKRSQEEREEVQRQQSENQKRNDLRREALDDMQKSQPGWKPPRDAMLRLRLWEELDVTNVANRRCVYTGKPISRRMLFSDEVEIEHILPFTQSLDDSPANLTVSMRAANRDKKNRTPSEAFGHSPDGYDWDAIMLRVSALPRNKQWRFRPDALDLVKSRIARENARLEGALPKDALDDIEKAGGFLARQLVDTAYLSRLTRQYLWKVCDPNKTWVIPGQMTALLRRKWGLNSLLGDHNKKNRADHRHHAIDAYVVGLTDRSMLQEIQKAQGVNRERIVDDMPDPFEDRADGYRDELKAALGRIVVSHRPDHGIDPKADPARRASTSGKLHEETAYALVKDAEKEGGNVAARKPIDALSENEIDRIRDIGLRQKLKAHLAPILGDTSALENAKARLAEARKARDAKAVERAKTEIGRLKVESKNRKKAGAKDFKAALAEFGKASGIRRVRLVKPEAAIVVVRDRDGKPYKAYSAGDNLRVEIFERADGSWGREIVTAFDANRPDFQPVWSRIEPKPKLLWRVHKNDLVKLGVDGEERVMRVVSLWDKYLQLAGHEETNLAERYRDGEFKWTFGNYDKLKEQKFRRVTVGPFGELRDPAKTP

SEQ ID NO: 8970 - protein, 1173 aa, unidentified
  REGION 1..1173: note = Description of Unknown: Cas Enzyme sequence
IWNFQSSFYPNELNESNKEKIIGKTKAQTAAICYKELKWEAIELKGKMSEKKFQRYSLRSRATSEQLLLGELVEVFAEINGNIANSSGYLGAISDRSKELYFNKITIGQYLYYQIQENATTRLKGQVFYRQDYLDEFETIWETQASFHKLLTPTLKKEIRDIIIFYQRRLKSQKGLLSTCELESELKEIVQNGITKTKLIGPKVCPKSSPLFQEFKILSQLNNVEIFDEEGKNKIRPLTLEEINFLFEILNNSEKLTASEINKLLGFKDKYKYNFETFEGNKTRAAFINSGIKIAELSGNDEVEFGKLNGLQKLVTVKEIFKALEIDTTLFDFDSSKTGKELEQAPFYKLWHLIYSYEGDKSKSGIDSLIQLLNEKYGLEKQYAVVFANTVLQEDYSSLSTKAIQKILPYLKEGNKYSDAASLAGYNHSNATTKAENEKRVLKDRLTILTKNSLRNPVVEKIVNQMINVVNAIVDTYGKPDEIRIELARDLKKSSDERAQMTKSIGESSRKHEEITKILTSEFGIANPSRNDILRYKLFEELKDVGYKTLYSNQYIPREKLFSGDIDIEHIIPQSRLFDDSFSNKTLEFRAVNIKKSNSTALDFVSSEYGEDAKQQYIERVKQLFNKEGSRTKYKKLLWTEKDIPDNFINRDLADTRYITKKSKEILGELVRNVYTTTGVITDRLRNDWGLVDVLKELNLPKYQTLGMTEEIENRNGHTKVQIKDWTKRNDHRHHAMDAITVAFTKPSYIQYLNNLNARSDKSGAIYGIEQKELYRDDKNKLKFNPPMPLDIFRKQAKEHLEKTLISFKAKNKVTTKNKNTTTKKGGVNTKIVETPRGQLHLETIYGATKKYETKLEKVNAAMDVAIINTVANKKDREAVIHRLAEFENDPKKAFTGKNSLDKHPIYIDKLHTYAVPISVKTVWLENQYTIRKAISPELKIDKVIDAGVRKILDERLKAYNNDAKKAFSNLEENPIYLNKAKGITIKSVKITGVANAIALHTKKDQFGNELLNEDGVPIPTDFVNTGNNHHVAIYKDDEGNLHEEVVSFLEAVTRKNLGESVVRTTNELGARLVFTLKQNEFFVFPNEKTGFDPSTIDLLDEKNYELISPNLYRVQKIATKYYVFRHHLETLLLENNELKDFSWKRISSLPPLVGLIKVRINHLGQIVQVGEY

SEQ ID NO: 8971 - protein, 1101 aa, unidentified
  REGION 1..1101: note = Description of Unknown: Cas Enzyme sequence
MKKKNILGLDLGTNSIGWAWLQQDDTEQTIQTEYLLQNNPTIRMSGSRIIPTSGDVINDFEAGKAVSKTKDRTTFRMTRRMNERFKLRRERLNRVLRILGMLPAHYAQHVDRYGKPDEEKQPKIAWEVAPDGKSNFLFHQSFLEMVKLFGVHQPQLQRIPLDWTLYYLRHKALTQPISKAELAWILHSFNQKRGYNQTRDELTEVNEKEKLEYTNSKVVSVELIEQKKSPLYLVTFENGVAVETSKVDAPQWVGQMRYAIITTKLNDLGQPLHKKDGSIDQKVSLPNDDDWALNKLRTETQIDQSHTTVGNYIFQTLLKNPETKIKGAHVCTIDRRFYEDEINAILLKQAEFHPELTNRNLYEACLMALYANNEAHRYNLATQNTCNLITKDIIFYQRPLKSKKSLIAECPFEKRIFCDTEGNVQMQGIKCIPVSHPHFQEYRLWQFLNNLRIFQREVVEDGKFTMNVDVTDKYINENSLTLLFEWLQDKITIKQKELLAKLRLKESDFRWNYVEDKAYPCGETRHVLASRLKKLKGITNDFLAQPSLNGKTTVECELWHILYSVTNLAELRKALYTFARKHNFSVVDAEAFVKVFIACPPFKKDYGAYSDKAICKLLSVMRVGKYWSAENIDSTTLLRIEHLITGEEDEHINERTRKHITEKGLQQSVNQYQGLQQWLACYVVYGRHAEVAEIVRWESPTELEQYINNFKQYSLRNPIVEQVSLETLRVVRDLWQTVAKEGGRIDEIHLEMGRDLNNSAAERAKISNRNKQNEGTNFRIKLLLQEFSQYEKDIEGIRPYSPSQQELLRIYEEGVCEQTEMPKDIAKIRRELSSSSEKDVKRSDIQRYRLWLDQKYCSPYTGQPIPLARLFTTDYEIEHVIPRSKYFDDSYNNKVICEAAVNKAKSNRLGMAFIQESGGQIIPLGNGRNVQVLNESAYVEFINKTFKHNARKRSLMLADEITEEFCHRQLTDTRYIARFMMGVLSNIVRQNDNGVLESEAISKNLIVCNGKITDRVKQDWGLNDVWNHIVTPRFKRLNQITNSSDFGEWCNKEGKRYFQTRIPLELQKGVNKKRIDHRHHAMDAIAIACTTRNYSAVVRMV

SEQ ID NO: 8972 - protein, 1096 aa, unidentified
  REGION 1..1096: note = Description of Unknown: Cas Enzyme sequence
  MOD_RES 936..938: note = Any amino acid
ILYSIEDKQEIEKALHSFANKNNLSEEFIEQFKNFPPFKKEYGSYSAKAIKKLLPLMRMGKYWSIENIDNGTRIRINKIIDGEYDENIRERVRQKAINLTDITHFRALPLWLACYLVYDRHSEVKDIVKWKTPKDIDLYLKSFKQHSLRNPIVEQVITETLRTVRDIWQQVGHIDEIHIELGREMKNPADKRARMSQQMIKNENTNLRIKALLTEFLNPEFGIENVRPYSPSQQDLLRIYEEGVLNSILELPEDIGIILGKFNQTDTLKRPTRSEILRYKLWLEQKYRSPYTGEMIPLSKLFTPAYEIEHIIPQSRYFDDSLSNKVICESEINKLKDRSLGYEFIKNHHGEKVELAFDKPVEVLSVEAYEKLVHESYSHNRSKMKKLLMEDIPDQFIERQLNDSRYISKVVKSLLSNIVREENEQEAISKNVIPCTGGITDRLKKDWGINDVWNKIVLPRFIRLNELTESTRFTSINTNNTMIPSMPLELQKGFNKKRIDHRHHAMDAIIIACANRNIVNYLNNVSASKNTKITRRDLQTLLCHKDKTDNNGNYKWVIDKPWETFTQDTLTALQKITVSFKQNLRVINKTTNHYQHYENGKKIVSNQSKGDSWAIRKSMHKETVHGEVNLRMIKTVSFNEALKKPQAIVEMDLKKKILAMLELGYDTKRIKNYFEENKDTWQDINPSKIKVYYFTKETKDRYFAVRKPIDTSFDKKKIKESITDTGIQQIMLRHLETKDNDPTLAFSPDGIDEMNRNILILNKGKKHQPIYKVRVYEKAEKFTVGQKGNKRTKFVEAAKGTNIQIGAENMYFEEKGAYTGEISPNMLTDAGVKYVIIGHSERREYFAETDETVNKKVLKAFEHGLTPIICCGETLTQREQGVTMDFIRQQVKVGFQGVTADQAKTAVIAYEPIWAIGTGKTATTEQAQEVCAGIRXXXDTKKVIRKRSYSTIPLNVVIERQKQGLSSAPEDENGNLPKYILSPNDLVYVPTQEEINKGEVVMPIDRDRIYKMVDSSGITANFIPASTANLIFALPKATAEIYCNGENCIQNEYGIGSPQSKNQKAITGEMVKEICFPIKVDRLGNIIQVGSCILTN

SEQ ID NO: 8973 - protein, 1000 aa, unidentified
  REGION 1..1000: note = Description of Unknown: Cas Enzyme sequence
MKNTLYGIGLDIGVASVGWAVVGLNGTGEPVGLHRLGVRIFDKAEQPKTGESLAAPRRMARGMRRRLRRKALRRADVYALLERSGLSTREALAQMFEAGGLEDIYALRTRALDEPVGKAEFSRILLHLAQRRGFKSNRRTASDGEDGRLLAAVNENRRRMAQGGWRTVGEMLYRHEAFALHKRNKADDYLSTVGRDMVAEEASILFERQRAMGCSWAAPELQAEYLSILLRQRSFDEGPGGNSPYGGNQVEKMVGRCTFEPDEPRAAKAAYSFEYFSLLQKLNHIRLAENGETRPLTQPQRQQLLSLAHKNPDISLARIRKELALPETVQFNGVRCRANETLEESEKKEKFACLPAYHKMRKALDGVVKGRISSLSISQRDAAATALSLYKNEDTLRAKLTEAGFQAPEIDALAGLTGFSKFGHLSLKACRKLIPHLEQGLTYDQACSAAGYDFKGHGAGERAFTLPAAAPEMEQITSPVVRRAVAQTIKVVNGIIREMDASPAWVRIELARELSKTFGERQEMDRSMRENAAQNERLMQELRDTFHLLSPTGQDLVKYRLWKEQDGVCAYSLRRLDVERLFEPGYVDVDHIVPYSLSFDDRRSNKVLVLSSENRQKGNRLPLQYLQGKRREDFIVWTNSSVRDYRKRQNLLREKLSGDEAEGFRQRNLQDTQHMARFLYNYISDHLAFAQSEALGKKRVFAVSGAVTSHLRKRWGLSKVRADGDLHHALDAAVIACTTDGMIRRISGYYGHIEGEYLQDADGAGSQHARTKERFPAPWPRFRDELIVRLSEQPGEHLLDINPGFYCEYGTEHIRPVFVSRMPRRKVTGPGHKETIKGAAAADEGLLTVRKALTELKLDKDGEIKDYYMPSSDTLLYEALKAQLRRFGGDGKKAFAEPFYTLTVPVHGGAASNDTMVRVDVFLVPGDGYYWVPVYVADTLKPELPNRAVAQGKPYSEWKEMREEDFIFSLYPNDLVYAEHKSGLKFTLQNADSTLEKTRT

SEQ ID NO: 8974 - protein, 1138 aa, unidentified
  REGION 1..1138: note = Description of Unknown: Cas Enzyme sequence
MFNSSENIPSIRYRVGIDVGLKSIGFCAVEVDRNDHPVKLLNSMVFIHDAGVDPNENKAAKSRKLTAGVARRTRRLYHTRRQRLANLDRVLSKEFGWPLPDQSAFKYPTEPWHVRAHLVEGFVADEDERKASLSIALRHISRHRGWRNPYAKVETLLQPAEPSDFLEGLKERISESLGRSFPADATPGQLVDAYLAHPDYVKKAGTPKLRGPEGILAGKLHQSDNAEEIRRICEMQQIDAADRDRLVRAVFQAKSPKGSAKERGLVGHDELPGQGKHVRAEKAHPAFQKFRIVSVLANLRIREGHSERPLTPKELQGLTDFLLVAGLKQKVTWQDLADNLGIERSDLRGTAKASFDGSPVLRTPPTDVTTEKILACKVKWLKEWWKDADDEQRGYFVDAFSNSGGSEDDSDVDDEVAELLEQATEDDQLEFEKISLPQGRAAYSLDSLRRLTDRMLRDGVDLHTARRLEFNVGDDWKPAVEPIGAPTGNPAVDRVLKQVSRWLHAATERWGEPTFINIEHARDGLGSEKVARELMQANDKRRRANAAAVAVMAEKLKLSGKVRRSDQIRYFALQRQNCQCLYCGTEITFATAEMDHIVPRADGSSTNDRSNLAAVCHTCNQMKNATPFATWAASDQANVGVSLEGALERVDMWQQDNGMSKKQFKQLQREVSARLKSRKPDEEFDGRSMESVAWMAVELRTRIEGFYRTRDEEAVPSVAVYRGQLTAEARKASGFENRVNLIGGRGKTRFDRRHHAMDALVIALMNPSVSRTLALRVNMRDAQRLAGLEETWKNFYGKPGEASQRFESWRESMLRGVELFNIELSNNAVPFVENIRLRMNSSAVHEDTLFSFSHAKPVKKGSTTMKEKGVQRALGAAIPIDLIDRAETPALWTALTRCSDFDPVKGLPENPNRIIVVNGRHVRPKELLNFFGSPSACLKVRGGYVKLANSIHHARIYRIDGKKTTYAMVRVFQVDLLRLKDQDLFTTPLKPSTISMRTAEPKIRQALADGTATQIGWLVEGDELQLNPAMYGDGSIAKVFSRYPELTSWRVAGFKSASKIRIKPLLLSKEGFVDDKTAAKLGIEPTADEVRKAVDDPGWITAINVLLQAGGVRVIRRNCLGEERWHSSAMLPVSMRLE

SEQ ID NO: 8975 - protein, 1048 aa, unidentified
  REGION 1..1048: note = Description of Unknown: Cas Enzyme sequence
MDKTPGTDIGKLGFDPGTFATALMSSEEFRSKKRVIWAGIDMGVASTGLCLVDILNHEIVLMASHLFKSPVVDKKKATAAPESLASVRRQARSVRRNIMREGRRKKAIRAVRAEFGLIPADAGGEWFGARRDERTVVMLRSKGLGHLLNSRELARVLYAFASHRGYIDHGKSDKDDDAGKVKKALAANRAALSDGDCETFGQYLAGQPRSRNRAGDYSYTADIDMTIDEVRTIFARQRELGSEIATEALEERYIAELTWLTDTSGRDMSTYLKVGFCTYRGAPYRRGPASAISFEMVRAHQALCNTVIQHADGTSDTVPGLVRIEIVRELFAVRKSVKPLKWSGLRRRLGLSEDDSFKGVSTDDEKRDCIALPAWSVLCAGLYENHRDLLERLHDRTVDADAVCAALTFASSAASLAKRLAPLALTDDEVEAIIDLPYSARLFSGYANASLEAIQMLRGMFEDPHIMKLKQAEAESGLAQLRAMLADERRESADGLLCPFSDYDPTCNNPVVLHAAAQVRRMVNSAIRHYGLPDVIRVEVARDLKRSKHERKIVDESNKARLELNERAKKDIVEFLGLPDDHHVRGRDLAMVKLYREQGGKDPYTGAGIDFRRMLEEHGYAEIDHILPISRTCDDSQANKVLCLTKSNQDKSNRSPYEWMTSGEAAAPDWGEFCGRMERWAKMCEPRRYARKKLSNLTCENLAEQSGGFIKRNLNDTRYMSVSLAKWLRECLPFARDGHEHVYCVAGGATALMRNVWGIGITGPDGKKNRDDDRHHAVDAAVIACCKPDIVKNVALVNEGHASADVRRRLLRDSLPYPEFKEQVDAWIPCIVPTLTLSRTVTGSVLKDTVYPYLGRDEAGKDLYLDVKKDKDGRITGRKVKKATTMWKDGRGGCKAYGSMCALDAVFDASASKRGKWSFDPVYCIDIPRRDSTIRTMRAFSKKSAIDMWDTVEVRENAPRMTIRRGDVLVCDGKAARFYFYNVSNGAIFTFANRSKDPKQLQFSGPLSDERFPTPSRWGADLRVMQEDCLGLCWLSFLAQRFESAQKE

SEQ ID NO: 8976 - protein, 1456 aa, unidentified
  REGION 1..1456: note = Description of Unknown: Cas Enzyme sequence
  MOD_RES 409..412: note = Any amino acid
MKNIVGLDLGTNSIGWAVVNGSVNDNGSEQLVKIQASGSRIIPMDAAMIGDFNKGNSISQTAERTRLRGIRRLSERYLLRRERLHRILDILGFLPSHFAQDLDRHGKIVKGKEPKLAWRKNEAGQFEFIFQDSFKEMLEDFKLNHPNLITDDKKVPYDWTIYYLRKKGLTSKISKEELAWILLNFNQKRGYYQLRGEEEEENNNKLVEFYALKVVAVEDSGEKKGKDIWYNVHLENGWVYRRTSNIPLDWVGKTKEFIVTTDLEKDGTPKKDREGNVKRSFRAPKEDDWSLVKKKTEADIDQTHKTVGTYIYDTLLGNPSQKIRGRLVRTIERKYYKEELKLILDKQKEFHPELQDRALYAACVEELYTINEAHRNNIGNRDFTYLFLEDILFYQRPLKSKKSLIDNCXXXXVDVTNELLKTEEDYVALFDWLNGKKEIDQKAFLKYPLFGLKKEVENYRWNYVQDKPYPCNETRSSMLARLEKCDISIEFLTKENEEALWHILYSVEDKNEIVKALQKFADKHDLNASFVDVFRKFPPFKKEYGSYSAKAIKKLLPLMRMGKYWSENSIDKGTRERIDKIITGEYDEKIENRVREKAIHLVDVSDFRGLPLWLVCYIVYGRHSESKEITQWKSPADIDSYLKSFKQHSLRNPIVEQIIIETLRVVRDIWKQVGNIDEIHVELGREMKNPADKRKKMTQQMSENENTNLRIKYLLTEFLNPEYEVENVRPYSPSQQDILRIYEEGVLNSVSDLPEEISDILKKFTETDLKKRPSRSEVLRYKLWLEQKYRSPYTGEVIPLGKLFTPAYEIEHVIPQSCYFDDSFSNKVICEAEVNKLKSNLLGHEFIVKHHGEIVELPFGKKVRIFTVDEYEQFVKDNYSRTRGKMKKLLMDDIPEEFVARQLNDSRYISKVVKSLLSNIVREKGEEEAISKNVIPCTGGVTDRLKKDWGINEVWNKIILPRFQRLNELTGTNKFTTKNVGIQEIPTMPLELQKGFNKKRIDHRHHAMDAIIIACANRNIINYLNNESATAKAELSRYDLQKLLCDKAKTDNNGNYKWVIRKPWASFTQDTYLALENIIVSFKQNLRVINKATNHFLHYNEEGKKIFVKQGKGDNWAIRKSMHKDTVFGEVNLRRIKTVALNEAMKNPQSIVVKDFKRKLLELWNLGFDAKRIKKYFEDNRETWSDINLSKIEVYYFSKDTKDRFFATRKPLDTSFDRKKIENNITDTGIQKILLRHLELKDNNPDIAFSPDGIDEMNRNIIQLNNGKYHQPIIKVRWYEQADKFAVGQTGNKSSKFVEAAKGTNLFFAVYESNILDKKTNTIIKKRNYATIPLNVAIERQKQGLPVAPEDENGNDPIFVLSPNDLVYLPTDDELANGIIAQPLDRGRIYKMVSSSGEQCFFIKHIVANVLVDKFEFSPLNKMERALTGEMIKMICMPIKVDRLGNVLESSSSHKK

SEQ ID NO: 8977 - protein, 911 aa, unidentified
  REGION 1..911: note = Description of Unknown: Cas Enzyme sequence
  MOD_RES 718..721: note = Any amino acid
EQKTLLKYPAFNIKKDVDNFRWNYVEDKTYPCNETRSLILSCLNKANLSEDFLSYQKEEALWHILYSVNDKQEIVKALQTFARKNGLDGTFVDAFKKIRPFNKEYGAYSAKAIKKLLPLMRTGKHWNVESIDGKTKERIDKIITGEYDEKISNRVREKAIYLSDISCFKGLPLWLACYVVYGRHSEQKEITKWETPDDIDAYLSTFKQHSLRNPIVEQIIMETLRVVRDIWKKAGSIDEIHIELGREMKNPADKRKRMTAQILENENANLRIKALLTEFMNPEYEIEDVRPYSPNQQEKLRIYEDGALNAAEQVPEDIETILKKFKENKQPTRSEFLRYKLWLEQKYRSPYTGELIPLGKLFTEAYQIEHIIPQKRYFDDSFSNKVICESAVNSLKGAQLGYEFIKEHHGEKVETGFGKVVTIFSVTAYEQFIKEHYAKSKAKMKKLLMDDIPEQFIERQLNDSRYISKVIKGLLSNIVREKDESGEYEQEAISKNVLVCNGSVTDRLKKDWGMNDVWNNIVYPRFERLNTLIGKECFGHWENKNGKRIFQTEVPLEYQKGFSKKRIDHRHHAMDAIVIACATRNHINYLNNASASKNAQISRYDLQHLLCDKTKTDDKGNYKWVIKKPWDTFTQDTKGILDNIIVSIKQNLRVINKTTNIYQHFDTDGKRTFYKQTKGDSWAIRKPMHKDTVFGIVNLRKTKEVRLSIALDIPYLIXXXXLWKELNVAKVPVYYFTESSSERMVAVRKTIDTSFNAKKIQESVTDTGIQKILLKHLEQKDDKADLAFSAEGIEEMNRNIIALNDGKKHQLIYKVRVYEPLGNKFNVGTTGNKGKKFVEAAKGTNLFFAIYRTEDGKRIYDTIPLNIVIEREKQGLLPVPDKDEKGNTLLFWLSPNDLVYLPTEEEREFDR

SEQ ID NO: 8978 - protein, 914 aa, unidentified
  REGION 1..914: note = Description of Unknown: Cas Enzyme sequence
VLPKLSYRLAIDLGTTSIGWCLLRIDSNRQPQAIIKMGVRIFSDGRNPKDGSSLAVKRRQARQMRRKRDRFIRRKSKLSDALVKYKFFSDNPIVRKSSITLDPYELRKKGLTEELAPHEFGRAIFHLNQRRGFLSNRKTNAIDGASSLLKQAIVNLHEKLDREDCKTLGEWLAKRKSQGLGVRSRLLGKKAKDKAYEFYVDRSMVEHEFNTLWNVQKSFNPGLFNEVAYSELRNLILFQRDLNSVRPGRCTLLPEEERAPIALPTTQLFRIYQEVNNLKILSVDLKEIGLTKSQRDHVVSLLVSKNKVSFKVIAKALGLPKDSTFNLQDGKREFLKGNITEALLSKDEYFGSAWQIFSLTEQDHIVSRLLNEPNEELLIEWLVDTCNLEIDAANRVANSLLPDGYGSLSKVALDKILPALMNEVISYDKAVVAANFDSHSALSHPYLTGEIMSSLPYYGDPLRRHVAFSKENPKNDEERFGKIANPTVHIGLNELRKVVNALINRYGHPSEVVIEVTRDLKVGRKKRQEIQQAQKIKQDLNERLVNEACEVLGLSMAGLDRNKRKEISQKMQLWYELSPSDISLRCCPYTGEYLSLPRLLSSEVEIDHILPYSRTLDDSLNNKTVCLSRANRFKGNRTPSEAFGRNSHNDYSYDDILRRAANMAKSKAIKFSIDGYERWLKNDKDFIARALNDTAYLSKIATEYLSLICPPNHVWAIPGRMTAILRGMYGLNYFLSHDGLKNRSDHRHHALDAAVIGIVDKALLRRFSNASSRSEDLQLGRLLESVPLPWPTYKEQVKAALKSVIVSHKPDHGYQGAMHEETAWGLRENGIVTRRVFDEESGTFRREFAKKNLIEVYGKSSLERHRLNDDGSPAPYKGYISGSNYCIEIWEDQKGRWQGDVISTYAAYQVIRNL

SEQ ID NO: 8979 - protein, 1461 aa, unidentified
  REGION 1..1461: note = Description of Unknown: Cas Enzyme sequence
MKNILGLDLGTNSIGWALIQTDDEGKAYQREIKLGSRIIPMTQDVLGSFESGAPIQTQTASRTQKRGMRRLYERRALRRERLLRVLHILGFLPDHYDHSIGWDPRQTKTFGKFINPDEEPKIAWTRDAQGKPSFLFMSSFDEMLADFKVKQPELVTNDKKIPYDWTLYYLRQKALLEPITKEELAWILLNFNQKRGYYQLRGKDEINQEEDKTKLVEYIEQEVIKVDFDANEKVTNKGRWYNVHLANGMIYRRQSQTSINDWVGKKREFIVTTDLDDKGNPKLNKDGEIKRSFRAPEANDWTLRKVRTENNVVQSGMTIGAYIYQHLLSDPTGKIIGKFVETIDRHFYKDELTAILKKQSEFHPELKDKALLEACSEALYGHNYARQFSLKQKDMTYLLIEDILFYQRPLKSKKSLIANCPFESHTYVDKETGEVKKKFIKCIAKSNPYFQEYRIRHFMQNLKIYDISGLEEKDVTAQYLPDHEAWERLYQWLNNRDSVNQDTFLKDFLAIKKPKGQDAKYPLRWNYVEDKEKKYPVGETHTLIKGCLEKAGVATSLLDDFAVEYHLWHLLYSIDDVNELKGALRKFASNYQINDIDSFADVFCKAKPFDKDYGSYSEKAIKRLLPLMRQGIRSEAACEKLYEKKTSERWTSPADIHAFIMDFQQHSLRNPIVEQCILETLRTVADIWQQCGHIDEIHLELGREMKNPADKRQQISNRNRENENTNLRIRALLTELLNDPNIQEVRPNSPMQQDILRIYEEGALTGLKSSDPDYKEILEISRLAQPTTSQLTRYKLWLEQRYRSPYTGRVIPLARLFTPAYQIEHVIPRARYYDDSFNNKVICEAEVNKDKTNLLAHEYICQNGGKLITTTSGTVKVFNKEEYEQFVQDHYGTLKTKKHNLLLDDIPEEFIQRQMNDSRYISRYIKALLSNIVRADENDDSETSKNVIVCTGSVTTRLKTDWGLIDVWNHLVYPRFERLNLLTGTNLFGQWVNKDGKRYFQTDMPLALRKGFVKKRIDHRHHAMDALVIACASRSIVNLLSNMNANKAEQRNDLKRILTGKGGLFNKPWPTFTQDAERALTDMVVSFKNKVRILSRASNYYEHYDAEGRKRQVPQKGGKQFVVRKPLHKETIFAHVNLRRTKQVSIDSALLDVKNIVDAPLRHRIIDLLSQGLDKKKIKKQLAEEGVGKQIEIYYFTDDADPMVAVRKQLDNSFDQKRILSITDTGIQKILLAYLASRGNDPKVAFTPEGIAELNEHIADYNGGKNHQPILNVRVSEPMGEKFRVGETGSKATKYAEAQGGTNLFFAIYESETGERSYATIPLVTAVERIKQGLPPAPEKDEKGNTLKFTLSPNDLVYVPDEDEKLSLFVEIDLINKDKIYKFVDSSGTTANFIPHRVSSLIYAIPKANATYYCNSTIVQNEYGVGSPQSKNQKSIDGLMIKSVCWKLEVNRLGQITRIIR

SEQ ID NO: 8980 - protein, 1169 aa, unidentified
  REGION 1..1169: note = Description of Unknown: Cas Enzyme sequence
MKKILGLDLGTTSIGWALVNEKENNNEDSSIIRLGVRVNPLTVDEKANFEKGKAITTNADRRMKRGMHRNLQRYKLRRSNLIECLMEHHIISDDTPLFEFGNKSTFDTYRARAKAVDEEISLDEFARVLLMINKKRGYKSNRKVKDTDEGELIDGMEVAKRLYHEQLTPGQLLLDLLSKGKKNRPSFYRSDLQSEFNRIWEVQSAYYPEILTEDLKNHVRGFNKTQTSGAFYNLCKVSTAKNSGKEGYAQALKWRCKALTEQLPIDEVAYVLCDVNGAINNSSKRLAMISDRSKSLYFNHQTVGQYLMQRIENNPNDSLKNIVFYRQDYLDEFEAIWEKQAQFHPELTPELKKEIRDIVIFYQRDLKSCKNLISYCEFEHSEKEVMIEGKAKNITTGCKVCPKSSPLYQDFKIWQILNNLQVSVIGYTRKKQKKNDAQLSLFAEDEVDSLQRFLNQEEKDILYKELSFREKMSKKEILKLLFDNPHSLDLNYKEVEGNRTMAALYKAYQKIISLTGNGEYDFSKKTADEVVALTTEIFSGLGYNTSILTFNPLLKGKYLEQQPLFKLWHLLYSYAGDNSVSGNEALLRRIEKLCGFEKEYAAVLADVVFPLDYGSLSAKAIRKILPFMMKGYEYSKACEMAGYHHSVRSLTKEQLNDKEYKSQLDEIKRNSLRNPVVEKILNQMINVVNEVVTTYGKPDEIRIELARELKKSQAEREQLDEAIRRNTAQSEKCRKELEEEFGIQHVTRNDILRYQLYNELKMNGYKTLYSNTYIPKEELFSKHFDIEHIIPKARLFDDSFSNKTLEARDVNIEKGDMTAYDYVASKYDEKGLADYESRVEELFAKNAISRTKRNNLLMKELDIPSDFLQRDLRDSQYIAKKAREILGSKLANELYERPLSEILEQMVPFVVTTTGSVTSRLRDDWQLVNVMQELNWDKYHALGLTESYTDHNGNTVYRIKDWTKRNDHRHHAMDALTIAFTKRSIVQYLSNMNARSDKGSSIYGIERNELHRDEKSHKLLFNPPMPLEVFRAEAKKHLENILVSIKAKNKVVTKNINRAKTKSGHQQKVQLTPRGALHNETVYGKIHNFEAEYKKVDGKFNEETILRVSNMKYREALMKRLALFGNDAKKAFTGKNTLEKNPIWLDEAHSHCVPQKVKLFNIIDVFTIR

SEQ ID NO: 8981 - protein, 996 aa, unidentified
  REGION 1..996: note = Description of Unknown: Cas Enzyme sequence
RYTDREEHYKKEFYAICKQQDLSEELVSKLEIALYFQRPLKSQRRGVGRCTFEPKKPRVADSHPAFEMFRMLSFVNNIKVKGPRDVELRSLKPEEFELLKPTFFRKSKSQFDFEDIAKAIAGKGKYQYIKDDGDKPYKFNYRMTQSVTGCPTIANLISIFGEDYESGIAERYMLSKDKDSKQMVNDVWNVLYSFSDKDKVKQWGKDNLQMSDEEAEKFSKIKLTRSFASLSLAAVNKILPWLQQGLIYPHAVLMAKVPDIVGKDVWNSRGESIASELINLINNFNPKDVSMNGTLDFCIKDILKDMCELAPGAAEKLYHPSMIDTYLDAKKKQGVYQLGSPRTNAIRNPMAMRSLHQLRKVINTLLRDGIIDSQTEVHIEYARELNDANKREAIAQWNKERETKRRKFREDIRTLYKQECGKDIEPTDDDIIKFQLWEEQNHICLYTGETIGISEFVGANPSYDIEHTIPRSVGGDSTLENMTLCSSKFNREIKKTQLPTQLSNHDEIMERLEEWRKKIDRLRKDADRVKTHSGMDKAMKDRLIQKRHLLKLELDYWVGKYKRFQMEEVPEGFALRQGAGIGLVGKYAGLYLKSLFHKADDRNKSNVRVVKGATTAEYRKMWGIQDEYEKKSRDNHVHHCIDAITIACIEPGEYNATASYYQQLEEYERTKAAKPSFPKPWPTFTEDIKNIAQEMIVVHSTPDNMPKQARKYIRAKNGKYLAMGDSARGSLHNDKYYGAIERDGQIKYVIRKELSSIKEGDIKNIVDDTVKEKVMQAIAEKGFKMAMAGDIFMNEEKGIKIKKVRCFTPTVTNPLHIRTHRDLSRKEYKQQFHVTPDGNYCMAIYEGEIKGKMKRTYETVNMIDAAAYYKKSSGLIKQYPIAPESKNGLEYRCMVRTGTHIILLQSDNEELDITNKKELAKRLYYVAVMQKDGRIVLRHNQEAREATVLKKERKSGANKDGEPYRSEIMLSLSDFHALIEGIDFNINALGEVTMLK

SEQ ID NO: 8982 - protein, 1543 aa, unidentified
  REGION 1..1543: note = Description of Unknown: Cas Enzyme sequence
MRILGLDLGTNSVGWAVIEGERSIDENDKEIHLQRIEGAGSRIIPMGADNIKDFENGNSVSQTKERTGFRGMRRLLERRLLRRERLHRVLNLMGFLPPHYAENIDRYGKFKIGTEPKLPWTQDAAGQWTFLFMDSYNEMLSDFAKSKPQLLTDGHKIPYDWTVYYLRKKALSAPLTKEELAWLLLNFNQKRGYHQLRGEDDIDEDKQEDYVKAVVVSIDDEGISKGKHWYALHLDNDMVYRRPSDVSLDVMIGKPIELVVTTKKNKDGDSYSFRAPKEDDWSLMKIRTEQEIKKSEKTVGEYIYDSLLNFPDQKIIGSLVRTVDRSLYKKELEKILKKQSEYIEELNNPEIYKDCVNELYQQNEAHRANLACRDLPYFLVNDILFYQRPLKSKKSLIEDCPFEKYNLRGAEENRSVKCIAKSHPLFQEFRLWQFLQNLHIIEKEHPVLQDSVQCDLFGNKEKEKKSVQYDYDATCCFLNDDAAIVKLFDFLNDKKEITQDDILKYFKIYVKNSKGQKGTPEQKYRWNYVEDKTYPCNETRALMFSYLEKAGVSHEQARGYLVEIAKRKNSPEKATDSIELALWHILYSVSDKEELKKALTRFFELNPMPGISTESLANWFVKAKPFDKNYGSYSAKAIAKLLPLMRAGKYWKKESIDTHTLERINKIIAGECDESIKNRVRDKLFGKIESVDNCHYLPLWLACYIVYDRHSESGDVQKWENPADLERFLNSFRQHSLRNPIVEQVVLETLRVVHDIWCHFGNIDEIHLEMGRDLKLPNDKRQLYTQQILNREYSNMRIKALLAEFIDPRFGIEGVRPYSPMQQDILHLYEDEALANAGDMPADIVAIQKNLNSLDKKPSLSDVIRYKEWIDQKCCSPYTGKPIPLSKLFTPAYQIEHVIPKAVYFDDSLSNKVICEAEVNQLKTNMLGHQFIAKHQGEIVPLGMGKSVKILALDEYEAHVKKTFASNQGKMKRLLMDEIPDDFISRQLNDSRYISKYVKSLLSNVVRAKLDDGTYEQEDISKNLIPTNGSITDREKKDWGIKDIWNEIILPRFKRMEEIDPEHHYVSTNQSGQVIPIMPEGINLNKKRIDHRHHAMDAIVIACASRDIVKYLNNESARKNAAISRTELQRIICDKDSSEGNGNYSWVLKKPWPTFTQDVRTALQNIIVSFKQNQRVINRTSNHYLHYENGKKVKAVQAGQNWAIRKSMHKDTVFGLVNLKLKKQVQFNVALKTPKMIVDNDLKVKIQELLTLGYDAKRMKKYFDENKEVWSDVTSKKVEVYYFSEEAGEHYYATRFISDLGSYLGSESSKGKIESKISKITDTGIQKILYAHLNKYLEHPADAFTAEGIADLNEHIKELNGGKDHKPIYKVRRCEQANKYAVGQTGNKSKKYVEADKGTNLYFAIYVDADGKRYYSSIPLNVVVDREKKGLSPVPETDEAGHRFLFSLSPTDLVYLPTADELKSGVYALPLDKSRIYKMVSTSIDKKCYFISCSVASMIRDGLEFESGNKSQMSLDGNKIKETCVPIKVSRIGEVVMLNGEKI

SEQ ID NO: 8983 - protein, 1123 aa, unidentified
  REGION 1..1123: note = Description of Unknown: Cas Enzyme sequence
MTKILGLDLGTNSIGWALIDDVQNKIEGIGTRIFPMGVENLGEGEGREMSKNAGRTGARGVRRQFFRRRLRKKILLKALSENKMCPMEANDFVDWKKTKEFPSDKLANWFALNPYELRQRALNEKLTLEEIGRIFYHLIQRRGFLSNSRKGGTDDGTIFKGNPKEGKIGITETQDKIQEKTLGSYLFEIYPKENQPFQEGQERIRNRYTTRKMYVDEFELIWNKQAQFHSELTEELKTTFGGRKLDGYKEDGILFHQRPLRSQKHLVGNCAFETTKTKCPISAIPFEQFRVWQWVNTVECNGEKISEEEKEKIVDFLYANEKPDFKKIRKAIGKESAEFKFNYKDDDKIVGTYTISNLSNKKYFGKKWFDFTEKEQEDIWHVLYFFDSKSNLKDYAIKNWNFNEDQAIAISKFNVKDGYSSLSRKAIANILPFLQMGYTYDIAVVLGGIKNVFGSEWEKLSDEKRNFFHDNVYEIVRSKTKGGFIETIKDILRNDYSISDHQMRKLYHHSATIDVAELMDKLPLGKEADDEIQKIKNPIVITALFELRKLVNELIDEHGKIDEIKVEMARDLKVSKSERYKTRRNQQRLEKENDRVKVEVLKYTNLSHDNILKFKLWEECKRTCPYTGLSIPINELFTNKWQIEHIHPWSKSLNDSFSNKTLCLGTENIKKGNKTPFEYYGNDEANWSAIKERALKLFSFTKEYPDSYNKFKRFVKQSFDDDFTSRQLNDTRYISKEAKNYLSKICKNVMVSPGQATSNLRQKWGLNHILNDENAKTREDHRHHAIDALVMACTKLSYVQELSKWNRYNRAYDLKQFSLPWDSFRRDAEKAVDNILISHKKISNDITIRFKTVEKNGKKYTNKGVAARGQLHKETVFGKRTFNGEEAFHVRKAIDSLETAKQIDKVVDETTRKLILKRVNELGGFVKDKVPANTFFVVDENGIKQPQIFLPNKNGDPVPILKVRMKENIGGAEKLKDKVNQWVNPRNNHHVLIYKDEKGNLKEEVVTFWTVVERKRTGQSIYQLPVGGKEIVTSLHTNDMFVIGLNEDEINWSSLEYDEINKHLYRVQKTSKKEKSFEFNFRLSIASSLDDKRQEISIQSFKKWVELNPIKVKISVSGKIQKL

SEQ ID NO: 8984 - protein, 1004 aa, unidentified
  REGION 1..1004: note = Description of Unknown: Cas Enzyme sequence
MAKILGLDLGTNSIGWALVDNTNKQIVKAGSRIIPMDAQAMSDFKSGNLQSAANARTGFRGIRRLNERAELRRQRLLRVLNVLNFLPPHFKKQIDFDEHPGQFINHGEPLLPYRKDTNDKNEFIFMDSFKEMLEEFRDVHPELLADGRKIPYDWTIYYLRKKALVQPIKREELAWILLNFNTKRGYYQLRGEEDETATSKNEEYKVLTVTNVEKLDAVKNKKGSFWYDITYDNGAKQRKTGIIDPRNIGDKVEVIVTTTLEKNGNVAFDKEGNPKIKLRDPQEGDWTLMKKRTEADLNNRNITVGEYIYDSMLADSTIKVRGKLVKTIERNYYKDELVKILNKQCEFIPELSDTNIYEKCVRELYHNNEAHVQSLSQSSFTSFFVDDIIFYQRPLKSKKSEIANCPYEHYQFVNKDTGEIIKQPIKVIPKSHPIYQEFRLWQFISNLRVIQKEKTENGKLKTDIDVTSDFINTREEQCKLYEQLNMRKDINNNQFVKLICKENASLYRWNYVEDDKTYPCNETRYLINKDNILQSDERENKKEIELWHILYSVNDPILLRKALNTFASKNGLDVETFVEDHIHIKPFNDDYGAYSEKALKRLLPLLRIGKYWHEEDIDTKTKCRIDAIISGEADNAIYDVAAKNNINLTSIESFQGLPLFLAEMIVYGKRKEVGIWKSPDDITYYLKYDFKQHSLRNPVVETVLGETLRVVRDIWAKYGKIDEIHVEMGRDLKQPKDKRVKDMQRNFQNEHTNLRIRRLLQEFVNPDCEIDNVRPYSPSQMELFKIYETDVLNSNEPDDDILSIIKDLGDTSKHVSHQEIIKYRLWLEQRYTSPYTGDMIPLSKLFTPAYEIEHVIPQSRYFDDSLSNKVICESEVNKLKNNRLGYEFIVAEHGHIIGRHRVFDKVQYEEYVREHYANDRLKMKKLLMEEVPDSFIQKQLNDSRYIARKTIEILSGVVRMTNENGEIADNDKAATSINVITTNGSITDYLKKDWGVKQVWNHII

SEQ ID NO: 8985 - protein, 1365 aa, unidentified
  REGION 1..1365: note = Description of Unknown: Cas Enzyme sequence
MVKKKYAIGIDIGTNSVGWSVVTDDYKVPSKKIKVFGNTEKRYIKKNLLGTLLFDEGNTAENRRLKRTARRRYTRRRNRILYLQEIFAEEINKIDDSFFQRLDDSFLIVEDKQGSKHPIFGTLQEEKEYHKQFPTIYHLRKQLADSSQKADIRLIYLALAHIIKYRGHFLFEGDLKSENKDVQHLFNDFVEMFDKTVEGSYLSENLPNVADVLVEKVSKSRRLENILHYFPNEKKNGLFGNFLALALGLQPNLKTNFELAEDAKIQFSKETYEEDLEEILGKIGDDYADLFIATKSLYDGILLAGILTTTDSTTKAPLSSSMVNRYEEHQKDLALLKDFIRQNLSDSYKEVFNDKLKDGYAGYIEGKTTQENFYRFIKKAIEKIEGSDYFIDKIDREDFLRKQRTFDNGSIPHQIHLQEMHAIIRRQAEFYPFLAKNQDKIEKILTFRIPYYVGPLARGKSEFAWLNRKSDEKIRPWNFDEMVDKETSAENFITRMTNYDQYLPDQKVLPKHSLLYEKFAVYNELTKVKFIAEGLKEYQFLDSGQKKEIERTLFKTKRKVTAKDIKAYLENSNGYEGVELKGLEDQFNASLPTYHDLLKIIRDKAFMDAEENQEILEDIVLTLTLFEDREMIRKRLEKYKGVLTEEQRKKMERRHYTGWGRLSAKLINGIRDKVTTKTILGYLIDDGTSNRNFMQLINDDTLSFVDEIRLAQRVGKIEDYHTEVQNLAGSPAIKKGILQSLKIMDELIEVMGYDPEHIVVEMARENQFTNQGLRNSQQRYKKIENAIKNLDSNLNSKILKEYPTNNQALQNDRLFLYYLQNGKDMYTDEELDIDQLSHYDIDHIIPQAFIKDDSLDNKVLTKSAKNRGKSDDVPSLEIVHKKKNFWKQLLDSQLISQRKFDNLTKAERGGLTIEDKARFIQRQLVETRQITKHVARILDTRFNTKLDEAGNRIRNPKVNIITLKSSLVSQFRKDYQLYKVREINNYHHAHDAYLNAVVATALLKKYPQLAPEFVYGDYPKYNSYKSRKTATEKVLFYSNIMNFFKRVLVYSKTGEVRIRPVIEVNKETGEIVWDKKSDFRTIRKVLSYPQVNVVKKVEMQTGGFSKESILPHGDSDKLIPRKTEKFYLDTKKYGGFDSPTIAYSVLLIADIEKGKAKKLKRVKELIGITIMERMAFEKNPIEFLGHKGYKNILEKNIIKLPKYSLFELENGRRRLLASAKELQKGNEMILPPHLVTLLYHSSNIHKITEPIHLNYVNKNKHEFKELLRHISDFSNRYILAQDRLSKIEELYDKNDGDDISDLTSSFVNLLTFTAVGAPAKFKFLGSDIDRKRYTSIAEILEATLIHQSVTGLYETRIDLSKLGGD

SEQ ID NO: 8986 - protein, 1458 aa, unidentified
  REGION 1..1458: note = Description of Unknown: Cas Enzyme sequence
MAKILGLDLGTNSIGWAIVEKNNSDFTLIDKGVRIFSEGVKTEKGIESSRAAERTSYRSARKIKYRRKLRKYETLKVLSKNRMCPLQIEDVEAWKKSGFKDYPLIPEFLQWLRTNDYENVNPYFFRDKASRAKVSLWELGRAFYHIAQRRGFLSNRLDQSAEGILEEHNPQLQSLIEDLEETSTILNEIRDYYINLGLLDEVKGDFKKDLDEGEKKLKSLYNALIAIIKKNENDVQKCKDEIIKRLNKKEDLGKVKGKIKDISQAMLDGNFKTLGQYFYSLYNKGKIRNQYTSREEHYLQEFITICKVQGINGINDEEILPEKKITGLAKDLYKAIFFQRPLKSQKGLIGKCSFEKNKSRCAISHPDFEEYRMWNYLNTIKFGTQSDKKLRFLTQEEKLKLIPKFYRKNDFNFEVLAKELIEKGATFGFYKSSRKNEFLYWFNYQPTDTVSACQFSASLKNAIGEDWQTKVFTYKTLNSEKKEVIRTVDYRDLWHLLSVSTSDIYLYEYAKEKLGLEDKSAKTFSKIKLKKDFASLSLSAINKILPYIKEGLLYSHAVFMANIEKVVDEHIWKDVKERAIIQNEISKIIKSDVFEREVLNIVNGLIKNSKTEGENYAEESKNIFKTEFDKAIAKIFEKNNDIEFNQTFLDDTYLKYVEELKKYDKARSFLPVPRLDEKVIQFLLGNNKDGMVYCSDKNKTKKLYHPSDIEIFKKKIIKDEFGNEKMVLGSPLTTSIKNPMAMRALHQLRKVLNTLILEGQIDENTRIHIEMARELNDANKRKGIQDYQNENKKFREEAIKEIKKLYFEECKKEVEPTEDDVLRYQLWIEQDKKEIYEQGKSIRISDIIGSNPAYDIEHTVPRSISQDNSLMNKTLCTPRFNREIKGNKMPIALSNYEEILPRIDHWRKEAEDLTRQIESITKSIKSASTKEAKDRNIRRRHYLTLKRDYLQGKYERFIWTEPKVGFKNSQIPDTGIITKYSQAYLKSYFKRVESVKGGMVAEFRKQWGIQESYMDENGFKHYKEKDRSKHTHHTIDAITIACMTKDKYDVLAQAWTSEDEQDKQKAKALMSEAKPWKTFKEDIEKIENEILVSHYTPDNVKKQSKKIVRVRGKKQYVAEIERDVNGKAIAKKNANGKIIYKLNEKGEKIPRLQQGDTIRGSLHQDSIYGAIKNPLNQEEIKYVIRKDLESLKANDIENIVDETVKQKVKEAIENKILLLSSNAQQKNKFSDGGNIWMNEEKQIPIKKVRIYANSVKNPLEIKEHSLLSKSRKEHKQKVYGQNDENYAMAIYELDGKREFELINNFNLAKLIKQKEGFYPLNKEKEIKGKKVLYPIAKSNHRDVVLKRGQQVVFYDKEVENPKDISEVIDFEGRIYVIEGLSIQRQVVSGKLYEFGIIMLRYFKEARKADEIKKDNYKPDGVFKLGENKPTRKMNHSQFTAFVEGIDFKVLPTGKFDKI

SEQ ID NO: 8987 - protein, 1038 aa, unidentified
  REGION 1..1038: note = Description of Unknown: Cas Enzyme sequence
TNLFATQDDDKEAKESEKINSAIQNNKNIYKNSNFILPSKVLTVKKENLEKDGFINVAIRNKKDNYNNSLDRKLWQEELEKLCDSQKNNKELFKDLETFEKFKDKLLNGVNENSLGVFEQRDLKSVEEMVGYCSFYNLYHENKQKRVVNAHIKAIEFILRQRIENSILGNLIINKKTGEFVSLSKEDIETTIKFWLETPNVQKITTKNIFKNAGLKDLEIKTSDRQDDTVQDITTYKAILEIISYEMIVKNEDFYSNLLEVLHYYVSKEQIITEIIKIDKEKILTNEQIEKIANINKNSSSYISFSLKFINEILEKMIKGISYQDSLTELGYFRKYTNIKAYDYLPPLNPNNEDIEFLKNKIPDFNPQEIFYQPLVSPNVKRVISILRRLINELIKRYGKIDKIVIETARELNSKKDEEKIKKSQEQSNKDKKEAENLLKSMNKDISSKNILRARLLKEQKSRCLYSGENLTLEDALDENITEIEHFIPRSKIWIDSYKNKILVLKKYNQNKSNQNPVSFLKSIGEWENFIGRVNEYISSKDKKFWLTDEVNIEKIYNDEKLEDRFLNDTRSATKIVANYLEHYLFPKQNEHGKGESNDKVIRVTGKAISELKKLWGIHEAQPTNEDGKKDRDTNYHHTIDAIVISLLNNSSKKALNDFFKQKENHFKTKAILENLKTRFPISKDGKSLFEFVKDKVEKYEKNELYICPFMKKRENIRGFKDGNIKLIWDENLNNFAQIDKIDINKNLLLNNFGKDLKDDEVKKIFETIKNRLELPKQNNIKKALEDYEKRLLETRAKINAIKDEIKQEENKLPRDKKTIDTQESLEIKEKIETLKINQKGLSKDMETPCSFLTKDGKKQIVRSLKLKTNSVTKADSIIITDKKQNNRVQRLDKEVYESLKESKTPFVAKLNDNTLSVDLYNTEKGQVIGLNYFSSIKSSILPKIDEGKIKLISNYDDKITVSKNDIIEIQDLKSGTKNYYTCNGGGEIGKGKNVLKVDNINIKNKSVIPIQIADYRIVKKVKINFFGEISYEEFKKN

SEQ ID NO: 8988 - protein, 1393 aa, unidentified
  REGION 1..1393: note = Description of Unknown: Cas Enzyme sequence
MAKILGLDLGTNSIGWAIVDKEGNEFSLVDKGVRIFSEGVKSEKGIESSRAAERTGYRSARKIKFRRKLRKYETLKVLSKNGMCPLSLDEVEAWRKSGFKQYPLNPEFLKWLRTDDDNNINPYVFRDKASKDKVTLYELGRAFYHLAQRRGFLSNRLDQSAEGVIELHAPNIESRIEETTTINDLKIEIQEYFDGLDILDKNAKELDEGEKKLKSLYNALDKIIKANEFEKAKTEIIARLNRKEDQGAVKQEIGEISQAIKDGGFETLGQYFFSLYNKGKIRNHYTARESHYLNEFEKICEVQNLSSINKNENIPEKRYSGLAKELYRAIFFQRPLKSQKGLIGKCSLDKTKSRCAISHPDFEAYRMWSYLNTIKIKTPQDEQMRFLTIEEKQQLIPKFFRKKDNFNFEDLSKELTPKGYTPDFYKSSSAKASSYIFNYKAKDSVAGCVVSASLKNVFGEEWNTKTWTYETKNSKGKFVKREVDYKDLWHLLTVSTSDAYLEEYAMEKLGLDEKRAKSYSKIRLKKDFASLSLSAINKILPYLKQGLLYSHAVFMANIEKIVDENIWKNPEERLYIQNRIAEIIENNSFENSKLEIVNGLIKDCKVNNCYYSIEAESSYKADLVKKVSSFFKEIENQKEIVEDLFPVFIEQLKKYEYISVKRLDEKVLEFLKGENEDGEIYCSNPNKLNKLFHPSDIDVFKKKVIEDEFGNKKVVLGSPLISSIKNPMAMRALHQLRKVLNTLIIEGLVDEKTRVHIELARELNDANKRKAIQDFQKENQSKRAEIALKIKEDYKAATQKDIEPTGDDILRYQLWEEQNGMEIYEASINNGISKKIGIHQIIGENPDYDIEHTVPRSISQDNSLMNKTLCSKKFNRDIKKKQMPIELNNYELILPYVDHWRFEADKLSWEIEQLSRGIKAAATKDAKDKKIRRRHFLTLKRDYLKGKYDRFVWKEPKIGFKNSQIPDTGIITKYSRAYLNSYFTRVESVKGGMVAEFRKIWGIQESYSKDGKKYYVEKDRSKHTHHTIDAITIACMTKDKYDVLAKAWTDEDNENLPLARKLLADSKPWSTFTEDIKKIEEEILVSHHTPDNVKKQSKKIIRVRGKKQYLAEMTKDENGKTVPQKDENGKIIYKLNSEGKRIPRVQQGDTVRGSLHQDSIYGAIKNPLNQEEIRYVIRKDIESIKATDVENIVDEVVKEKVKEAIANKVLLISSNPQQKNKIADNQKVWMNEEKGIPIQKVRLYANSVKNPLHIKEHSALSKSRHEHKQKVYGQNDENYAMAIYEGLDKKGNTKRGFELLNYMDAGNYYKLSNDLKNQNSIVPDVHLKSDLPLKYNVKKGDLVLFYNESKLELEELEDSELVNRLYKVIGFESDGRIQFRHHKTAMQQSSANK

SEQ ID NO: 8989 - protein, 911 aa, unidentified
  REGION 1..911: note = Description of Unknown: Cas Enzyme sequence
YKRIPLSNYKNIELTLRQKIDNYSAIDIKTGEIKIFTKEELNKIVNFWINTPSSKEINATNIFKSAGFKDIKLNIPDQSSQIVLNIQAHKNILEILNKYNIDFQDTQNYFYNKVLLELYYFKNNSSRIENINKLIKQFNLIIDNSFVEELVLLENMDGFGSFSLEFITEVLDLINNKNKTFHEALENLEYFSKYLDMPTYSYLPPLEPTKADIKWLQENISYFDTKHLFYQPMMSPKVKRVISVLRKLINDIIKKYGEIDEIRIETAKEMNSKIEKERIDKNQSKDRAKNNDAIKFLRNPDFNLKESSKNIEIAKLWKEQGGECLYSGEEITEEEAFDENETEVEHFIPRSVIWINSYKNKILVKKKYNQNKASQHPISYLQSIGQWENFKGRVTKKYMAFEKKDWLSKEEIINSVMQKEHWQDSFLNDTRSATKTIQKYLNHYLYPKETLYGKGEKRSIFSVSGKAISELKYIWGINDVMPKNENDKKDRNTNYHHTLDAFTIALCSNSAINTLHNHFIKKENKFKTKAQKEKLRLNIPVSKDGVNLTEYLKNIVEKYETNKLYVCPYNKRKTNMKGFKDGNLKLYIAKDKNNNEILAELKKINIDATILIKNVNGFPKARSDKEVLEYIESLQERLNPIKQKNIIKAIEIYAKELLELRTKISEVESKINDIKKTLKSGTQHKEYNASINETIKPFAEENKILSNQLQKLKCSFTIKNGKKQIVKALKLQEIKIEETKADAILFKNKIERLSISNFKDALENKKPFVIKMNESTLNVQLFNTKDRGQAVGLNYFSSIANDVKTKINDKFEEELKGKEADLTLYKNDIIKVDNLKDLKTEYYIFNGGGNISSTQSSANNKLTIKNINLNSFIKTDKKGEIKESKEDNVTPNKTTVISKVNIDFFGNITEV

SEQ ID NO: 8990 - protein, 932 aa, unidentified
  REGION 1..932: note = Description of Unknown: Cas Enzyme sequence
SAINSLRAELAAYPLDADKKKRLEPDAFDLLAWVNRKHENTQNDQPRTVGELLAKRMAQGQPVRARYRENKVLREDGKSKIEKSYDLYIDRQMIADEFDALWAKQASLNPALFTEAARADLRDTLLHQRKLRPVLPGRCTLEPDEPRAPLALPSQQRFRMLQEVNNLRLLDSRLQQAPLTLAQRDLIVAALESKSKITFVAIRKLLKADGAVQFNLEDEKRKELKGNATTAILSKPDLFGNAWHTFAEAQQDEIVWQLVSEESEAKLIEWLQQHTGIDAERAARIANAGLPEGYGSLSRKALNRILPHLRDGELVDGVLQPRTYDKAVQAAGYAHHSDLAFDFEYADEEIERIGERVVQSTGEIKPTYIFKQLPYYGRALKRHVAFAKDNPKNEEERYGKIANPTVHIGLNQVRVVVNALIKRYGRPTEIVVELARELKQSREQKLEAQKKQADNQKRRQRVRQEIAGLRGVEPYNVKDSDIQKWILWEELSFDVADRRCPYSGVHISASMLLGPEVEIEHILPFSQTLDDSLNNRTVSMRQANRVKGNRSPWQAHADFAAQGWGYEGILQRAERMPRAKRYRFAPDGYEQWLRDDKGFLARALNDTRYLSRIAKEYLTLICPGSGVRVIPGQMTALLRGKFGLNSVLGLNGEKNRNDHRHHAVDACVIGVTDQGLLQRFAQASADARNKGLDRLVETMPDPWPTYRAHVERAVQHIWVSHKPNHGHEGAMMEETSYGIRKDGSIKQRRKADGSAGREISNLIRITEPTQATRHGVSNDGQPLPYKGYVGGSNYCIEIVCNEKGKWESEVISTFRAYEIVRRSGLERLRHPSLPQSIAESLNSKKLIMRLVIGDTVRLEVDGQTQTMRVQSISPIGQVFMAPIHEANTDSRNRNKADPFAFTSKIAGSFQKAKARSVSISPIGELRDPGFQG

SEQ ID NO: 8991 - protein, 968 aa, unidentified
  REGION 1..968: note = Description of Unknown: Cas Enzyme sequence
MEKVLGLDLGITSVGSALIDLDYENLKNTNILHSNIRIFEAPITPKEKTSLQLIRGENRRARNSKENNSIRRKKIVNILLKYKFIDKNEIKNINTNLPKSKVKREIIVKVANYLFEDKKNANNILELRYKALNEKLSTIQLARLLYSMNNHRGVSYEDTRSSKNIPEKKLEEFSKKDINEYADGSSDKLLYGLLNFKNAFINSSKYQTVGEFLYKEYKEKFRNSPKRFKDTKQSDFMFVIPRKNIVDELNFIFKKQKEFKNEVINDDFIKEYLEAFEWEEDSPAYDELVANCSIKENEKAASKYLVESQFYIYLEKLYNLSYKTKDEYRYKNLDIETIVKIIKHINTKTIKYSKLRELIEKELNLQDVMFKGVSDYSKYFIDLTIFVNLASILSFPINILELFKDIEAKELFNKVVNILAYEPKISQKEKKLEELKIVDEKIVDKLLEIKIKGNLSYCKEVLEQICNGMLSGLIPHYAKEEVQKAYPKKPIIKGHLLPPLLDTDFPIKNNQVVVRALSQMRLVINDTLKHYRKVYENPNWFFDKVVIETAREFLNKEQVKKYDDRAKENEKLNKQAIEFCEKYGKAYPTKEEILKARLFLQQDGLELYPSEYNISTNSANFNKIDAQRLFDEAYCEIDHTLPISRSLDDSFSNKTLVLSSTNQNKGNKTPYEFLNKELFEIMEDSLNKKINILGYKKVSNLTNKEFKELDGFIARDLNDTRMITKYAGLYIQNYLAFPKNDKIKRRVFANNGKITSLLRKSWGIGAKNRNNHLHHGEDAILIALSDNSLIKNISTYYGIQTELEKLDFSKDGFDKLFKNNKNIKEYIVTELKKEDIDIENIDFSKISKKEISSKIFRIIAQKSYPREDFLDIFRKAIHSAIVTHQERVKINGQIHKDTLEKLSKKTNDDVVLVRGGFATNGEFIRYDVFKNSKNRFEFIKITAKHHGVSLDKLPLPQDINSNFLFSIY

SEQ ID NO: 8992 - protein, 1016 aa, unidentified
  REGION 1..1016: note = Description of Unknown: Cas Enzyme sequence
GEEKGVEFSLASERTKHRASRKLYKRRKKRKTDLLKLLIENGFCPLTNDELLIWAVYKKGQEMKYPTHHFEFSEWLKINPYEVRAKAVQDIVSKQELGRALYHMCQRRGFKSGRKDADAGKDLEQYKKEQLLLEQNGFKTLGEYYFDLLQKGLQVRKTKFSADDQEVNSSRISYVEEFNILMQTQNISKELADAFFDAIFFQRPLKSQKGAVGKCTLEKSKSRCPISHPMFEEFRMYQYLNSIKVKERNSDTFVFLSEFPEYYKIAKDKFYRVSAKNFKFVDISKSINTAAKKDSLWFEFNYNDKYPIVGSPTISKLIEVFDANDWTDCKKIIVSKYKKQDNKTVNDLVDELWHTLFFSGDFVNDITSDKIKNFIRIRFELSEEKINYYEGINLKQGYSSLSKKAIGKILPYLENNIIYPYAVFFANVDVIIGKDKWIENKEFIQDTIIDIISNYKNQILRIDIVNGLVGDFIKEYDNSNFDYILDETDKKHVTDKTKLFYGKYEWEKLSDEARKELLNEINNEFQQQLRKRRVGGYFLPKPRVDEIIKEFLIQEYKVSNEQANKLYHPSAMDAYPQSQDNLLGLPFTNSIKNPMAMRTLFYLRKLVNTLLKEKKIAPDTEIIIELARELNDKNKRLAIERWQRERENENKKYREKLEEFAKDTNSVVTELDVIKYRLCQEQNGICFYTNKTINCEKLLGSIPQFDIEHTFPRSKSFDNSLANKTLADKAFNQIKGNRIPQDLEEHYKNNFKFNIDKEWKKKIEDLEERVEQQKYFSKVASTVEQKNRAIQQRHYLKLELDYWKQKVYRFIATEIKPNFKNSQLVDTGIITKYSELFLKSLFQRVFPAKGNMVADVRKSWGLEEKDRNYHYHHAIDAVVLTCMDKSIRDGLAEAFKESDENRYQDKFKIAKPWQTFTEDVNQLKENIIVVHNHKDKIEKQTIKKLRKRNKIQYDKQGNVIYERGQGIRASLHKDTFYGAIEREKENAEKEIWFVIRKPVTNAFSEAEVNTIVDEGI

SEQ ID NO: 8993 - protein, 1331 aa, unidentified
  REGION 1..1331: note = Description of Unknown: Cas Enzyme sequence
MEKDYYLGLDIGTDSVGWAVCNPYYQILKFKGNAMWGIRLFDESCSAEKRRGFRSGRRRNQRKRERIALLEMLFDKEICKADPAFFIKLHESNLYFDDKSTNVPYSVFSDDNYTDKDFHKEFPTVYHLRKELITNKEPHDVRLVYLALHHIIKHRGHFLFDYSYKDDISGDFLPVYNNFKNYIFDNYEIELECNDVEKFSQILKNKSIGKKKKNSEIATLFGVDKKTDKSLYSMLSLLSGSKIALFDIFEDESLKDVEKKYVSFSSGFDDNEGEYRSYLGERFELLCKLKAVYDWAILADILNGKEYISFSKVDVYEKHGRDLKVLKEYVIKYAPEKYNEIFKKSIEKVNNYVAYSKHIKSNNGTGVLTSTCSQEEFCAYLKNVLKSCQDEQYIKMFDEIENSTFMPKQVTKDNGVIPMQVNEKELVAILDNAKEYLPFLQEKDSTGKSVYDKLIALFEYRIPYYIGPLNTHSKKSWLVRSDEKIYPWNIKEVVDYDKSAEEFIKNLTSKCSYLPEFDVVPKHSLIYSKFCVLDELNNLRINGGKISVQLKQDIYNNIFKKYYKVTNKKLCDYLKSRNIEFDEISGIDNDFKSSLKSYKDLLEYDLTDEQKESGSNAFTVFGEDKKLLKKRLKNELGDYLSDDEIKKISKLKYSGWSRLSREFLTEVEAICKESGEVVNIITAMWQTNNNLMQLLYSNDFCCDDKGNKSFIDKVNELNSFGADKSLNDIIDGLYISPLVKRPIHQSILIIKEIEKIMKHPPKKIFVEVERGAGEKKRTVSRRSALLDLYKFCKKDYSDLYEYLLNNTTDDDLRSDKLYLYFTQFGKCMYSGEEIKLDDLFNKNLYDIDHIYPQSKIKDDSLNNRVLVKKKTNSKKDNEYPISSQVREKMTPFWKMLLDKKLIDKKKYERLVRNNPLSEDELSEFVSRQLVETRQSTKAVSTILKQLYPDTEIVYVKAKLTSDFRKEYDMLKCREVNDFHHAKDAYLNIVVGNVYNVKFTHNKINFIKHLQNNDKGYTVNLTSMLKHNIDGAWVADNNETLNTVIATMNKNNIRYTRYAYEKKGGFWDQTISKKGKAQVQLNNVLSDKEKYGGRTKVSATYFSCVEHGEKNNRVVSLFAINLYDKKKYEESPSDYLIENYNLIEPVIKVKKLKVQSCISFDNMRCHLGGKESGGSQIVYRPAVQLVLGYQNERYIRNIIRCADGDLHLQSCSDSKNNVTSEQNCQLYDLLLEKMSNNIYGVMFSALAEKLVLEKSKFEEIDLVEQCKTIKNILIILKNNASKGDLKNINVKSNGAIRLNNNISKIKDVKSIKLINQSITGLYETEVELVSKE

SEQ ID NO: 8994 - protein, 1119 aa, unidentified
  REGION 1..1119: note = Description of Unknown: Cas Enzyme sequence
MRVLGFDIGIRSIGWCLQENGEIVACGVRIPRSVEDAQTKESLAAQRGAARRIRRNIARKKGRMESLKIMICKEFGLNLADYYSKDGDLPKAYAGENFKSPYELRSKALTEKLSADELARVILHIAKHRGYTNKHARKESDKDKGKVLSAIKSNEQALKEYQSVGAYLYKEFYQKQRSSEEIQTKVELLKAFYDKNKIKIEKQDKNKLEQQSPNQYKKVRNTTDVYERCMKQEWLQAELELIFEKQREFGLKFSDEFKDEILKVMFFQRPLKGSADKVGFCTFFPNKKRAPKDSLSGIEYVALGKIINELKYIEKKIKAKDCIRFYAGEVVDTPQNINALLDIVLKKGEISYKEFRSILKLNEKFKDVKIFSKNAKLDYTQKTIDEAEKAKFLELKSSKDNPNIPNLKGFQKALGECFEKFDRKTLDDIAFDLATINDKQELFKQFENYDLSAEQKEALSQLSFSKFLNLSFKALSEIIPLMKQGLRYDEAVEKLGFKPSDEYDYNEVQKELHNPVVSHILAEVVKVLKAILKEHGQVHKINIEFTREAGISKDKRSKTEQEQRKKFQANEKAKEKCHQLGIAATKKNILKIKLWLEQGEVCVYSCNNGKGKKITEKDLQDETMLQIDHIYPYSRSFDDSYNNKVLVFSSENQVKREKTPFEAFGNNANKWNSIVSFVSGNKAYTYTKTNAKTNKKELCFTKKGQRILDENFKTKEQGFIQRNLVDTSYIANVVRDYIDKNVKFLPLDNKELLQSSMFFELDGYNEKDDTKKEYKRKHIEIISGNLTSMMKHYWGLHFLDKKNEFGEYEKDRSHHLHHALDAIIISYMNASRVKAFADFKKRLETMKASEYAEKLSEAEREQKRIKRKKSTFEVPANYANRNEFADKIKEKIFGIFVSQPPNKRTRGALHKESFYSQKDTSLINSKDTMEDALKLGKVRQIGTKIVSNANMVRLDIFKRKKDNKFFGVPIYTMDFAKGILPNKAVGTKEWIDMNEDYEFLFSIFPNDLLYIKKKGMEKAELCYYVKFNIANGAMTFKTHDNRLQSLTENQIKLYGTKIPTEENVQGVVGIQNLEIFEKWQVSPLGEVKKAKFKKRENISLKSTPKNTKHSMPNSNLETQ

SEQ ID NO: 8995 - protein, 919 aa, unidentified
  REGION 1..919: note = Description of Unknown: Cas Enzyme sequence
MCFYAMIPQEEKALRTKKRRFRKTKPPLLMFSQRNNPYCELLQISAAKIRFFSKPHKLFKDFCTFGCKKKKIIQQMKKILGLDLGTNSIGWAVVNEAETADGEKKLVGIECAGSRIIPMDGSIIGDFEKGNSKSQSATRTAYRGTRRLLERHLLRRERLNRVLNIMGFLPSHYSKMLTRYGKFIENTEPKLPWDDGKFLFMSSFEEMCELFRASTNNPEIKVPYDWTIYYLRKKALYAALTKEELAWVLLNFNKKRGYYQLRGEETESKNQRIEYCCLNVVKVEKGEDAKDGTWYSVYLDNGMIYRRKSKYPLDWEGKSKEFIITTDLDENGNERKDKEGNVKRSFRSPKEDDWTLLKAKTDADILQSKKTVGCYIFDALLQNPSQKIVGKLVRVIERKFYKDELRQILDKQKEFISELNSKQLLERCAQELYTVNEQHRDIVSQRDFTSLFIDDIIFYQRPLKSKKSLIANCQYEYHSYKKLDKNGKYIKDENGNDLLFNSPLKCIAKSNPLFQEFRLWQFISNLRIYQKEKYDGNKLHTDVDITTQFLKTEEEITALFDWLNTLQSIDQKKFLQYPPFKLKKEASKYRWNYIEDKQYPCNETRYTILSGLKNAGITDTLNQEDENALWHILYSISDKNELKSALTKFANKHSLAMEFVEVFSKVKPFNKEYGSYSKKAIKKLLPLMRVGKYWSKDTIHEETVRRIDKLLTGEFDETIKNKIREKTINLKRIEDFKGLPIWLACYVVYGRHSETKDITKWETPEDIDNYLKKFKQHSLRNPIVEQVVTETLRTVRDIWKQVGHIDEIHLELGREIKKTAEERKRLSDTIIENENTNLRIEQILSELAEDGIKQIRPYSPSQKEIMKIYESYALNNDKKDEGKTLSKSSISKYKAWLEQKYQSPYTGETIPLSQLFTPA

SEQ ID NO: 8996 - protein, 1077 aa, unidentified
  REGION 1..1077: note = Description of Unknown: Cas Enzyme sequence
MKHPYGIGLDIGIASVGWAVVALNENAEPYGLIRCGSRIFDAAEQPNTGESLAAPRREARSTRRRLRRRSLRKADLYELMAQNGLPGRAEIEEAVQAGHLPDIYALRVQALDGPVTAMDFARILLHLMQRRGFRSNRKADDAQKDGKLLQAIDANTRRMEENHYRTVGEMMYRDPVFAEHKRNKSENYLSTVRRDQIVEEAVQLFAAQRQYGAAWASPEMEAEYLTILTRQRSFDEGPGGNSPYGGNIVEKMVGTCTLEGQAEPRAAKATWSFEYFTLLQKINHIRIIESGAARILTAEERQELLSVCYQTDKLDFARIRKALALSEQARFNMVRYRDGQTTEDCEKKEKIVCLPCYHKMRKVLNTLRKDYIRSVSRDRLDAAATALTMYKNEATLRAKLEEAQFEPLEVDALMTLPSFSGFGHISVKACRKLIPYLEQGLNYNDACKEAGYDFQGNYRGEKSQFLPASTEEMEDITSPVVRRAVAQTIKVVNAIIREQGESPVNIHLELAREMSKNYKQRNELADAMEKNQAENARLMEELHDLFRGRTITGQTLVKYRLWKEQKEVCAYSLQMMKLDSVITDSSYAEVDHIVPYSRSFDDRRTNKVLVLTSENRKKGDRLPLEYLQGKRREDFIVYTKANVKNYRKRQNLLKEGLSKEESREFIQRNLQDTQYSASFMLNYIRNHLAFADCSAAGKQRVVAVNGAVTAFLRKRWGLSKVRADGDLHHAVDATVIACTTPSMVKRVTEFCKQEETNHVCNEYFPEPWPRFRDELMQRLSACPQENLMQINPVYYQNVDIASIQPVFVSRMPRHKATGKVHEDTIRSYVSKGITAVRTSITDLKLDEKGEIEGYFNKESDLLLYNALKRRLEEFGGNAKKAFAEPFYKPRADGTPGAQVRKVKIVDKTSNVICVRDGGGVSKSNNMVRIDVYYVPGEGYYWVPIYVADTVKSTLPNKAVLRNKGMDDWKEMNEKDFQFSLYNNDLVFIERDSPINFSLTNEKSTLPSKFSTERTFVYYQKGNISNAAIKVETPDGAYVFNGLTLNTVRKIGKYQVDVLGNYTLVKKEKRQNFPAQRR

SEQ ID NO: 8997 - protein, 1029 aa, unidentified
  REGION 1..1029: note = Description of Unknown: Cas Enzyme sequence
MRIFGLDLGTTSVGFAVIDIDETREAGKILRLGARIFPEARDTDGAPFNQIRRMKRMMRRQLRRRRARRRSLNELLASHGLLPAFGTREWAAAMAIDPYDLRARGLIAALEPHELGRALYHLAKRRHFRERDVAEGGEEKEAPKAEEAEQASARENLIARLKQSGQTLGDYLAGIGKDQRKRGVHATRAIVEDEYKRLLEAQSAHHPVLNDRAFRGALEEAIFHQRPVFWRKKTLGACRYFPDAPLCPKGSWLSQQRRMLEKVNVIEIRGGNERPLAPDERSAILAGLSTQKSMTWAGVRKALEPLFKARGESAKGLKFNLEYGDEKGGLKGNIVEAELARIFGPQWRGYDKKTELRRFLPQARREADYGEIGDQRVVIRPEKDRQTRRRALVALLVSDFGASPAQAEELAKLDLPQGWEPYSTQALEIFLPELEKGEKFGTLTNSPEREAWRDEHFPERERPTGEVIDRLPSPKDKDEALRLSKLRNPTVVRVQNEMRKVVNNLISVYGKPDLIRVELVREVGKSKKEREEISSAMRAQERRRKDAHKELEANGRANPSRDDIEKYLLWEESGKQCPYTGDMIGFEDLWNGRFEVEHIWPRSISFDNSFANKTLCRKDVNAAKGDRIPHDYFKSRPDDWEIVKDRIWKMFAQKGMSPGKAKRFTSSEIPEKFKSRQLTDTGYAARAALQSLQRLWPDVGEKAPVNVRVVTGRITAQLRRGWGLNNILSDDGEKTRADHRHHAIDALVVACADEGQIQKLSRWLKARDEGQKPHLPEPWPEIRADAEKAIKKIVVSHRVRKKVSGPLHLETIYGDTGKDERTKTGAYRLFVTRKPLERLSNKEIDKIVDPKVGQIVRDWVSENGGDPKKAFATLPRHGENGPEIKKARIRIKQQVSLMAPVSTGFADLGNNHHVAIYRMPDGKIRSSVVSLFEATGRLARKLPVVERAPEDGSVFVMSLAQGDTLFFPDGAMSGYWSVQSIWSAGPIVLHRSEDSEGISVIRPVAASILRDGGRKVSVDPIGRVRPAND

SEQ ID NO: 8998 - protein, 1115 aa, unidentified
  REGION 1..1115: note = Description of Unknown: Cas Enzyme sequence
MYSGAGGIFDVKKIGGNIMNYVLGLDIGIASVGWAVIDLETLQVIESCSNIFTAAEAENNKDRRSFRQMRRLKRRLRTRISDFAKMWKSLGFSIPGDIDNMPLLLRVKGISEELSMDEIYTVLLNELKHRGISYLEDFGDNANDGTDYSKSIAINQKELEEKFPCQIQYERYCKYGNYRGQFVADINGEKVTLCNVFTTSSYRKEITSILDTQKKFHSEITDKFIENYMKIFDRKREYYVGPGNDNSRTDYGIYTTKLNDDGTYKTDKNLFEKLIGKCSVYNEELRAAAASYTAQEFNVLNDLNNLIVNGRKLEEDEKHKIVDTLKTSDSINMRKIIKKIIGEDIETLEGARIDKDEKEIFHCFEMYNKLRKELKKIEYDINLLSRDTLDDIGRILTINTERDMIVNSLSELGLDNDVVNCLADVRKKNGKLFSKWHSFSLKIMQELIPAMYEQPKEQMQLLTEMGVFKKKGDLFKNCQYIPVDIVKDDIYNPVVVKSIHIAIRIVNAIIKKYGMPEKVVVEMPRERNTEEQKKRIKDTQKKNEKELEEITKKIYAEYELRIEDKDFRNHKGLALKLKLWNEQGGVCPYSGRKIDIFDLVNHPDMFEVDHIIPLSVSLVDSRINKTLVYKVENQEKGVNTPYMYLSKITRDWGWEKYKNYILGLKIEKAKKANYLFMEDITKYDVLKKFINRNLNDTRYASRVILNTLQDFFSSKQTGTIVKVIRGSFTHQMRVNLHIEKDRDESYSHHAVDAMLLCYSQLGYDAFHKLQGSFIDFETGEILDKRMWNENMQEDVYKDYLYGNKWSQIKRHIEDAEKKVKYWHAVDSKCNRGLCNQTIYGTREIDGKIYKISRTADIRTKSGFESLKKLLAESYGKSKKNDILMYRNDPKTFQILMDIMKQYADATNPFVKYEEETGDVIRKYSKKHNGPKVTKISYMDGEVGSCIDISHKYGYAKDSKKVILESRVPYRMDVYYNTKDELYYFVDLKQSDVKCKGNEKVINIENYKRSLVMEKMISDDQTIEDLEKQGFKFKLTFYKNDIIKYEKNGRIYVERFHSRNLTARNYIEIKPINAEKFDKPQVRVGLSKTKMVKKIRTDILGNYYECEQEKFSLICK

SEQ ID NO: 8999 - protein, 1087 aa, unidentified
  REGION 1..1087: note = Description of Unknown: Cas Enzyme sequence
MLRMKYAIGLDIGIASVGYAVLALDHEENPWGIIRLGSRIFDVAENPKDGASLALPRREARSVRRRLRRHHHRLERIKNLLINTELITKDELLHLYDGNLSDVYELRVKALDYSVTNAELTRILLHLAQRRGFKSNRKSDANDKEAGQLLEAVSANTKRMQENHYRTVGEMFYKDDLFSKYKRNKGGTYLTTVHRDMIADEAKAILEKQFDLGNDICTQDFIDKYLSILLSQRQFDEGPGEPSPYAGNQIANMIGKCTFEPNEYRAAKASYSFERFNLLQKVNHLRLLLEGKSIALDNEQRKKIIALAHDKADLRYSHIRKALGLDEKVLFNTITYNDDVSVIEKKTKFNFLPAYHQIKKVLAEDIQKLTTEQLDNIGQILSTYKSDNKRTEELSALGLEKKIIDALLGINGLSKFAHLSLKALRKINPYLEEGKIYNEACAAAGYDFKAHANTQKTELLPAYKEEMDDITSPVARRAIAQSIKVINAIIREQKCSPVYINIELAREMAKGFDERTQIDKANKENQAKNERIMERIRTEFHKSNPTGMDLIKLNLWEEQDGRSPYSQKAISINRLFEPGYVDIDHIVPYSTSFDDSFKNKVLVFSDENRDKGNRLPIAYLQSKFGAKAAENFMIWVQSNIKDYKKRQKLLKREITEEDINKFKERNLQDTKTISRFLYNYINDYLLFAPSDTGKKKRVTAVNGTITAYLRKRWGINKIRANGDKHHAVDAVVIACTTDKMIKDLSSFSQYHELEYTHTDKESLIVNSLTGEILKRFPYPCEDFRPELMARLSDNPADALRKLNLIFYHGTDLSTIKPIFVSRMPRHKVTGAAHKATIKSARCLNNGIVICKTSLQNLKLDKEGEITNYYAPESDTILYNALKERLRAYDNKPAKAFAEPFYKPKADGTPGPLVKKVKVYEKSTLNVAVQQNTAVADNDSMVRVDVFHIKGKGYYLVPIYIADTLKKELPNKAIVASKPYADWSVMDDSNFIFSLYPNDLIKFEHRSFKVFNKVNKDSNLSDTFESKIQYAYFKSADISSASIRIITHDNTYFIKSLGVKTLSKLEKYQVDVLGNYNKVKKEVRKPFR

SEQ ID NO: 9000 - protein, 1260 aa, unidentified
  REGION 1..1260: note = Description of Unknown: Cas Enzyme sequence
MKILGLDLGIGSVGWALIETDDSRNPIRIIDMGCRIIPVSPDETKNFEKGSAETINGKRTFMRSARKRNYRYKMRRSLLKATLSALGMIDQKSEVALRSLSPMQLWQLRADAATPGKQITLAELGRVLMHLNQKRGYRHAKTDGNDSKQTQYVQGVNRNYADIKDLGMTIGQYQYSKLKESETHTAKGCSFVMHQIRDTVYPRQAYMEEFDTIMQVQARYYPAILTDEVIARLRDIIFFQRPLKSCKHLVSMCEFESHVVHKKADGSAVTVGPKVAPRTSPIAQATRLYEAINNITIVNSANRGNKDVKLYDEADFFNGVVPVALRKKDYVYRLNAEERQRIFDYLNTNEKLTATTLLKLLGLKKSDGFVPDKAIGRGIKGNDTYVRIASALGDYPGKEELLKFDLDIVDSGVVNADSGEILSIVSADVIKQPLYRLWHLLYSVSDKDELAGALGKQFGITDPEVVDRLCAIDFVTPGFSNRSAKFMRKLLPRLMDGITYADAAGAIGVNHSGSITSADNAQRPLDDRLKLLEKNSLRQPLVEKILNQMINVVNALVERYGAIDEARVELARQLKQSSEERVRATQSISKNEKENADIEAKIREFGIRPSRSRIQKYKMWEESGKVCMYCGIEVKDKEFLESHDAEVEHIIPRSLYFDDSFANKTCACHKCNHDKGNRTAYDYMSSLGGDKFAAYEQRVDNLYADGKISRRKHSYLLMKQSEIPTDFIERDLRQSQYIARKALEILRGTIRNVWASSGAVTGFFRHAWGYDNILHDLNVDKYQLAGLVENEEYEHRGQKHVRARIKGWTKRLDHRHHAIDALTIALTTQGYVQRLNNLSSQHGNLFDDLTQENVELRDNSSLLTKWAATRPHFTVEDVASRVSEIAISLKRGVRLATPAKRYIRRGGKRVLSQTGIVVPRGSLHEESIYGRIRVYDGAKAYKDAFQNPHLVVNNEVREEIERRIADAGNDVAKALKALKKSPFTVVINGEQHTLDTIPCYREEIVLRYKVDGLKATDVKYIVDKAVREAVAERYDECGGNQKLFQNSVNADPICLKGSPMPIKSVRCMTGLNAGSLAGVRKDGSGKIIGLAKTGDNHHVAFYRDENGKECSMITSRWGAIRRKLNGIPAVVTDPAAAWVRLEYIADEAVAAEIAASLPMPGWQFIQSMRRNDMFVLGMGDEAFADAVAAGDQSTLARHLYRVQTISNSDYRFRGHTETTVDESNEAKVMKSVLRIQSSGALAALTPRKVKVSLTGEIIPL

SEQ ID NO: 9001 - protein, 1118 aa, unidentified
  REGION 1..1118: note = Description of Unknown: Cas Enzyme sequence
LPIVPTIGMPDTTDKIPQNLRGDNVRWRLGLDVGTDSVGAVAVELDDLGKEISVPWHLVRIFQEPNEKRQTGLTPKKDARRLARQQRRQLERRLRRVRKVAHLASLLGLDRNHVRADGDKGRELPELRAMAARERVDLPDLLRIFLRMAKRRGYAVGSGREMWFVQQGSSALQKKMAALSEKRQLPFVTLGEFLRERIRDGLPGRLKVRREGITDLVALRKMLEDEFDHIWGVQQGHHPIMRGEHKGRAVKDWFREALFNQRPLKSASTSVGLCPLEKNLPRAPRAQMAAQRFRIEKTLTDLRWGVGAHAEPLADKQREILRHILDSPELLTNEASISFQKLYKILEEEGCPAPEGRTLNLDRASREELRGNTTLKAFSRLGLLERWLVLDDKHQTAVINLLADLGSPKQLDTNDWHQKFLRARAKPNDPHRFRRFASEVIAFVDFLRNCKAHGRLTDMGFEPGRMAYSVKALSRLSDWLRNPAWREAPGSDARVDEDAAVRECYTEALAARESRCELEFPPKTGNDTVDVALAQVHWVIKDAIRSLGSPPAEIIVEFGREVGLGAARRNEWENRSAKNQLDRRKARDKIVANGHTPTSVAIRRYLHWQEQSTHCPYCSQPISLNDALDGHKTHVDHIIPRVLTQVGRKRSELVIAHASCNSLKGDRTPWQAFGGTDKWAIVEERAKEFEKKEQYRKARLLRLRDFEQEALTDSSIAEFVDRQLHQTSWIARVAARWLQSLCPNVFAARGEFTAMMRRSWRLDTVIPEVRFAHGRAVLDTEGNRISRQQFDGLRSSWEGHGRALDVVLEKRLDHRHHVINALVIALCSRRTYVKLVANYKAAIESRDHVLQSRQPRWQVEPPLTNIRATALRMVRECRVSHKPDRFASGKYFQDTAYSEVQQVDRIGNTRGALAVRTLISKLADEKSLEKTRKNIDRIVSSEIRDLVRAAFEQRLAAGDTPKQALSRPVHYPRYGTEIRHTRVIREYVSLDEAEMVQFKSRGGIHTKLLLPNGHACVEVSGTGKWIKSRVLSLHEAARTLARRETDGVRRFFKCDTVIDRKDGTTLVVKQIWPKSGGLLVLVPVYESRPVRNLTWDDGLRKIGGSDLNRLVLTNVIPP

SEQ ID NO: 9002 - protein, 1220 aa, unidentified
  REGION 1..1220: note = Description of Unknown: Cas Enzyme sequence
MEKVLGLDLGTNSIGWAIIQREGDCCTLIDKGVSIFQEGVAREPGAKKPAVQTRTDARALRRAYRRRRKRKIDLLRVLVDHELCPPLTHEQLDLWQQKKRYPLDEAFLAWQRTDEATGRNPYRDRYRALSEQLDLTGEKGRYTLGRALYHIAQRRGFLSNRRDNTAESDGKVKQGIDSLTEAMKAAGCRYLGKYFYMLHGKGEKIRNHYTSRNDHYRAEFDAICSRQQLDPTLTDKLRRAIFYQRPLKSQKGTVGKCTFEKGKSRCPLSHPRFEEFRMLSFINNIRITTPYDFGANRPLNEEERAAAIRMFMRKSKSKPTFDFEDIAKALAGRKRSYAYEEDAGEAPYRFNYRMSTSVSGCPTTAALADIFGEDWVSGICSLYTRAEGKTKERIVDDVWHVLFSFDDDDKLRQWAAERLQLSEADAEKFAAITPKQGYAALSLNAIDKILPYLRAGRRYDEAVFCANIKAAVPAEVRRDEQLLGRITDEVSRIVADFKPDPTIKADTKQSRIEGCMREHGIEADMKKLYHPSMIETYRKAEAGDDGLVQLGSPRTSSVRNPMAMRALFRMRALLNRLLREGRIDPMTKINIEFARGLNDANKRKAIEQWQREREKENKRYAQEIRKLYEEQTGSPIEPSEEDILKYRLYEEQNHICLYTGRQISITDFIGSSASCDIEHTLPRSRGGDDSHMNKTLCDNRFNRETKCSKLPSELSAHDAIMARIESLGWKQKIDDLRKQIETASRRSKNATTKEDKDKAIQHRHKLRMQLDYWQGKYERFTMTEVPEGFANRQGVDIGIIGRYARLYLKSVFERIYTVKGATTAAFRKMWGLQEEDSEKERTSHAHHCIDAITVACIGRNEYDRWAQYAAQEEYYRRCEGVKPSFDKPWPTFTEDVRAVADELLVAHSTPDNMSKPTKKRLRKRGRIVSGDDRRPIIVTGDSARASLHKETFYGAIKRDDEIKYVVRKSLSDLGEKDIDKIVDEAVRQKVKDAVERLGFTQAVAGTIWMNEQKRIPINRVRIFVPTVTAPIKLNKEHRDLSVKEHKRHYHVVNDGNYCMAIYEGQDKKGRPKRSFKIVDNLTAAEYFKASADRSERPDLVPRSDACGNPLRCILKTGTMVLFYENSPEELYDCSKRELAKRLYKVRAMANEGRIVFIYHQEARDDKAVTAECGNGISQFDPKNPPAKLRLSVSKFNMLVEGSDFELTVTGEIRFKHRSHD

SEQ ID NO: 9003 - protein, 1024 aa, unidentified
  REGION 1..1024: note = Description of Unknown: Cas Enzyme sequence
MRILGFDIGITSIGWAYVEGEELKDCGVRIFTKAENPKNGDSLAAPRREARGARRRLARRKARLNAIKRLLCKEFGLNLSDYLANDGKLPKAYQTNKDTKSPYELRSLALEQKLEPKELARVILHIAKHRGYGNKHAKTGSDKDSGKVLSAIKVNETAMKDKYQSVGEYLYKEFYQKLRLESEKKGNNITKEFKNVRNKKESYEHCVAQEQVRAELELIFAKQKDFGATFSKNFESQIIETAFYQRDLKSFEDKVGKCVFYENENRAPKDSLSAMEFVALTRIINTLKNLEKKSKNLGIGETYGKDKIQEILKNVFDKGEMSYKELRKILKLNESILFAKDSKLDYTKGMQEAEKAKFIELKNLKAFKKAMGGDFSKFPREELDKIATDIVLIKSKENLAKKLQNYSALSKEQVEALSNLNFAKHIDLSLKALDKILPFMREGLSYDEAVKKVGLQEHRKYKQKGEFLIPLKEYEPYLANPVVARALSEYRKVLNALLRKYGNVHKIHLEFTREAGKNYDERKKIEKEQREHFEANQKAIQQCEILGLPINGANILKMKLWIEQGECCVYSGEKITSKHFFDSNALQVDHIYPYSRSFDDSYMNKVLVFAKENQNKLNKTPFEAFGNNKEKWDRILSLSANLPKQKQRRISNKDFKDKELGFIARNINDTGYIARLASQWTNNCLKFENLSENEVTIAGEKGSSVHIEVVSGKLTSTLRHYWGLGDKDRNNHLHHAVDAVILAYTNNAMIEAFANFKKTQEQNKRKFYAKQIAESEYKAKKAFFEPCKDFRSKVLEKIDSIFVSKPPRKRARGALHEETFYSFEDEKLLKKYGGKQGVQKAIALGKIRQVGTKIVSNGAMVRVDIFKDKKGKFYAVPIYTMDFALGILPNKAVVQGKSKEDGVIKDWIEMDSNYTFCFSLFKDDLILVQKKEMEKAELCYFVSFGSANAQINVEKHNNKFEGLSENEKILYSNATQKEVVGKSIGIQNLKTFEKYQVSPLGEMQKAEFEPCQDIALKSSPKRKN

SEQ ID NO: 9004 - protein, 1436 aa, unidentified
  REGION 1..1436: note = Description of Unknown: Cas Enzyme sequence
MKKNILGLDLGTTSIGFAHIIEGNTPEQSSIVQIGVRVNPLTTDEQTNFEKGKPVSVNADRTLKRGARRNLDRYQDRRKNLIDALLKADVNTKDTILAENGKNTTHETWCLRAKSVAEKIEKEELARVFLAINKKRGYKSSRKAKNEDEGQVIDGMAIAKRLYEENLTPGQLAYQLLKEGKKYIPDFYRSDLQAEFDKVWIFQKQFYPEILTDDFYKELQGKGQRATSASFWGKYQFNTAENKGNREEKKLQAYKWRSEAISKQLEKEEVAYVITEINNNLNNSSGYLGAISDRSKELFFNHLTVGQYLYNQLKNNPHTRLKNQVFYRQDYLDEFEKIWEVQSKHHSKLTDELKAEIRDIIIFYQRKLKSQKGLVSFCEFESQEKIINGNKKRIGLKVAPKSSPLFQEFKIWQVLNNVLVRKKGSKKRAVKQSDQATLFDEEKEIFVFDLETKQRLFDELNIKGNLKANKIIEFLGYKSAEWEINYSELEGNRTNKALYDAYLKILELEGYDEDLLKLQGKDDINVSELKASASEIKDMVKRIFEVLNINTEILEFNAELDGKAFEQQASYQLWHLLYSYEGDDSKSGNEKLYELLEKKFGFKKEHAQILANVALSDDYGSLSTKAMRKIYPHIKELHYDKACELAGYRHSASSLTKEEIVNRPLKDKLELLKKNSLRNPVVEKILNQLVNVINTIIETNSKKDENGKITEYFKFDEIRIELARELKKNAKERAEMTTNINASKIAHEKIFKLLQTEFGIKNPTRNDIIRYRLYEELKNNGYKDLYTNTYIPREILFSKQVDIEHIIPQSKMFDDSFSNKTVVYRQTNLDKGNQTAYDYIESKFGDDKAEEYKARIEALYQLGIKSKEDGISKAKYQKLLKKESEIGDGFIDRDLRDSQYIAKKARNLLYEICRVVTPTTGSVTDRLREDWNLINIMQELNFEKFKALGLTEMVEKKDGTFKERIVDWSKRNDHRHHAMDALTVAFTKHSHIQYLNYLNARKNENHKLHSNIIGIETAETEIRIDDDGNKKRVFKLPVPNFREQAKEHLENVLVSHKAKNKVVTKNKNKTKSKNGEKVKIELTPRGQLHKETIYGKYQYYVNKEEKVGTKFDEETINKVSNPLYKKLLLQRLSENGNDPKKAFAGKNALSKTPIYLNEEKTETLPETVKLTWLEEDYSIRKDVTPENFKDEKSIEKVLDKKVKDILKERLKTFGSDAKKAFSDLDKNPIWLNEAKGITIKRVTISGVKNAQFLHHKKDHLGNYILDKNGDKIPVDFVSTGNNHHVAIYRDEKGNLQERVVSLFDAVQLVNAGEPVIDKQYNQGLSWKFLFTMKQNEYFVFPNEKTGFNPKEIDLLDSKSKKLISPNLFRVQTLSIVEYGNSTVRDFKFRHHLETKLEDKRELQGVTFQQLKSLPPLENIVKVRINHLGDIVSVGEY

SEQ ID NO: 9005 - protein, 1114 aa, unidentified
  REGION 1..1114: note = Description of Unknown: Cas Enzyme sequence
MKILSLDLGVTSCGYSVMQELEKNSYSLLDYGVVMRDNPHDGGTQQERREKKQSRSLLDKKKKRIKSIKQLFTSHNLIYKEKNRYDIWKLRAIDAFERKLDNDELFAIFRFMAKHRGYKSLKIEDLIAELEAKEKIGDCQSDEIQVPKDLEKFSETLAYLDALKCKHKDKTAAQIIWELESKKESPTFRNHGNYRYMIRREDIKKEIEKILEAQQKFDFFESDELATKFANEVINIIIPQEAVTLNPENINKCLIYKDEISAPLFSYSFDMFQLYKLLGDLKIDGASATLEQKEQLREALLEDINSLKCKSSYSVKDFKKILGIDNEYVKINNFQEYKMLKGKKEANTLVKFNFLPSFKKLNNDILNTILREKSVVEIFDAIATEIHLNVNPEKLLTNIEILFKKYNLEFSKDETRDFTLALHKNKVSGTSNYSIKALKDLTVLIQEGKNESNAKEILGVSKSENYSHFLKGIRYLKPQSKDGKLQYEIDENRISNHVVKSLVSWALRVIIDLHDKYGSFDIIKLESTRELSQPDDVKRDIKAANDRNEKEWQELIEKYKKHFEAKELNPQNNKEYLLKLKLWEQQRELGIYSHKPLSIDEVLSDKTEIEHIVPRACGGSNAEYNKALDLKDENAKKGNKLPLDYLSGDKREIYINFVEELKKGYKINMKKKINLLAESLDKTFKEVKDDVSLHATSYTEKLLGEILKRYYPFTDRLKENQRAMSISGRATSYLRRILSVDNKSRDTNFHHAEDAILLGLMSKSYLQNISTNFEKNYELTEQNAKENFKKIVPLIEGTSPNHIIAHIRESYMQNMEENPFYKVLDGTLKTPAFWVSKKPIGTKAHNETIQSKKNLAYYVPVASLLDKVKPNHKMSTDEFYQKFNKEIYEKIQVAQDNPKDFTAKVFAQKRDTIVNILNQSAFASTKDEKADLDKKLRDVMSEPLYDVNGNEIRRVKRVGEDASIEVRGGLAYTAPSLVCLRCSFVDDKKLKLQRIDIRSYVKNKVSEHNQIDVFNNDLVEIFVEKSKKLEQNSFGLLKGFTESGIRINLRHPKYPLLIEKQPKLFASKFSIGSACGIKKYKTDATGKVLGFYYLGRVLDDEKELFAKILSYKAL

SEQ ID NO: 9006 - protein, 1066 aa, unidentified
  REGION 1..1066: note = Description of Unknown: Cas Enzyme sequence
MGKLVLGLDIGITSVGWGLIDIETDEIVDKGVRLFPEGTAAENLKRRTKRGGRRLKRRRQQRIIDLKKLLKKHNIINDDFVALNNPYEIRVKGLSEQLTNEEFATAFLHIVKRRGSILDTIEDDESKLKDDQSTKAVLTSNEKYLRQKDYYICQLQLERLSNGENIRGTYNNFKTSDYLKEAEAIFKNQEITNDLKKDILELIARKREYYDGPGSKNSPTPYGQWFYDKNGKIKHMDMIEKMRGKCSIFSDEPCAPKMSYRADLFNFLNDLNNLKVDGEGITTEQKNEIINEYINKKGEISPKNLIKYLGVDEYLVTGFRIDKNDNSLLTEFKGYKKILSVLKKNNSPKLKEIVENKEYVDKIIDILTRVKGITDRVSAIQEIDPNLFEKEVAEQFANISGITGYHSISYKAMNIIIPELMATNDNQMQILTRTGLINKGKKSNLKGMKNIPFDDEAILSPVAKRAQNESLKVINAIRKQYGELDSIVIETARDRNSLEEQRKITESQKRGEELNKKCEVIAKGVKLNKVLRHKIRLYMEQDAKCLYSGKPIDLYRLLHDPKAYEIDHIIPISISLDDSMNNKVLVLSEYNHLKGNATPFKFLKSGKSSGWSYEEFKTYALALKKNNQISRKKLNNLLFEEEITKFSVRRKFIERNLVDTRYASRTILDTLTNYFNANSIDTKVHTVRGAITNIFRQKSGLIKNRDYFYHHIVDALIVAGIKKQGYLNKLLLENQIKYDEETGEVLNIVSENEFFDSGYIRFISKLKKLNDYIIYDGEYKISHKVDRKPNRQFTDETIYGVRSVDGEDKILSKYKNIYGDEGIKLAKDIRESKFDKILMSKVDPKTFELLKNIVYNTPIDKEKKELNPFEIYKNEHGYIRKVSRYNDGPIVKSVKYYLKRLKSHVDISHKYNLNTNKTKVALLQVSPYRTDFYKDSVGLYKFLTIRYANIYTNKDGYYINKQWYEDELNRRGINSDFEFQFSLNRNEFVEICKQEKDYRDMMLYRFVGTNSEEANKVEVKPLHFNTNKDNRIKITINKTIVNMTKYHSDVLGNLYKVEKEALKLKL

SEQ ID NO: 9007 - protein, 1125 aa, unidentified
  REGION 1..1125: note = Description of Unknown: Cas Enzyme sequence
MKYNYRIGLDVGIESVGWAAIEHDNEENPCRIIDLGVRCFDAAEVPNEGKSLAQPRREARGARRRLRRRAHRIERVKSLLLRYSFLSEEELDKLYDKESFLPNASYPQGFSVYRARYLALEQKISNADLARVLLSIAKRRGFKSNRKSETKKDKDGKKMLSAVQENQALRIEKGYRTVGEMLYKDDAFREQYYNSSNQSFDKRLKVRNANEEYSKTILLDEHVEEIKTIFKCQREFGNILPEAFCQEYLDILTSRRAFDEGPAEPSKYRGSFKVGDCTFEKDEKRASKGCYSFEYFRAMQNVVNIRLSQSLGKRGTPLSDEQRKTLIAKIKSLKICKYQQARKELNLPDEIKFSNLNYNIYDRAKQCYKNPEEKEISNFKNSWEIKKVIKGASIEELDEVANILGLNKSDDRIEKALSESTIIRPLSKEQIEQLQGISFNKYAHLSLKALRKISKVMEERGLTYDKACQEVGYDFKAHPQDGRTEFLNTKEIYEQVKNIANPVVRRSISQTLKVLNAIIREYGSPQAIIIELSREMAKNYKERQALQKMQLENYAENENIRKEVQEIKSNAVGIDFLKYRLFKEQGGLCPYSGAKLDPSRIFEIGYAEIDHIIPFSRSNNDSYLNKVLVLKKENQAKKNMTPYEYFTSIGRDFSKLEAFFADNRINNRKKRSYLLIKKFTQKDAMEMQERTLTDTKYAARLLKNLIQDFLIFKQSKTFSASPVITVNGSVTAFLRKRWGLNKIREEGDLHHAQDAAVIACTTRSMIKRVTVFFQRLEDPYAREYVDYETGEIISRDEYFERYSQDFPRPYANFKKELEIRLFNDPLQECYINELIKMGYDQDDLKDVHKVFVSRMANYKKRGQMYDSTIYSAKFQDTDGYVVRKSIKELKFKNGEIENYFRPESDTITYNILKERLKEFGGNAKEAFAEPIYKTKKDGSRGNPILRVKVTEKGNQHLLKDSNKSSVGKATQLRIDFFKKKGKYYMVPVYVYDYYKNNLPNKAIKAKTPSSNWIEMDESFEFCFSLYPYELIYVHKDAGFSMKSVGDELLKKKDKSIEVRSRNLKSEYLYFAGINSANNSSKVFSHDKSFVDEVSFRGFNTIKKCRINFLGRVKVIETNEKRKQLR

SEQ ID NO: 9008 - protein, 1352 aa, unidentified
  REGION 1..1352: note = Description of Unknown: Cas Enzyme sequence
MKKHILGLDLGTNSVGWALVSVDEDGKPYNIAGMGSRIIPMSQDQLNNFDSGNSISQTAERTGYRSTRRLRERHLLRRERLHRVLNVLGFLPYHYLSQIDFEKRLGKFYTDMEPKLVWEEKEDGKYKFIFQSSFDEMIVDFKEKQFDLFENGKLIPYDWTIYYLRKKALSQKIEKEELAWIILNFNQKRGYYQLRGEEEEENPNKLVEFHVLKVIDVIPDEKPNSKGDIWYSLHLENGWVYRRSSKTSLADWKDKIKEFIVTTDLNGDGTIKTDKEGNEKRSFRAPSADDWTLLKKKTEVDISKTGKTVGAYIYDTLLENPTQKIKGKLVRTIERKFYKEELGQILQKQKQFHPELQDEGLYNEAIRELYRSNKSHQLILAEKDFVHLFIEDIIFYQRPLRSKKSSIANCPLEFRQFKDKDDIKQVEYLKVAPKSNPYYQEFRLWQWIYNLAIYRREDDTNVTKEFLNSDEDYDGLFSFLDNRKEIKQKSLIKYLLELKGYKGKLLNLEIAKYRWNFIDDKEKTYPCNETKTLITSRLSKVNNIPDNFLDRQTEQQLWHIIYSVIDKVEYEKALKSFAKKNGLDVASFVDNFRKFPPFKSEYGSFSEKAIKKLLPLMRIGKYWKWKDINEHTKSRIEKIITGEYDENIKERVREKAIHLRSETHFQGLPLWLASYIVYDRHSEPNIVEKWNSVNDLEKYLQEFKQHSLRNPIVEQVITETLRVVKDIWKKYGECAKDFFSEIHIELGREMKLPAEERKKLTNRVLENENTNLRIKALLSEMLHYPEVENVRPYSPMQQEVLKIFEEYAINCDEKYNSNTNNFEYDPISDDILKISKTAQPSSTELRRYKLWLEQRYRSPYTGAVIPLNKLFTAEYEIEHIIPQSRYFDDSFNNKVICESAVNKLKDNQTGLEFIKNHHSEIVQLSFGKTVKIFEEDEYQKFVKENYTKSRSKRDKLLMDDIPEKMIERQMNDTRYINKEIISVLSKIVRSESNDDGINSKNIVPLNGKITTRLKQDWGLNDVWNDLILPRFERMNELTGSKDFTTYNERYQKYLPTVPLEYSKNFQKKRIDHRHHAMDALVIACTTRDHVNYLNNQHALDRNKKKEEKDRSRFDLRSKLCFKNKEGDKGSYSWQFYKPWDNFTVDARNGLEKIIVSFKQNLRVINKSVNYYQRYIDGEKVVDRQTKGDNWTIRKSMHKETVSGKVDLPWFKVSKGKILTATRKSIDTSFNTKTISYITDTGIQKILNNYLASKNGNSELAFSPEGLENLNKNITQYNDGKSHQPIYKVRIFEPGSKFSLGETGNKKSKYVEAAKGTNLFFAIYADKEGGRSYETIPLNIVIERLKQGLKEVP

SEQ ID NO: 9009 - protein, 1429 aa, unidentified
  REGION 1..1429: note = Description of Unknown: Cas Enzyme sequence
SGKAFPQNDAFVEWLKMNPYLLRHKGLREDLTLHEFGRILYHFIQRRGFLSSRKGKAKETGAIYKGKDNMEGVESTRALLQERTLGETLYEILPKDGEAFYIRKDIDGKEVRVRARYTLREMYVEEFEKLWQRQVGNLGLLNKSVAVKRKVFIKGSFDQKRNQAKLSHLISRYGKEQVNVEPNYIEVRTNKPLKEFLAGEIDQTEEGIRFKSNDSLLFWQRPLRSQKSLLSKCSFESRKFYDKKLEKWIVIGKSPSYVSHPDFELYRALQFINNIKIGKNGQLLNNEQRKTVLELINSKDKAFDFKLIKKTLKLPHEFFNYEDDFKVSGNKTHAIVASAFPKNIWEEKREEIWHAMLFFEDSEQLAAKLEKAYGLDAEKANKLSKIELEEGYSSISLKAIRNILPFLEMGYRYSTAVILGGVKNAFGERWERFEIVHNELISDLVRLIEDQKHKEYALIELVKAYLSDSDSKLGFIKDDAAFKKLYHPTQAIEKRALKKRLTEIENLRNPIVQQALYEMRRLVNQLIEQYEVLYGEDFRFDRIQVEFGRDLKNNKKRRQEISIRNRNNEQKNGAARDRLAEYGLRPSRENITKYLLFQEIVEKNGTMQCPYTGKTININDVLGHENRYQIEHIIPLSVSLDDSYGNKTLCESNFNREKGELTPYEFYQQNSASELWGVNSWEEVEQRAYRLLPYLKAKRFTAMKRLGADEFIQRQLNDTRYISKKAAEMLSEICDSVRVLPGQLTAELRRLWGLNHLLRDPLLTARDLPVPPNGGANQYAIMDESGKVKALLPTQNPKPESGDGIICVSGLVDKNGSFIEELKWKHLQYKLEETGQPEGKSWARLRLSEPREFTRVFIERPALNETSISLKGLVSNGKFTNDSLKRKLNATIEDGQYWATFPIKQNRYVLAQRDQKPEPTANEILLYGKVTNGKFSSYIFEEEAGLSDGRYWLIIEPDTELVSYLKARQLPVDKLPNELLVEGVVDDLGKFTADNDPDFSFNTSQSTGKYFVSFEVNQLIDFLPQDNEKPALKKGEKLLEAYTWVNKETGEIKIDIQKNREDQRHHALDAIVVALSELTYLNQLSRYSGQLKGWERGKEDRPSFEQPWPLFDQSVNNAIQQILVSYAQNKKVVSRISKMINKNGKTYKSEGFAARGRLHREFYFGRHPNPILHQKNPQTGELLFEKDKNGNLQYYYHIRKSVSNLKNKKHIDKIVDEGIKKLILDRLEKEFNINSKDYKDLPPNFFYDKDKKPALFLPNKNGQPVPIKKVRLRETISNAEQLKEGMNQYVNPYNNHHVVIYEDADGELHEQVVSFWEVVERANQGQPVYQLPGNGKRILNTLQENDMFLIDLPEDLKSVLENGAISFADYSPYLYRVQKISSMYYTFRHHLVSSVSTEQGELRIVSFKSWIALNPAKVIVDQVGNLKLK

SEQ ID NO: 9010 - protein, 1140 aa, unidentified
  REGION 1..1140: note = Description of Unknown: Cas Enzyme sequence
MKHFRSPPIKVNLDSYVSDKHPADSGSIPMNERNVNMAAKAWRLGADLGANSLGWAAIELDAPIDGKPISILAAGSRIFSDGRDPKSGASLAVDRRNARAMRRRRDRFQQRQRALIKYLIADGLFPADEAERKAMAAIDPYTVRARALDEALSLPELGRALFHLNQRRGFKSNRKADRKADDDAGKIAVGIDRTRDAIRQAEEEAGAEPDSWTYGKWLHERRARATDANAIPSVRTRLRPESGEDAKGDGYDFYPGRALMEEEFDAIWEAQAPHHPDVLTNEVYDRLHEIIFYQRPLKAPQIGTCTLIPGDPRLPKAHPLFQRRRLLEELNALMIVRPGEVAQRLTPEERNILFLKLKDKGKVSFASLRKALKLDPNARFNKESENRTDLKGDEVAAAMGAKTRFGNRWGHLSIEDQWDVIARLEEVESDAEDTAFRAWLAETYELTPEQAQAVINAPLPPGYGRFGEVATRRLIDALRDGVKNGRVLVYSEAVTEAGLGHHSDLRTGEIFEDAQGRPQLPYYGVALERHIMPGTGDPTHSDEMRIGRLTNPTVHIGLNQLRRIVNRLIRAYGPPAEIAIELARELKLTDEDKKRINKENNDNRLNAERRSEKLLAIGKPDTGANRALLKLWEELNPANVLDRRCIYTGIQISIDMLFSAAVEVDHILPFTATLDDSNGNKIVCMREANREKRKRSPYEAWGHTTRWEEIAARAAQLPRNKRWRFEPDAMDKFKDESGFQARHLVDTQYLARLSREYLAVLYPDKGEGSGHIWVSPGRLTEMVRRKLGLNDLLPDHNFGGGADQAKNRLDHRHHAIDAVVVAIVDRSMLNAIAKASGQEGGEGRERIIIPEPWDGFRNDLRAAVNAITVSHRPDHGTASKAGLPKGKDATAGRLHNDTAYGLTGKTDAKGNSIVVRRVPLSSFKKISDLDRIRDADLKAALYRHLDGLEGKAFEKAVADFPNLDWHPFGGIRRVRVTEALSVIPIRDRNGRIYKGYKGDSNYRYDVWELPNGKWVSEVISMFDAHQPGWQSAIRIANPTARKILSLHRDDMLAIERDEGERELVRVVKFSEKQFAVAPPNEGGALKARDADKGDPFKYSYPSPNTLKAWRARQVRVDEIGRVLDPGFPTRTARRKTRQRP

SEQ ID NO: 9011 - protein, 1132 aa, unidentified
  REGION 1..1132: note = Description of Unknown: Cas Enzyme sequence
MAKRILGLDLGTNSIGWALVEHDFENKEGKILGMGSRIIPMTQDIKDEFGKGNSISQTAERTSFRSIRRLRERHLLRRERLHRVLNVLEFLPGHYASQIDFSKRLGKINPETEPKLAYDGSDFIFKKSFNEMLKDFKLHQAEIVANNKLVPYDWTIYYLRKKALTQKIDKEELAWIILNFNQKRGYYQLRGEEEEENPNKLVEFHSLKVIDVVADEKPNNKGETWHSMYLENGWVYRRSSKIPLFDWKGKVRDFIVTTDLNDDGTVKTDNEGTEKRSFRAPKEDDWTLLKKKTEQDINSSHKTVGTFIYDTLLQNPNQKIRGKLVRTIERKFYKEELVAILKKQIELQPQLFTDEKFNDCIRELYRNNEAHRTMLNSRDFVHLFVNDIIFYQRPLKSQKSNIGRCPLEYRTYKSKDKEGNEIEIKDYLKAIPKSHPLYQEFRLWQWMYNLKIYSKEDDKDVTEQFLQSNDDWEKLFEFLNGKREVNHKDIIAFLLMPVLKVKYPNAKPTALKKELAKEIAKYRWNYVFDDSKEKEDDKSKKYPCNETGTQIAVRMEKVKDVPDGFLTKENEIKLWHIIYSVRDKVEFEKALKTFAKKNNLDVESFVENYLKFKPFDSEYGAYSEKAIKKLLPLMRLGKYWDWEQIDNSTQSRIDKILTGEYDEKIKNRVREKTIHLYQIEDFQGLQLWLAQYIVYGRHSEAEIAGKWNSVADLEDYLRDFKQHSLRNPIVEQVVTETLRVVRDIWRKYGNGEKDFFHEIHIELGREMKNTAEVRKRLTNIVSENENTNLRIKAMLAEFINDINIENVRPYSPIQQEALKIYEDGVLNSGIEIPEDIAKISKSAKPTKAEFQRYKLWLDQKYKSPYTGVIIPLNKLFSEQYQIEHIIPQARYFDDSFSNKVICESAVNLLKDKQLGFEFIKNHQGETVETGFGKTVKILTESAYQDFVKEHYKNNRTKRNKLLMDEIPEKMIERQLNDTRYISRFISMLLSNIVRAEQNDDGINSKNILPCNGKVTNILKQDWGLNDVWNDLILPRFERMNHLTQTSHFTAKNSNGKTIPAIPFELSKGFQKKRIDHRHHAMDALVIAYATRNHINLLNNQYAKSETSRYDLQRKLRKKENYYNQKEGKIKEK

SEQ ID NO: 9012 - protein, 990 aa, unidentified
  REGION 1..990: note = Description of Unknown: Cas Enzyme sequence
MGRILGLDLGTNSVGWAVVDVNNTNDYALKYKGVRIFQEGVKSEKGVESSKAAERTGYRSARRLKFRRRLRKIKTLETLIKYNMCPLSLEELEKWKENKKSYPKSNEFRNWLLSKEPSNDNDLSYNPYYLRSRAVKEKISLDDTGRALYHIAQRRGFKSNRLEAVQDDDSLLERYVAELQNIIESTNTITEISIELDKFLNDIETDNKKVKNLFNKLKKYIKYLKANNNLEFEEERNKLLNIINKKENLGPVKKSIRQLSEDIINSGHEYLGEYFYYLYCKKEKIRNQYTDREEHYLKEFYKICEVQNFSDEQIEDLKKAIFYQRPLKSQKGLVGKCVFEKNKHRCPISHPEFEKYRMLCFLNNVKIKTPFDSELRDLTNNERAKCIPLFYRKSKVNFDFEDICKQLIPRKATYGYIKEREASGKEYLFNYHLKTAVSGCPTCASLKNIFGEDWEYSLYNAYTNRSMKNGEKTINEVIHDVWHVLFSFEDEERLEKWCLEKLNQSTEAARKFSKIILKQGYASLSLKAIKKILPYLENGYKYSHAVYFANLDAVMGKLWIDDNIRNKILHDIGKILNNQSNYQISIDIINGIIANYRQNKNSLYSLPKYTSDLKSDLTDILKNKFGKDKWAAFTETEKEYYSNFIIETFSKQAELKMGKGIFYPGMRIDEQIKEYLKNNYNIDDHNLKKIYHPSDIEVYKPAKRNADGKYYLGNPIIEGLKNPMVMRVMHQLRKVVNELIKQEIVDKNTRVHIELARELNDANMRSAITHWQNNLQKRRSEYRDKIKELYYEECNKEIEPTETDILKYQLWEEQSHICLYTGKTIGISQFIGDNPIYDIEHTIPRSLSFDNSRENLTLCDNYYNRNLKKNKIPYDLSNYNEILQRIEPWKKKIDEINKNIQFAIRQSKNAQTKEQKDRAIQKKHELQLEYDYWEKKYSYFEMKDVPDGFKRSQLADTRIITKYSRMYLQSVFDKVYTVQGKIVSDFRKIW

SEQ ID NO: 9013 - protein, 1036 aa, unidentified
  REGION 1..1036: note = Description of Unknown: Cas Enzyme sequence
RASASPTDLVFATSRIFNPSTGAADRREHRGQRNSLRHRANRLRFLWKLLAQENLMLPYTKKEVEDPARVRFSDETIRTDPYQLRLRGLKEELTLPELGYAIYHIANHRGSSSVRTFLDDERSADDKKLEERERTTSTLAQEKGLKTFIEVLADFNADGHIGFRNVAALKGKGVPVPTRDIITQELDTLLSTQQTYHPETLTDQYCARIRAAVLYENEKIVPEPDNCPYFPDEKKLPRCHFLNEERRLWEAINNARIEVPSQAPGSSYIRYSRTPFSDEQRKTLFSIARSGKTLTVPSIRAIFPSLKQSTIILQGKEKSAQKIVGFRFTSLEEKPFWNRLTQEEQDSFFFAWTNIPDDEQLRSFLIETLHLSTAEADDALKTIQLIGDYGPIGKTATKLLMKHIEDGLTFTEAIAQAMDSGELVDHSLIETQSSLPYYGKVLTGSTQALAGKYWHSAFKERREHSGFAKPHTNADEERYGKIANPVVHQTLNELRKLVNEIMEIFGSKPEEIVVELAREIKVGAEERDRISREQGVLEREATRIWEEYCAPNNLSRKYIEHFRLYADQRFKCPYCLKAISVTDIATSNVDIDHILPKEDTGDNSYGNKVLAHVHCNREKGKRTPYAAFSASPLWGQIMHDLRDNPIMRLKRKKFEITDEQYAKYLASRGFASRFISDNSYIAKATLEYLRCLYDEGQQRFTAVRSLNGRETSILRRAWNLQGIAEQLGTKHVDKKATPTTARKNRNDNRHHALDATVALYCTRSLIKFINTQSNTRVLAQEIERDLPVPNHQRYPNLTKEEYKEIFRKEILAFMELSTFVSYKSDHALNGQLVKDTMYSVIGANPHGNELVFVVNKRVREIQVKDGSTAEVRSAIQGKYSKHHPKWYSPSLKERIEAIQARNETIIAQYEAMLTKAEDALQETNRELIASEKKPLEISRKTISKRALEMTGGAYSLLSNNSRIKTFVVKEPTDSRTGSAFDTGSHLCLDFYHDTNGKLRGEIIRKVQAMNPNFQPTYKKEGHALYVRLYQGDVCEV

SEQ ID NO: 9014 - protein, 938 aa, unidentified
  REGION 1..938: note = Description of Unknown: Cas Enzyme sequence
QARYYPDILTDDYIKRVKDSMLYENEMIVPEPGNCPYFEDEKKLPKCHFLNEERRLWEAINNARISEPDESGSYRRYLKDSFTDDERKKMFVYLRSGKTITVATAKRIFPHYVHHDIILQGRDPKNSKIEGFRFKSLEDKPFWSRLSEDQQDEFFAVWTNFADENKLEKHLVNKLGLSVEEASDAIKTVKLIGDYGPIGKLATKLLMKYIEDGNTYFEAVKKAVECGELQEKGIREVQENLPYYGSVLSGTTQALMGKYWHSSFKDQINKPGFVKPDTNSEEEQYGRIANRVVHQTLNELRKLVNEMIEILGSKPSEIVVELARDLKVGAQKRQEISKVQQENEKLAQRIYDTYCKPNNLPQKYIQGFRLYEDQVHICPYCLDGITVSEIASNQTDIDHIFPIEDTADNSYANKVLTHSKCNQDKGKRTPYAAFGHTEIWGRIMHYMDATPAMKPKRWRFEKTEDEYKEYLESRGFISRFATDNSYIATAAHEYLACLFDNSKRSSIRTTKGWETSILRKAWNLQGIDDYFGNMHWDKKDSAESVKGKNRADHRHHGLDAMITLYSSRSLVKNINTLSSRGLRAEEIENLIPIPGYYRDDSIPREDQRKLFRQVVQSFFERNAFVSLKNNHAVNGPLVKDTMYSILGANPNGNELVFVVNKKVKDISVKSGSEEEVESAIRGRFSTKGVSWYSDDLREKFEEIQRKNEEVIDHYKSLLPKAEEVLLEENRRLEEEAKKPRIIDSKTISKRALELCGGTYQLLSNNSRVKTFVAKEPTSTSKGFALDTHASLCLDLYHDKEGKLQGETIRKVYAMNPDYTPAYVQNGFKLFERLYAGDTLEIKASSPIMEDKEGAIKKVARVRVPNAIEGRTFVKIDTFTEKEVGFQIFLINIAKSGGVKDASFQLTSMQSFDVRKVILSPAGLVEYVSPLLKDLDMKG

SEQ ID NO: 9015 - protein, 1102 aa, unidentified
  REGION 1..1102: note = Description of Unknown: Cas Enzyme sequence
MSDYILGLDLGPNSIGWALVAASFEDGEPVEVGLLDTSKAGHPALGVRIFKEGLPNFGTSEGKSLAQERRSKRSLRRIIARRRARKNALLHVLREAGLAPHDPEALAKVIALNPYQVRADALDRPLAPEELGRALFHLAQRRGFKSNRKSTKAAAADERRTLKEMGALSTSIQSAGARTLGEYLHLESLRGSTPQPGHSIAPVHRGEVRLRGRFARQDLFTDKPRRARRDQYEYEFRAILEAQRRLTGCPILTADQEKRARFAIFHQHDFAISEDRRFKAPPRANLHRAPQLKPCPLEPNERRARRSDWIAQRFRILKEVNNLRIIERGRQERKLTESERNRCVELLGEQKEVKFDRMRKELRLHEDATFNLERGSREELDGNELDATLVNALGKDRWRALVEEERQSFRDLIEASEDEDTLKSELERRAVPSRGIEKLLKLGPEDRYLAYSRKALGNLVPHLEHGTSEYGAIALAYPKSGEAKVWKSLPSLVAPGVPADIAEVTNPIVRRALVEVRKVVNAIVQTHGMPRRIVVELARDMHEGPDSRAEHSELIRDRAAERIEAKDRVIELTGNSHPRRADIDKYLMWKEQGTRCLYTDKQIDQGALFNDQLAEPLEIDHILPRWASLDDSRPNKVLCLASANQAKGDRTPAEWLGTDSPAYAALLTRAEEHCKHSGLPWSMLSRLRQEHVEADDFTARQLNDTRYISRLVTKYLAVLFSVQERTGQKAILTSRGSLTAELRHQWGLNDVLDPLLDADGKPLPDYEERGGRRVKLRIDHRHHAIDALIVALSSRSRLKRYQEYWKRTPRTRPTSGSASGFAAPWVDFRNDVAREAANIQISHRVSRKIIGALHADTFCGRVRLPNGQESEGIYVTRKNLEGLTAKELDDETGRIGIVDRVVRGTILSRLRACGWVGGKSLPKDWWRDELRLPSGVPIRRVRVREVVKDGIPLGHRIAKNEGNHHMAFDPITMPGQPLKARVLRMMDVATAMRRGKERPLTPDRSIPESAFPIGRTLARNELVEMTVPGTDRRVLAVVQNVSGSRTSSTTIDLTLRDARDARPASTGNKTPLKRASSTRALLDWRAHKVQIDPLGRIFPAGD

SEQ ID NO: 9016 - protein, 1085 aa, unidentified
  REGION 1..1085: note = Description of Unknown: Cas Enzyme sequence
MATVLGLDIGANSIGWALVEDSENPANSRLIDIGVRVFPEGVDAFDTGKEQSRNEARRMKRGMRRQTQRRAQRRRIVKVALTALGLWTADKEIYDRELQKCPYELRANALRQKLTPFELGRVFLNLNQRRGFLSNRKKDRSDKEAKGLLAEINRNEQEQLENGFATVGAMLAAKAKTLDHAARRENDHIRNRHLSRKQYVEEFNAIWEAQRLFHPMVLTDEAKYGHIGPFKKQLAIAENQYQEIESVDPRLPISKDDPRRRGLSDFQAFGLHGLLFFQRKMYWPKSVIGLCELESKEKRCPKADRRAERFRVLQEVNNLRFIDANLAGETPLNSPQRKLLLSLMETKESVTFDQIRKKLNFLDSVKFNLERGERSKIKGFALDVKVAGVIGKDWYDRPEDDKDAIVRLLFDNESDDDTTIRQLTERFNFTLEKANDAVGIDFPPGYIALSLKAINRLMPHLERGLVYQSVSDPEKSALHAAGYLRRDELQRRLFDKLPNFARLRPSDCKLGDIPNPVVKRALVELRKLVNALIAAFGKPAAVHIEMARSLQMGLIKRQEYNARIRAREGERDKAAEAIKAEGVAARRESILRYLLWKEQSCECVYCGKNIGIAQLLSGGADVDHILPYSRSLDDSQLNKVVCHRECNHDKNQRTPYEWLAAARPADYARVCQQVAAQLHKGLLPYPKYRRFLQKELELDSFIARQLTDTAYITRASVEYLQLLFDKPSAVLGLKGQLTAELRWQWGLDTILEELPDSPAWQEKEANKIPIGEKNRADHRHHSIDALVVALTNRKRLQKLSSLVRKGGAKQHGEVLPEPWDNFRDTVVARVKAINVSHRVERKVAGALHEETNYGPVKNPDGTPNPNEWVVRKPVENLSPAEVERIRDGSIKQIVLERLRKNGIEFGRGKKPDPKKMKAALTNLAMPSGVPIKKVRILKNEQTIQPLRAEPENQTYVKPGSTHHLCIFEYVEKGKTKRDAVFVTMLEATNRLKRKEPVIQRFHPDRPDAKFIMSLSSREMVLANWNGRENLLIFKTAASTQGQIYFAVHTDARRSSDQTKFVATANSLKANKVAIDPIGRIRRAND

SEQ ID NO: 9017 - protein, 1060 aa, unidentified
  REGION 1..1060: note = Description of Unknown: Cas Enzyme sequence
MITTFGLDLGTNSIGWSLLGHDAKGIPDRILAAGVRIFSAGVDDKTKTPLSFERRTKRLLRRQISRRRQRRDRVRNLLITLGFLPKDILVVTTQEGLWNRLGDPYALRAKGLDQALTAHEFGRVLMHLQRHRGFLSNRRADRGAKQEDEATQTDVEIANLRPRMQQDGARTLGEWLHRQPKQRNTGARWLWTERSMLREEFAALCAAQMAHHPILTDDRYGELHEAIFWQRPLKSQAGTKGGCALEPAKQVPAKAGSRRKDGSVRLEVESIAVPVPRAAMAWQEAQRARYWQDLNHLALRHPRTGQYEPITHREREAVARELEVKASLSWKQVRKIIGRIRSGSETLTDGETFNLEDGGKDKLIGNRTATRLRDELAGTPISWDALPPGDPASQTAGEKSQASLLKDLLTIDDPVALTKRLTNFWRLGDLDAQQVAKIRLEEIPGRLSLKALKKILPFLTAGKNYHDACQLAGYRRRDQQVHVSEDRLGPPPEVRNPVVAKCLHEVRKVINSLIRVHGLPTHIRVEMARDLKLSPSQRDEVQKANKKLERINAEAITWWREWGVEQPSHDDRMKYRLWKQQGEMSAYSDRPISQAQLRSGVVQVDHILPYSRSFDDSFGNKAICFADENADKGNRTSWEWLGGDTARWDAFMLRLRSWRNLSIGARRRFTLQKLEIDDFMARQLNDTRYLSRAVLAYLGCLYPSHRLNPEGEARFHYPVQVTAGKATAGLRHFWGLNSLLSEDGAKNRADHRHHAVDAVVIACTDRQLYRRISAEIQHSNRRPLEVDPPWSTLRTDLMSVLGRIVVSHVQDHRLSGALHEDTAYGLVPGEPDKKGMRTFRYRVSLEKAAGKPAMIRDTAVRALIETRLAACGNDPKKAFPPGFELTHRDGKTPIRTVRVDKKLNIDSVCGLPGHAPVRWHLFKNNHHAEIIRNHQGKYRDRVVTTMRAARLMRQARVSAYGQDIGTGDAIVLSLHVGDMVEIHDGDRICIARVKSLSEGDYEFQEHHRGGAAKEAISIRMKSAKKVAETVHRLTVDPIGRVSRHADPGRRDRKPRATAPG

SEQ ID NO: 9018 - protein, 1160 aa, unidentified
  REGION 1..1160: note = Description of Unknown: Cas Enzyme sequence
MTKILGLDLGVTSIGWAYVSSENNQYKILGVGSRIIPLSPNENDEFTKGNAISKNRDRTLKRSQRRNNHRYKLRKHLLSKLLIEKQMMPEPELILKITSIDLYALRNKAVTEQINLAEIGRIFLHLNQKRGYKGSPIEESEEQNKADQSNYLEQIESRKKILTERGITVGQYLYSLLLEDPKARLKNLIFPREAYIAEFDKIWEVQSQFHNVLTSDLKTKLRDRIIYFQRPLQSQKHLVSKCRFETYYRVAPKSSPLFQICKIWESINNITIKDRFGAQIQITLEQKQQLFEHLNGHEKMSASQLLKKLNLTPASDYFPNLLIVEKGLEGNRTVAELLKRMDKCNITDDSLITFDINSNVQIEINKDTGEVIEKLQIESSFEDSKLFKIWHTIYSMEPEYSSKKLQQAFGLTEDQANYLSKIDFKKGGFGNKSTRAIRKILPHLINGENYADACSKAGYKHSDSETKIEIQQRILNDYLKLIPRNSLRNPVVEKILNQLVNLINSIIDNPNFGKPDEIRIELARELKQGIDKRRDTYFNNNKRDAEHKKIATKLNAEFGFNNVSRKLIEKYKLGEEVEWVSLYTGKKIDMSTFLRGEIIDVEHIIPTSRLFDDSFLNKTMCETDENRRKGNMTAFDYMKSKGEHEFSSYIERVTDLYNRKRISFSKRDKLLMSIDKIPEDFINRQLRETQYIAKEAITLLKQICRHVYSTSGSVTDYLRHIWGYDDVLQNLNFDKYEKIGKTETIFIEEANKHRKKIVGWSKRDDHRHHALDAIVIATTSQRYIQQLNKLNQLVVGNIKKIDIKIEQPFTTKEVETELAQVLVSFKAGKKVATKNTNKVTGEISFTPRGFLHKETVYGKVNQYEKVKLTTKFTQVEQIADLEIKLIVKQRLSQYENDPKLAFKNLEKEPLFIDQNLTKKLTHVTILVERYVVKTPLGPDFKYADMLNIVDSNVKAVVSNRLEAHDNNPKEAFKNLAENPIWLNEKEGIAINSVRIFVSYDKLTPLHKNTNGEDIDFVITRNNHHVAIYEDANAKRIEEIVTFWEAVERKKQGIPVIQNNHPNGYKLILTLQLNEMFVFDLNPDEIDFTDKRNYALISPNLYRVQKIGSKDYFFRHHLETKLEDTEQALLIKKYRRVRSISVKLPVKVKLNHLGAITQVFK

SEQ ID NO: 9019 - protein, 1455 aa, unidentified
  REGION 1..1455: note = Description of Unknown: Cas Enzyme sequence
VKKLGLDLGSASIAWGLRENNTLEKRGVVIFDAGMSKGATGGYTSPTKDRREARSKRNLIQARKYRKWELLEILINNFVPLDNTELEVWSKYKKEQTRKFPENDFFLKWLACDFRYEEGENYTNPYELRVKALDYKLSNHEFGRVLYHITQRRGFKNIGEKDKETEKQIEKRKEEGFETALNNNRTIAEALKNEFLDKGLRARNQYPYREEYEDELLLICKKQGYDISKNEKNEFKDSLIQKIWKAIIWQRDLKSQKGNIGKCTLEPTKPRCPISHPIFEIFRAWSFINNIKFSKNENDMEFLDSNIRIRLYENIFLKNDKNFKFEEIRKFLDKELKSTNKYNYPYNVKEKVYDSSVSGMPICNGLLKVLGKDINSELSRIENFNIGTAPKIYNNYSIYDLWHILFEFDENYLKDFANDKLEIKNLINKKGHEDNPFVRLKDRVLGGYADLSLKAMCKIVPFLKEGFLYNEAVVLAKAPELLGENWKLDKEKIYEIIRLSSSIYSSNKIIIGITKKLIDIYKGEDLKYGDHDFSYKLGNKHDDEILNACRGHFGEKTWEKKKNKEKIFEDVKNCYQEFLNDSKRKYRDLPLFTTIFNNKLKVNNIEINGKLYHHSNIENKFLKKSIDKKTGLVKLPTDKNSGLEILPEPRIDSIKNPMFNKSMSILRKVINQLIVTEIVDGDTEIVVELARELNDNNKRAAIERYQNQRENNREKFRMFLNQYKNETNSDINVEEKISIFELWHEQTFENTINDKNEKTTNNSNINVLKEKDSVKRYELWMEQKGQCMYTGQMISISQLFSNQIDIAHTIPRSLLPDNTMANMTVCFARFNRDIQETKTPFYCKNYSEDIEGVGTAILPRLDYWIKLKESFEERFEKNSKPKNGEDFESKNSRIQEKHYFKMHLDYWNDKINRFTATEIKDSWARRQLTDTQMISKYAKEFLKTYFKKVTVQKGSVTADFRKIYGFQEHDEIKERNLHTHHAVDASVLTLIPTNSRHRDRLLKSMYAKMEIEKKQLTVLPYDGFNSQVLIKEIENTTLIVNYEKDEIQKKTIKKVRKRGKVQYVKNKSGEFILDRDGNKIEKIATGDTARTILFAQTFLGKIKDVERFDDGQPIRENGDWKYKKGEEEYVFVKRIPVEDAKTELNNGKRPLGYIIDPVIRKLVSEARSNNTILKDPQGNIIRHVRTISKSGKEVKIRVNYTSTHDYKNSYYSESGLIPYAILLQKNIDGKISREMLPIPSFEVIKVKKESIKFDLQKYLEKSHPDKLDFLDKKLLKVGQKVIILKDDSEYEKIKNIDFQKNKLYKIEQFSDGSIWLKYHLEAQSKEQIDNSIKIKKDTLLTTIEKKYGILEVLEDTSIVDKKQRKDDFEKRKYAFDQLSRFRFQRLIEIIGLEEVKKIKNQLDIYKTQSSQIIEDQGKSASPLLKMSSENWNFLYEGYDFEVSILGDLIFKKRHL

SEQ ID NO: 9020 - protein, 1172 aa, unidentified
  REGION 1..1172: note = Description of Unknown: Cas Enzyme sequence
MKTVLGLDLGVASIGWAIVQENNEDQDLIASGVRIIPIDTETSSNFSKGASTSKNQDRRLKRSARRNNHRYKLRKHFLIEFLKSQQLWPLTESLFKLTATELYCLRYNALNQQISLQELARIWFHLNQKRGYIDSRKGASEEDIDTKYVEKIRDSSKNIYNNHKTVGSYFYHKLLENPIYRIKSGDDKENIFLIEDYKIEFDLIWDKQKEYYGDFLTDPNFNEVRNRIIYYKRKLKSQKHLIGECRFEKHHKCMPISSPIAEELRLWQDVNKLRITSKYGEVFELTNAQKVDLFDFLMSTDKITEKDLLKRYQFPSTKGEFKINFEKQIKGNPYRTKLIQAFKEANADHSSFLNFDAVEKHFQNHPFFTLWHLLYATEELSDLKNTLKKKYDFNDDLIKALVKISIKNDFVALSSRAARKLLPFLREGKVYSEACKLAGYNHSDSITTEENEKHEIISINELSHIKPNELRNPTVEKILNQLVNLLKGLSSEGYKFDEIRIELARDLKKNAKERQNISKRNSENEKENIFIKDLLRNEYSFKSVSRRDIDKYKLWKEFDGRSPYEPNTGIKLGDLFNKAMYEIEHIIPKSRYFDDSLNNRTIARVHINKEKDNLTAFDYMSSKNEDILHQYSECIKHAKISELKKKYLKLSGSEIPDDFINRQLNETRYITKETLKILKKVCKNVYSSSGTVTDYLKHHWGYDNVLMELNFDRVSPEEIVTKEINGQNKKVITNWSKRLDHRHHALDAIVIACTKQGYIQQLNTLNSHFDLPKDLKPIAIKTKVPFAYEKVKNSISNILVSFKPGKKVATLKKVKLDKWGRKPGNFGQEMLVPRGSLHEESVYGTNKKYSTPIDIKKLATTQLCAVAWQKEVIEKHIEKYDNNLALALKNLKKDPILYDDKKVLSKVTVFQKLHVKRYNLQYTQQNKFDQKSAERIVNENVKRIVISRLKEFDNDPAKAFKNLNPNEGNPLYFNKDKGILIKSVRCYTHDEDYIPNYPALHETVGGKTLNSKQGKSALNKTPVDHVKGGNNHHIAIYENEEGERIEECISFFEAFERKRSGLPIIDRNHPKKYKFITSIQQNEMFVFGINKEELESAINQKSFHIISKHLYKTQDIAPKQYRFLHHLDTKLGDNAYKTYLRSRERFLQKSSSSFNGIKVRVTNTNKISVLND

SEQ ID NO: 9021 - protein, 1118 aa, unidentified
  REGION 1..1118: note = Description of Unknown: Cas Enzyme sequence
MHLSTSLTKVARKDFLVADMTLSVAWVHWAAMKTLGLDLGPNSIGWALVEEGEPGRLIDCGVRVFPAGVDNFDSSKEMSRNEQRRNKRMMRRQTRRRAARKRVVAHALAEAGLLPADPAELAAVLAIDPYPLRSASVERELSPHEIGRVIYHLNKRRGFLSLRKVATDKVIAEIKKLEKNKVKAEAGDAAAPAQETDSAMLASIELLARQMGTKTLGAFLHDQQSAAANLNHTTRQPIPWRIRGKHTRRSMLEDELLRVWQFQKAFHPGLLTDEKLFGTQGRQDASRTRNPVRRKSDLSLLQQFGLHGLVFHQRPIYWPREMIGMCELEKGCRRAHRTDRRAQRFRMLQEINNLRYDRAGEFFEKPLDESQREKLLTELYKKDKFTFDQIRKLLGMLEGTRFNLERGERSSLKGCETDFHLTKVFAAYEDFDEETKDQIARILIDAERDEAGARDKLVTQFNLTEAHADALLTADLPGGYVRFSVKAIDKLMPHLERGLIVMGASDADESAMHAAGYLRRDELERRLFEKLPSLSTIRSGQLADLPNPVVAAAMYELRKVVNAIIKEYGKPDAVHVEMARSMKMSSEKRKQYSKDVQTRGREREVIADDLRAEGVSLSRDSILRVQLWEQQKRRCIYSGQIISRLQLFNGETDLDHILPYSITLDDSQSNKVVVFRNANRDKGQRSPHDWLAGSDPARLKQIEQWGESLPWTKRRKLTQQEIKTDDFIARQLVDTAYIARLAVTYLELIVEKKHDVQGRKGTYTADLRYQWGLDTVLQELPDSPAWQARNELRPGEKNRADHRHHAIDAIVIALTNRKRLVRLGKIRSQGGTKATGEILEEPWTDFRNSITAKIRTVNVSHRVRRGVNGALHEETQYGPVHERKTGLRREGEFVMRKPVETLSLAEVEKIRDGSIKDLVIARLAQHGITPGRDKEKLTVKKMQEIMKDLQMPSGVPVRKVRIVKKEGSIQVIRKQTPGEVWVKPGSIHHICIFEWEETNKKGIRKVIRESVFVSMLEARRRIKSKETIINRTHPTRADARFVMSLSGGEVYLVTSRDSSSSQLMTFKTGNSESGQLWFAHATDARKSSEQTKPSFLATTLTARKVTVDPLGRIRWAND

SEQ ID NO: 9022 - protein, 1137 aa, unidentified
  REGION 1..1137: note = Description of Unknown: Cas Enzyme sequence
MGNILGLDIGTNSIGWAIVNIEKKLIHTNVHIFPQGVKEKTGEPRNVQRRTARGTRRNNARYKHRREKLQIILAKVKMLPHHKKEKAYLIYELRSLALDRQLSLQDLGSVLLHLNQRRGFQSNRKEQANPEKEKEKELGKVKEGIKELENQLQQQNARTVGELYWGILKERKHDFLPEQAIRNRFPTEKRYTSRELLKAEFEQIWQKQQGFYPQILTNELKNEIGRKTIFYQRKLKTQKGKIEKCPFEPDSSCIPKASIEFQEFRVWQKLATIRITITDKGRISDLLTIEEKYEIANELDRLTNKEMRLTFKQIKALFKKEWGTDINLNYKDEDDVKGNITAIKLRRVLGDKYDEIYQAYNLAFDYEEKRKTVFYKLWHALLFADDEKWLKKYATEKLALSASQAEKYASLNLEDGNGSLSYKAIRPILAYLKMGEDYSNACKAAGYDHALLPDKDRKLLDKIPKLENNELRNPTVQRALTETIKLVNSLLKEYQIDSICIETARELKKTKKKRDEIEKELKAKTHRRRELAQFLAQNSIALFGTKRDFDLNNKSEMEDVRKYELWLELAVADKDLNEIGLKRGFIDFARKVSTEDMEKYQLWKEAHRISVYTGKVIQFNHLFSKDYEIEHILPYSRSFDDSFRNKSICEAWFNTEKGNLTPFEHFQKKSKEEWLAFKDRIKMLPKAKQERLLWEKEIEGFRNSQLTDTAYIAKEMTKHLQAVCKDVQTTQGAITGMLRRLWRLNALLNATGENEKDRNDHRHHALDAIVIACTNRAKVQLINWANAKDIDWRKEQRKIDFPWTSFRYDIQHKLHAILVSYRQDNGILIRRKAVIKTKQGKIKTDVQIGIRGELHEATYYGKHILPKGAPVPKDKKVKTAYFVRKKLSSFTDSLCKDKSKQIQLVEERVAQIVDKVIRETIQEAMKGKEIKEIKEVFSKSVYMPDVNKKGWQMPIKKVRIAVNKDDEGMVPLYKKEGDEDYKRNLYVPSGSNYIMGIYQDPKSGKKEVHIASFYEVVQRKIKKLPVLEPMKGNKKLVLTARQGDMFVVYETQPDEIEKHINWDKIDDTAKRFLFDSLYIVRKMDKSSSRLYLAQHHLAKVDLDKDPQPLKISPNGKNFNGIPVKIDILGNIRRKKSV

SEQ ID NO: 9023 - protein, 1049 aa, unidentified
  REGION 1..1049: note = Description of Unknown: Cas Enzyme sequence
MKNSPADFFNGLVFGFDVGTGSIGYAVRKGAEFLDVGVLICPEDTVELKGRRGLRRQRRTLRSRNYRRKWFAAELVKLGLEKPLYAENNNGGFEPAKGFESLNDPVALRLRALSGDALKPEELHTALAHLFRRRGYTEVPWKNRPDAKEDGDEKKELGEIKSKMSGLQKEMHEAGCKFPAQLLAKRKAAGLSQRREVWPRELMEDEFRAIVAAQKEQFPKLGEKADWLLHGDSDEINRNGNTYHVFFKTTESRNPGVVGLRWPRFDNRGPALDSFQPVDNEGRPLHVVRENKQAFIKAQWELALMNFRVLDCATNKLVSPDLPSLLRLREIWENSKRTKKKKNPEAGESETVSISESVLKKWAKEYVKRYKLVEGQTELTPQSGAGRARYCSPTLELLQKEISAGRRIDPPQPILKRSGENTQRALDRYLNDINHPLVRHRLILFRRLLAKLTDNFGAPDTIVVEAVRSLAMGPIKKREHIQRNKKNRDERESIRTELKKDNFSSSKNSIKRFRLFKAARARCPFCLCPFCLQAVIFKEAEIEHIVPQSCVDCDEFYNLTVAHRACNQRKGNKTPYEAFGNTPEWESIRKNAESCFGFGSLKYQLFTSPDAENLVEQKADLQHTAYIARVLRHIALIQLDWLGSDGRDSTDQKDPQKTAWRFQVTNGQLTSRLRKAWGLNQILHPLPPGKRWDELSPEEQKQFTEKNRGDLRHHALDAMVIVCTLPWLAHRTHGAKDELGRHGWWTQDEKQRSKAVNPLFPGEGQMHDIVKKEIQKVVVQHHVSRSNHQQAYNTTLYAKKGKNTYVARKPFTRITVKNLSSIYPKEFAAYCEAAWSRYSEESPDIQAELKKTNKSLPESFTKKLCFSHFQRWRVDLAPTFTWPEKIKIPIGSVRLISIKDDSAVIPFSKGTHAFVERTGFKEVRLYLSDDGKSYVPVFVPYWKSDEPFSDEPFNKKSKPVATVCKGQIIELKKSLSSGAPPGKYRVMVMGQEQIKILPPHVANKDEAKLAFKLPKSGIQPYWNDFIRALGYELPHSPSTQPSSTSAAEA

SEQ ID NO: 9024 - protein, 1437 aa, unidentified
  REGION 1..1437: note = Description of Unknown: Cas Enzyme sequence
MKNILGLDLGTTSIGFAHVIEGETPEQTSIERIGVRIIQYDNFSKVDKSGKVSESKSPEQDFASGRGLSPNAGRTQKRGARRNLDRYQLRRDNLIDALTQSGIIADETILAEDGKRTTHETWRLRANAARRKIEKGELARVLLAINKKRGYKSSRKSKNEDEGQAIDGMAVAKRLYEEDLTPGQLTYLLLKDDKKYIPDFYRSDLKSEFDKTWNCQKMFYPEVFTDAFYKELQGKGQRATSAAFWGKYQFNTAENKGNREEKRLKAYEWRSKSVSEKLEKEEAAYVITEINNNLNNSSGYLGAISDRSKELYFNKETIGQYLYEQLQKNPHTRLKNQVFYRQDYLDEFEAIWTEQSKYHPELTNELKHEIRDISIFYQRKLKSQKGLISFCELENNEIEVQKNGKIFTRTIGLRVTPKSSPLFQEFKIWQILNNILIKKKGNKKRSAKATTVNEAEIFPLDLTAKQTLFDELNLKGNLTASKVIELLGYKSSDWELNYTIIEGNRTGKALYEAYLKILDLEGYDVKDLLKIKSNKDEVELDDLNVSAIEIKQMVKAIFETLSINVAILDFDAELDGKAFEQQASYQLWHLLYSYEGDNSASGNIKLYELLENKFGFKREYGRILANVAFQDDYGDLSAKAIRKIYPFSKENKYSEACELAGYRHSAASLTREEVVNRPLKTKLDLLKKNSLRNPVVEKILNQMVNVVNALIETNSQKDKNGKIIEYFKFDEIRIELARELKKNAKEREEMTTNINAAKIAHEKIVKILQSEFNIKNPSRNDIIRYKLYEELKNNGYKDLYSDTYIPREILFSKQIDVDHIIPQARLFDDSFSNKTLAYRQDNLKKGNRTAMDYIESEYGNEETERFLQRIQTLYDLVKKNSEEGITKAKFQKLQKREAEIGDGFIERDLRDSQYIAKKAKNMLFEIVRSVVSTSGSITDRLREDWGLVNIMQELNFEKYRALGLTENVEKKDGTFKERITNWTKRNDHRHHAMDALTVAFTKHNHIQYLNYLNARHNEAHKEHQSIKTIEENETHWKYDDEGNKKRIFNIPIPNFREYAKEHLENVLVSHKAKNKVVTRNKNETKSMNGRKVKKELTPRGQLHKETIYGKIKVPVIKEEIIGAKFNLETVNTVTNPMFKQLLLQRLAENGNDPKKAFGGKNTLSKTPIYLNNEKTGTLPDKVKLIRFEDDYTIRKDVSPDLKIDKVIDCAAKRALEQRLKEYNNDPKKAFVDLDKNPIWLNKDKGISIKRVTISGVKNVVSLHNKKDHLGHAILNDNGNIIPVDFVSTGNNHHVAIYCDENENLQERVVSLFEAVQLVNAGLPVIDKTYNQHLGWTFLFTMKQNEYFVFPNEKTDFNPNDIDLLDPSNNSLISQNLFRVQKLATKNYMYRHHLETSVEEQIELVNVAYKNIRSTGHLKNILKVRINHIGQIISVGEY

SEQ ID NO: 9025 - protein, 1752 aa, unidentified
  REGION 1..1752: note = Description of Unknown: Cas Enzyme sequence
MKKILGLDIGTTSIGWAIIESKDEKKVNEITGQFADTYINNDRIGIHKNAVGVRIIAQDTERFDKGLTLNDPKGSTLTPTATRRKYRGARRMKNRYKLRRDKLKKVLTALGIESDEKYYTNEKKVNKEGKRIKRGENNDIGKAIYELRDKALRQPITLNELGRILLHLNQWRGYSSDRFKKDEKEASKKGGNEIFTSVVVNVELIGELPNDKRYHYFMVSFENGDKGCDIRKVEEKESNFLQREMHTYYFDEKEKEPEIDGIKKIKITKLDTESFAYRKKQINNKIELFIAEEEAKDKALGTVGSFFYHHFYNAAGTDEKLVSRIRNHTIDRDWYESELEKIFINQYDFNKTYFEAINTEDLTKAAFKDYQPILNELFKIEGKKEQILYLIKDKIIFFQRPWQQTKNKGQCPFEKILVKKERTIKGTGKKESFEEYVGRTVIPRSHPLFQEFKIWQQINNVRLFYNDENGKHDLFEDNNTFESITGKSIAIVKKILYTNLCNSKTLSWRSFVKDKLGFDVFEDLEEKRLKKKSSKKGVNVDTGEVTNSYYSVNFRKRKRDGSYEDIKLKGNTTAASLLNILEGKTFEWLQENHKNVKNITNLQLLWEVIYDITNGNAVKVAGIIKKHFDFSFEICQQLASLKFDDAGMGNLSAKAIRQILPLMSDGEGLTKKATDKIRSLREINNADKDIEEKLESLKEFLPDKKARLRLSEYFNADHFNYLNYWEATAVVYGSHNSNNIKPKGIIEKVKPHSMNNPVVEKIVNETIGLVNEIYDRYGFDEVRIELSRELKASMEERQQMWEGMIEGAKKNEWAKQMLRELKGENLDTEASNKSNVDKIKIIEDVVRFTNADEYKVKSKEYKLNEPTKAEVKKYLHWLEQNFRCPYTNQPIPFTDVFSKIKRVEIEHIIPRERYYLNSYANKVITWKEVNEAKADNGNRTAYEFIVSKRSNDKIILYDGREINLVAKEEWESYIKGMFPKGGKQANLLRKTIPEDPIERTLKETQYINKKLKEKLSELVGSSKVWVTSGAVTDILRERWHLNDKIFKELVRERFENFKVPTGKKTFQLKTIEEQKIFAEQIKIFIDSSETFAPVKIKVGKKEFEFKELNELEKLYKDLNEIISINEISTKKPKIFKYITSEESFEIKSLVHWTKHLNGKTNQEQEVEMFAGYSKRIDHRHHAMDAIIVACTKQNHIQYINTLNAINSADVENDADRKTKYKFLKEEVCIGNSSKKFKTPWEENNFIPEVKDALSNIIISHKNSRLLISPSKHRVNKEINSSKLASIRGQLHKDTNYASRKYFEGGKTEIKKLIPKIITSKKDNQLQTMVHFKTFEEIIQETVLKEKYQNILIPLFAQFEEKLHKKEITLTPEICKNLSSDILNKIKDENLLHHPDTNAPYTWLSTYEDKDKSNRPNGLLMNLNDAKEVNAITNPRLQRIANYRLSFVNMQKKAIDELDIDKKEKEKKKREAESLALYSNAIYELRIGNKDGSATWKEMKDVSSQDIEHISYLKPETTKLIKAKVLEKGLDKLKAAYLTKPVFISNTPIEVKKARQKSYYQSLYEVSPKRYVQVEETFMTYFFKEKSESTFTNNRQVKFLKFIDAVFIITHEKPDKIDYNKLIEKEKTNEEIQSGKSFELLFTLVKNDLVYMPETELSQEQAEAINWNNKASIAKNLYIVKDMNPSQKVIVFQQFYKSDSIKINEPDAKTLFKDSNLKELTEEIKYGTVPMLQRCIKVFTDKLGQKIVPFWMH

SEQ ID NO: 9026 - protein, 1126 aa, unidentified
  REGION 1..1126: note = Description of Unknown: Cas Enzyme sequence
MLPKTRDERWVLGLDVGIASIGWAILCFAANGHRIINAGVYCFDTPEEGKGAQRQSKKSRHGQMKRRRRLLQRRAERMQNVRTLLHREGLLPDSRSHALGEAARRCTSAIKSAIETAHRYTPWELRKAGLSRQLTKDEFAVVLGHIAAHRAYQSNSKRLSNQPPDSKSKKDSASPAEEADESISERDNKEEQRVLAALEANEERYNQALLEGKVTTVGEWLSGFERQRNQANDYRFSIQRAWLKDEVAVLFGRQRRFGNDAAHEGLREEFAQIAFYPGQVKTLPVRECTFESGQDCAARHSYSFELFRLLARLNNLRIVSGEASSRSLDASEIDQIAGLLGLQRQITYKTLRTELKLAKGAIFDRVGDEKEDIVSRSGECAPGIRALRHVVTDHAEDAGWEALVAERTTLDQIAASIAHQADISIIRERLETLDLKADLVDRLVKEADGGKLGFFKGTGHLSNLALRKLEPHLLSGFDYHHAQIRAGYDPGKDRHSRKPGIVGTGPKAIRQWLTKPQIEELISSQTASRAVRQTFKQVLAILAAYPQVSAIHLEMAREVGKGIKKRRDIEKDQRKRERERVSLRESFQSMFKGDPSERDEDRWELWNQQKGKCAFTGDDMHCNLVPDGHQELQVEHILPRSRFRLEAMSNKVLCLASANQNKGAFTPYEWMTQGRPPSGLTWDTFKMRSQAMFKGKALKGKLRNLLTVSTEKLEQAFSNRDLNDTRWIAKFLLFGLQKLGTESQPIDVLPVNAGLVGMLRHAWGLNAWKRDPEDASRRRPDDRHHAIDAAVVATIDRKLVQDLTLAYQKAEEREDYFAARGFRQPWKGFYSELINAVYGSGASESGPSKFVTDPKKGTFVVRQETRRTRGRVHKENFYSVRKSGDDGERAFEFVSLADFESKHLKLIKDRERNGRLVRKLEDWIEAGRPMDAPPTIPYRGFEGSMVDRQIRRIRVSRALPSVRVETGDDRRVDTPKPAALQDGMPRVDVYCVRSGDSFHYEMVPIYRSAFADGIAPSLASVSGELRPLDAGAEFAFSLFKKTYVTVETTDGKSIEGYYRNFDVDSSRLAIWPHHSMEQLFKMRVSASKIKSISKIVIARLGKIEVTEGVVKLVSGEKRTWHGKVCT

SEQ ID NO: 9027 - protein, 1061 aa, unidentified
  REGION 1..1061: note = Description of Unknown: Cas Enzyme sequence
MSSELVFGLDLGINNVGWTAVQISEEGVEFQGQGTFVFESPLKDENDPGEGLSSKQRGMFRRARRTTRRRHQRKMSLYRLLAEYALIPKEMSSRVNLFCLSTDPLTHAEANPYALRAAALKRPLEPFELGRVLCHLNQKRAFISPRDLMSGGKFRIDDSADDPNDEEVKGMKLEIQRTADAMAGFETIGAFLNDKLRKGEPVRKKKLKNSTPPQQKAEDERRFVRADRHMIEHEFWTIMRHQSPHHALLTQDFQNQVHKTIFSQRLLAADMSTRGKCTLYKSEWRMPRASLTAQRFRIAQDIAHLELTPEPHANSRKLIEQERQALAQALMTGDDLNWADAKELLGLTPIALFNIEPAKYEIIVNGKKKWIKQTKGTKTELRGSQTVSRLRSIIGEKWIELGEQAQRELVGEIVSIRDWTRDKSDREPAAVRRRNLFKEKAYGPKAVRFSEKEANELATASLPEGYLSISLKAAKKLIPLMLMDMVYSEAVTAIGKDHANPDGPVQVRDRLMAPTAKDISHPVVLASVRSAVRVLNALHREFGKPDAIHIELPRDLAAGEKRQGEIEKRQRENEQVRKEIAKDLVALKYKPNSLNIKKVRLWDELGGAGLAYEPDVIIPDLKALMSGDYEIDHIIPRSHNLDSSMANLTLCTRAFNTQVKGNKTLWQACGNSNQWPHIEAHVKSIKNMALHKRQRILAKALPEQDFTGRHLAATGYISKEVLKLAQQMVEKKENVIVAPGRATAEFRKFWEIDDLVPLHPVEQAQADAWKEFIEKAERKEATEDDVKTAKAPGKARSNFKHHTLDAIVVALASRKSLKAMTDYYQLKDSFDPRVADKQSRKLERAKAMPDPDLRDKVSKALEEAVIVHRARRKPTGELHQQMAKNDSAVLARLPQGEPWSTNVVGKNMVRYDQDGKPVQAYPLGNNHHVVIWERTQENAKGEFERCAEVVPTIEAVRRRDAKEPVVRKHHPEPGWKFVLALCKGDMVEMADGTLAVVSKFYSPSEGKAGITLWHPYVAGQLGKLNAQNPYLVKNLSVLTEIASRVVLNPLRSIVYREGGQE

SEQ ID NO: 9028 - protein, 1030 aa, unidentified
  REGION 1..1030: note = Description of Unknown: Cas Enzyme sequence
MALIFGFDIGTTSIGSAVIRYDEASSNGDILHLGVRIFPEARDPDGTPLNQTRRMKRMMRRQLRRRRARRKALNETLVAAGLLPTFGSADWPKAMAADPYELRKRGLSEPLSPWEIGRALYHIARRRHFRARDLEDTEDAAQEAADEKEAKSNREATLQQLTASGQTLGAWLAGKPAGERKRGVHAVRKSVQDEFDRFWRAQAPHCPAMTDELREAVAGTIFSQRPVFWRRNTLGECRFMPGEELCPRASWLSQQRRMLEKLNNLAFAGGNGRPLDNAERGAILAKLQTQGTMGWPGVRKILEPLLKARGESARTIKFNLEVGGDPSLPGNKLEARLADIFGPLWDRHPYRDALRREVPARLWSSDYGDIGTQRVVIRPEVERKIRRDQARASFIHDFGVTQPDADRLLGLSLESGWEPYSTAALERILPELERGVRFGTLVSGTEPEWERWRAENFPAREQPTGEFHDRLPTPRDRDEARRISQLRNPTVVRCQNELRKVVNNLIAVYGKPDLIRVELARDVGKSKREREEIQSGIRRNEKKRRQAAEDLRSKGIAEPSRADIEKWMLWKEGSERCPYTGDQISFDALFRDNRYQIEHIWPRSRSLDDGFRNKTLCRTDVNIAKGNRTPYEHFKHRGEDWDIIKDRVNRLMGKDGMSPGKVRRFLAESMPDDFASRQLNDTGYAARQAVSLLRKLWPDVGPTAPVTVQPVNGKVTAQLRRRWGLNNILSDDGEKTRADHRHHAVDALAVACAGPAVVKRLSDYFADEERSVKPHLPEPWPSIRLDATAAVAKIIVSHRVRKKVSGPLHKETTYGDTGNDVTTKTGTYRVFVTRKKVEALTKGELADIRDERVRKVVAGWVAAHGGDPKKAFATFPKSGPDGPEIRRVRLTSKQQISLMAPVSTGYADLGANHHIAVYRQPDGTIDYEVISLFEAAGRVSRREPVVRREREGGGQFVMSLSPGDTVWFPDGAMAGYWVVQGAWSNGQIVLVSANDAIGQSTTRPSPGALLSKHGRKITVDPIGRVRPARD

SEQ ID NO: 9029 - protein, 1554 aa, unidentified
  REGION 1..1554: note = Description of Unknown: Cas Enzyme sequence
MNKKILGLDLGTNSIGWAIINQDFETKTGEILGMGSRIIPMSQDIIGKFAEGSKISQTAERTSYRSVRRLRERHLLRRERLHRVLNLLGFLPKHYAAEIDFENHLGQFINEAEPKIAYKSDTINNNLKLNKTQYDFIFKQSFGEMLADFAKYQPELVANNKKIPYDWTIYYLRKKALTQKIEKEELAWLLLNFNQKRGYYQLRGEEEDENPNKLVEFHSLKIIEVKADGVQKGKDEIWYSLLLENDWIYRRSSKTPLFDWTEKVRDFIVTTDLNDDGSIKTDKDGKEKRSFRAPGEDDWTLVKKKTEQEINQSQKTVGSYIFDTLLEKPKQKINGKLVRTIERNFYKKELNAILDKQIKEHPELQSTDLFSDCVRELYKNNEAHQITLSDKGFAHLFLDDIIFYQRPLKSKKTSISDCTLEYRKYKVDGVEKTKYLKAAPKSHPLYQEFRLWQWIYNLSIYRREDDSNASSLFLNSLQDFENLFDFLSHRKEITQDAVLKFLVEKTGLKGKVLTAEAAKYRWNFVDNKDKKYPCFDTRTLIENRLEKVNEVPSNFLTIDKEEQLWHIIYSVTDKIDFEKALKSFASKHQLDQGSFVENFKRFPPFKSEYGSYSLKAIKKMLPLMRLGKYWNWDAIQEETKDRIIKIITGEFDESIKDRVREKAINLSEKEHFQGLQEWLTKYVVYDRHSETPNAGKWNSIQELEEYLKEFKQHSLRNPIVEQVVTETLRVVKDIWTKYGNGVTGFFDEIHIELGREMKNTADERKKITEHVSKNESTNLRIKALLAELLNDPGVENVRPYSPMQQEILKIFEDGVLNSNIEIEDDILKISKSAQPTSSQLQRYKLWLEQKYRSPYTGQIIPLNKLFTTEYEIEHIIPQSRFFDDGFNNKVICESAVNKLKDNQLGLEFIKNHHGETVELGFNKKTFSIFSIEAYESFVKEHYEKNRSKKSKLLMEEIPEKMIERQLNDTRYISKFISSILSNIVRSETNDDGINSKNVLPGNGKITATLKQDWGLNDVWNELILPRFERMNKLLNTDTFTAYNEKYQKHLPTVPLELSKGFQKKRIDHRHHAMDALVIACATRDHINLLNNQHAKSNTKRYDLQRKLREFEKVSYFDKKQNQKIEREIPKEFIKPWENFTVEAKNKLESVVISFKQNTRVINKATNHYERWEEKDGLKIKKTTEQEGTNWAIRKPMHKETVSGKIELKRVKVPKGKLLTATRKSVDTSFDIKTIESITDTGIQKILKNYLSNKSNNPELAFSAEGLEDMNKNIRIYNDGKPHQAIYKVRIFELGSKFPVGQSGNKKYKFVEAAKGTNLFFAIYKDDADNRSYESIPLNEIIERQKHGLPSVPLQNENGSKLVSYLSPNDLVYVPTPDEQENINSIDFYNLNRTQIKRLFNVNDFSGTCYFTPNRLSKSIASKEVDLSFDELKNKLSGSFDTKTASFEGKQIKEICIKLNTDRLGNISPEKKKMSTEIPEEKNTVAEPAAIYGKNKIKFFNSFDEMENDQLNYFASLGPAQLLLNLKQLVLTSFGYQADIPVSKLPRIIYFNDEP

SEQ ID NO: 9030 - protein, 1236 aa, unidentified
  REGION 1..1236: note = Description of Unknown: Cas Enzyme sequence
MTAKQPECVLGLDIGSNSVGSAWVNLKTGEIVLGVGVFPAGVEETTEGRGDPLNQQRRMKRSLRTNVERRAVRKRKLRRFLVEQGFLPAGDLEFAALLEAANPWHLRRDALTRALTHHEFGRILLHMCQRRGAVGVNLRAVEEGEGKQDEEGAVKEAIVHTRKEMAGRTFGQMMADEFDKRVKTIKTTDGGEVLVRDQIRNLNDNFEFHADRGIVRGEFLRIWQEQSKFDSPLAKKLTDQLKRQLDDPTEDDVYRHRGLLFEQRRTTWDLGVLGRCVLEPSDRCAPLADMHAQYFRVIESVNNIRITKTGEMEKPLNDEQRSKVIAALRSAKTASVATVRKALDIHTKAVKAFYSLNIERDEDRPLNTDWFYRSFAIGVFTVEKWEAMSKPQKEAVNRAVLSFDPESDAHAEELRAGVQKWFGLMPEQADEFIEAWMTRPKLEKRLKLSRRAIANLLEYMSRFDTANNRWPTQINARESLAEDGDAKDILSGKPVSPAQRQRYALGAKQMSKADRHFMKKHPDLLPPAPFLSNPVVRKAIHEVRRHVIAYIRKFGRKPDRVVIEFARETTQPGKVRDEQLALNRRRNAIREKIIEEVVKPAYKGVFHKLSHNQLRMAVDRVILARQQRWVCPYSPAGQEAGITDPIAATGSGLEIDHIVPYSRTGDNSLNNKVLVWQKSNRDKRNQTLREWWKDKFDEKAARMEWMQRPVKGDLEYFRPRDFGRKWENFNRVLKSSEEWKSSQLTDTAYAARQVKAYLSDALFGGKGTSETGGDRNILITKGQYTAMLRRDWQLFQKLKTIGEGDEAKVSGVKNRDDHRHHAIDALVIAMTDNELLPRLAKLAEVQEEHFFKTGEHAKRTPIEPPLGMGVAQFRRVVLSKVFDEFDALHDATDTGDKPEHTPLIVSHRPVNRKIVGHLHKDTLYGVVLKRDEKVDGEFVRDQTKATNRISVARLTPNHLRMPEGWAERQRGITDPKTPVHDVVRLKRECAAVTDPPPGKSGIVRDRALREQLRRCFAAAGADPDKFGKDVPASLLEAKRLLHASGVPIRSVVLLRTNEEPIVIGRKKYDSMTKRMERDDDVRTLRLYDSRNNHHVEIRANDKGKWGGEVVTAFDAAARVRREKRDAVNRAATLDGKFIMSLAQGETLYMLHPDTRQPGYFVVFKIDKPQTVHFVHHWDSRGASERKGTDGKPIAETAREDIAVSASGLKLLAPPGHPTPVKVRVNPAGVYKIMLND

SEQ ID NO: 9031 - protein, 1152 aa, unidentified
  REGION 1..1152: note = Description of Unknown: Cas Enzyme sequence
LSDRKSRPWRLGLDLGTNSLGWCVFDLKKGEDGRQHPAGIRRMGVRIYTDGRDPQSGASLAQERRGPRGARRRRDRYLDRRADLLKILIRHGLMPADPAVRKKLEALDPWRLRGEGLDCKLSLHELGRAIFHLNQRRGFKSNRKAERGRDDKEAKDSQDMKTAAKKLDAVLGPGHEDARTLGEYLYKKYRATFDGTAWRPTTPAMAETVRSRPTTVKGRNTYEFYPLRSMIEGEFDALWAAQADHHAELTDAVRDEFHDIVFYQRPLRPVDPGPCTLDEEEDLAKRDRRAPLALPIQQDFRILQELANLRLTHKTNASVSRRLTLAERDAVYAALKRSEKVTFKRIRILLKIEDIWSFNLESEKRDHLKGDIVSVRLSRESAFGKRWYDGLGDVERQNIVLKLLDEEDPLEIVRIGVEVWNLTPDEAEKVADTPLPDGYGRLGLKALSRIVPILKERADKDGGPIGFAEAVQAADYTHHSDFRDGELLEELPYYGEALQRYTAQVRSDSAPAWEREFGRLANPTVHIGLNQLRKLVNALIEKYGAPEEIVVELARDLKRSLEEREEIQRQQTENQKKNDLRRETIDDIQKSQPGWKPPRNAILRLRLWEELDATNATNHRCIYTGKVISRRMLFSEEVEIEHILPFTQSLDDSPANLTVSLLAANRDKGNRTPFDAFGHSPNGYDWDAIMLRVSTLPRNKQWRFRPDALDMVKSRIARENARLEGSLPKDALDDIEKTGGFLARQLVDTAYLARLTRQYLWKVCDPNRTWVIPGQMTALLRRKWGLNSLLGDHNKKNRADHRHHAIDAYVVGLTDRSMLQSIQAAQGTNRERIVDDMPDPWDGYRDQLKEALDRIVVSHRPDHGIDPKAVAGKRTSTSGRLHEETAYGLVKDPVKEGGNVAARKPLDSLSVNEIERIRDPSLRDKLRRHLAPMLGDSSTLDNAKARLAEARKAKDAKAVERAKAEIDRLKIEDRNRRKSGAKDFKTALAEFGRANGVRRVRLVKPEAAIVIVRDRSGRPYKAYSAGDNLRVEIVEWTDGTWGREIVTAFDANRPDFQSKWQASDPGAKLLWRVHKNDLVKLLVGGEERVMRVVSLWDKFLQLAGHQETNLAERYRDGEFKWTFGNYDKLKELKFRRVTVGLFGELRDPAKTP

SEQ ID NO: 9032 - protein, 1151 aa, unidentified
  REGION 1..1151: note = Description of Unknown: Cas Enzyme sequence
MITLGLDIGTNSVGSAWIDTGRQSIDVAVTIFPAGAEETDTKRGDPTGQVRRQARSQRRSIARRAARKRRLRQLLIRSGLLPATSDEWTLFVRQTESDPRKETPWHLRRLGLTEPLTAFEFGRVLLHLAQRRGARGVEWDDDEEGDAGKVKQSISHTQKEMDKRKVRTFGELMAMLYDERKHDVPNKTGKVFRDAIRNRRDAFEFHANRDLIRDEFHTLWDKQRNLPSPLAALLTDDLQKELDDPTPTSTWAVRGALFGQRRTYWNTGTLGRCELEPSDRLCPRCDMYASEFLVLQTVNSIKLEERGRVDPFLDDAERAAVIQVLRTVKQPTTATLRKALKIHTAVKKATVGLNLERMKQIELNTDWFGREIIEGVFGREQWTTLTERQQQSVNQAIQKLDDPERLRQGAAEWWGLSSEQTERLVEVWKKRPALDDRVNLSRRAIRTLLPYMRQGDDVSTAKLKHGYPAAPRALTKADRRYLRKHVHSLPPAPMILNPVVRKSIHEVRRHINSWLRRFQKKPDRIVIEFARGVTLSSRDRNDQLSANKRREAERRKIEQDFAEYIGPGNPAHKLVLRVRLWTEQKWQCAYSGEQIGRDHVGHGTDLEIDHIVPDSRGGENGYHNKVLCFRKANREKRNQTPREWLSAEKFAELERRFAHLDGRSREKIGEYELVPNPRKFKLLHSEGRPEEEWRESQLTDTSYAAVAVATYLREALYGNEPPEPDGRQRRHIFSTKGQYTGMLRRDWGLLEDLMARVDSPEATGIVEPRARRDKKDRTDHRHHAIDAVVIALCGPELLTKLGTQARDAAEYKSRTGYWPKRTAIDPPWATSEEFRQQVLAVVSSAVVAHRPVKRRIAGSLHEATGYGVVDIDARRFTTRIPLAKLTQKMLRMPTLTRDDNGRDVWQEPPLEKSGLVRDRELRRVLRDQIAKLGLNPDGFTDKQIAEVAKADQLRMPSGVPIRGITLLRTITEPVVIRTPGKPVRVFQGGNNHHFEILTDEKTGKWVGQCWDMFTVARRVRPPAGQPKLPMVIGRDLESVLNRDLLDDEAAAFYRGCRFVMSLSQGEVLYCRHKDRELGTSDAVGYFVVVKLDKDRITLAPHWDARREHTWPITPEGLRKLGPTPDEPPYKVRLEPWATRLGTPSGISPLHD

SEQ ID NO: 9033 - protein, 1518 aa, unidentified
  REGION 1..1518: note = Description of Unknown: Cas Enzyme sequence
MKKILGLDLGTNSIGWALIEQNTEAFNGKIIGAGVRIIPMDQSQLGDFEKGNTVPQTAERTKYRSIRRLRERFLLRRERLHRVLNILGFLPIHYANSIDFISKKGQFIKNSEVKLAYVKDESGNFEFLFENSFRELTKEFKIANPNINNIPFDWTLYYLRNKALTQKIEKEELAWIILNFNQKRGYNQLRGEEDEKSESKTSEFFSLKVIDVIELNEKSSKNQFLFKIVLENGWEFIKPSNIPVEWKGKIKEFIITTDTNEDGSIKLDRYGKEKRSFRAPAEDDWTLLKKKTESDLNKSLKTVGSFIYDNLLKIPNQKIKGKLIRTIERDYYHTELEMILTKQNEFHPELSEKILFATCCQELYPNNELHKNNIANRNMNYLLLDDIIFYQRPLKSKKYQISNCRFETRSYKDNDGNLKIKPLKAISKSHPRFQEFRLWQFIHNLGIYQREVIKDGKLQIDVNITDSLITTDSEIASLFEWLNNRKEIDQKGLLKYFKLKEGTHRWNYVEDKSYPCNKTRADIVNKLLKVPNAGIEFLTPEIEESLWHILYSVTDKKEIVKALATFAKKYNLDAEFIVQFKSFKPFDNEYGSYSSKAINKLLPLMRVGKYWNEKAIPHDIILRIDAISERLKAIDYDSTKISNITDDDIPKPVLKSFINCKNPLSGLNTYQANYAVYNRHAEEGEILKWAKAADIDTYLKETFKQHSLRNPIVEQIITETLRVVKDIWNFYGEGKENYFDEIHIELGRDLKNPASVREQISKQNIKNENTNLRIRSLLTELATHSDVDNVRPFSPSQQEILKIFEDGILNAESDIPEDIISISKSSSPSKTQLIRYKLWLDQKYRSPYTGQIIPLSKLFTPMYEVEHIIPQSRYFDDSLSNKVICESEVNKDKGNNLGYEYIKEFHGKIIELGFGKKVKLFDLNEYENYVKQNFIKNPGKMKKLLMEDIPEGFIERQMNDTRYISKLVKNLLSNIVREENEKETTSKNVIALSGGVTNALKQDWGLNNVWNDLITPRFERLNTLTNSNDFGEWTNKDGKRVFQTKVPLNLQKGFTKKRIDHRHHALDAIIIATASRNHVNYLNNQFANAENKRIDLRNILCIKKFNTDNKSNYRWIFKKPWESFTADSKEKLESFIVSFKQNNRVINKTTNYYQRWKLDPTTKTLKKIKVIQTKGENWAIRKPLHKETVYGKITLRLKKTVQLSQALEKLEMIVDRSLKKKVSELKKDGFDAKKIINYFKEYNYRWNNLDISKVEIYYYEGDLVANRVNINDTFDSSMIKCVTDNGIRNIMQNHLDNYSDSKDDKIIEHPELAFSPDGIDALNKNIVNLNNGKFHKPIYKVRTYETKGNKFNLGNDGNKRTKFVEAAKGTNLFFAIYQDKNKKRIYETIPLNVVIERQKMGLEPVPEKKIHEKTQEEAKLLFYLSPNDLVIIPSINENFEELNFNTINFNNTSCIYKMLSSSGNQCFFIQNNISSIIWDKNEFSALNKMEKSIDGIMIKEFCYKVECDRIGNIKTAYK

SEQ ID NO: 9034 - protein, 973 aa, unidentified
  REGION 1..973: note = Description of Unknown: Cas Enzyme sequence
YQDPVSKKWIPEKCQKGDARLEREFAGEGDDTCYTSCLLRIKLLRGEKLEPWQIYKALHSAIQKRGYDKDVPWKRAEAKRAGIKFEDLEKEEARAEAELAKKDPAYQAALGAWKKFKSEIPEPYHFPCYYDAWKMGLWNEAEPFELKSQIDHNADSTRNVRFDRADIAMEIDALATAAGEQIPTLQGKAKYLLYGPAESPYASHNPILRNKYDLHLGSKDDWKGVLGQKIPRFDNRILNACALIPRFHVCKAEDDLAREVTYLQKIKNVLVERCGIQQKLSVEDISDLFATSKPDGLSFTPNPWKKWCKDNAYRPLPGHEEIAAPKTSGRSRFSRPALRLIKELILSGIDPAALYEKKKFEVAHNKDPKKGLVVADLKFIADLGDQPWTNFYLPEQKFDAIEAQNIRGGVLDKEAAIRSVIGSINDPVVRHRLTTFNQRLQQLEQNHGAPDEVVLEFVREDFMGEKARRELSKFQKEREKDRKRSREEASQISDSKSAPIKLELLRQQAGVCLYLGEALIPAELDEYEIEHIIPRSQGGPDAMLNYVLTKRETNETKGNRTPYQWLKSSEGWDAYKNRVEKANIINKKRQLLLREDAVELVERYTALAETAWISKLAQKIVSLRYGWRNGIDKEGNKHITVVSGGLTGRIRRKYKLNHVLNPDSETEEEAQKKNRDDDRHHALDAMVISFIPGWMRDQAKHYFFRFPDDVQKNPLGFFSAQINQVNPYNLAILKARMAQTIYGKRTDGLESRIVQRTILHDLPYKTVQMKSVFDLEYLAGQAKKIRDQNIRQAMLDLLRKNPSEAEWKTFCTHFRQPSRTGKKGSLIKKLWMNAGDPESYRDLSKDGTGAYFQAEKSHKGQIVYLELLKDKAGKVSETPRVEPVYVFDSPKQTETRLKEKYGQGIRIYGFFQSGCTIEITEDLVHSSTVTLKRGRYRLNTIYTDGRAKVTASNGEESSVIGLKKFISAGLRRV

SEQ ID NO: 9035 - protein, 1470 aa, unidentified
  REGION 1..1470: note = Description of Unknown: Cas Enzyme sequence
MNKIFALDLGTNSIGWALRNPDLTANQIEKFGVLTFNKGVGIGKTGEYSYAAERTKKRSTRRLYQARKYRLWATLEHLINEGYCPLTIYNLNKWRLYDKQEARKNNNGGRVYPVEDLAFDTWIKLDFNGDGKPDYTSPYQLRKELAEVKFDFTKEEDRFRLGRALYHIAQRRGFKSSRKGADDVKEKESNDDNEIADLQYSEKKKNKVILELFEKYPNAKTIGTLFAYLENDGIRIRESIAQYAIRENFKDEIKYIFEFQGLGLDHKLFVVTCVRFKNNKEQDCNGGTIFYRRPLRSQKGLIGLCTLEQETRIDKKTGIQHQVGKYRAPISHPSFEIFRAWSFLNNIKYKPADDNDGQWKSLSLELKTKVYNKLFFRKKAYFPFSDIAELLEKEGKKLHLNYKPKTSVTGCPVSARLRDILGDDYLNIRIPKAPSLKSKKNFYDIEDIWHVLFSFEDQEYVVEFAKNKLKLNPEQTKQFVTVWNATPVGYAMLSLNAINKINIFLQKGLIYTEAVLLANIPEIIGKDLWIKNEALLISDIGKVIDENRKQKTLLNIVNSLVSKHKNLENSEKFGHKNNNYKLEKSDITAIEETIREQFGEKRWSEKTDLERDGISSAVKDCYQAYFITSGLERKDIYNERHFVVKSNNVIYYKSDSGYYRLPKLIDTLGEFLQLNFNVSDDKLNKIYHPSEINIYPPARADKDGALKLGSPKTGSFKNPMAMRALHELRKLINYMIETNQIDSDTRIVVEVGEKLNDANERWAIDAWQRQREAENQEFAEVIKQLLEDKKGIKANPDRLEDIDKMRLFYEQTNEQLLPPVEENKEETNGRKNRKSSVNKDEAIRWSGHGKKLIDKYRLWKEQGYQCLYTGNFIKLTDLFDDNVIDFEHTIPRSQSFDNSLANLTVCYADYNRNIKKNQIPFRLNNYSEDYGAYSAILPRLGKWQEKVERIKQQIDFWVTKSKKAADKKWKDDAIQQRHLWKMELAYWRNKVDRFTMEEVTSGFKNSQMVDTQLISKYAFHYLKTYFEKVDVQKGTNTAVFRKIYSLQVPDKTKDRSKHSHHAKDAAVLTLIPTAAKREEILKTYYEHRERRQPFTAEPYKGFKCEFVWGIDDSVLINNITNNQALTPAKRIIRKRGKVQFIAGTQNAKIATGDCIRGQLHDETFFGAIKPAKRGEKGNIIRDEEGKMIQGDIRFVVRVPFLFKKDTNSSGFKTLEDIEKQIVDEGLKRHIREQVEKAGGLKEAFEKGFYQLDKNGNPIKVDKDGKKINSIRHIRIFKAVTDPLQIKKQTNLSKHDYKQFYYAGNASNIAYGLYKNFDNTKIAFKIIDLFTASKINKLTASGKLELENQMVVGKQLLILQSILIAGQKVIFFKRDKSELESLTIKEISDRTYKIEGFEKDGRIRLAHHLNAMSDNDLKAMESQFGKAIYQGFSSINYENPWPKLKLSMGNLKMVIENKDFDIKMDGSIQWI

SEQ ID NO: 9036 - protein, 1376 aa, unidentified
  REGION 1..1376: note = Description of Unknown: Cas Enzyme sequence
MIAILKQIQNMEKVIGIDLGTNSIGWALRDPRAKGNQIVDKGVLIFDKGVGEVKGIETPLVKPRTEARGKRRNYQAEKYRKWELLQFLIQEKMCPLTIKELDEWRKYKKGLRRKYPQSEKFIQWLRFDFNGDGKPDFEQFGFDKHESYYVFRMLIVNEDEGAKKIFQNNPHILGRVFYQLVQRRGYRGRDDEDEEAKTILRGSEKNGTVGAKAIMPYLQKHRTLGAALYHLHKEKKERIRKRYNLRSDYERELKEICRVQCLDEQFYKPLWKAIIWQRPLRSQKGLVGACTFEKNKARCPVSHPLYEEYRTWVFINNLKIELPKTINKKEYLKENIYPLFFKASDDFKLSSIAKVLDKVGGKITARFPHGTKDEKGKYKKGTPDTKVVSAKLLNSFLEIFGENWRDVTIETNDTKRIRKKDGTFKEHTINYTFEDIWHVLFSFDSKDKLNEFASGKLKLEADKAEKICKIRLQQGYATLSLSAIKKLLPYLTQGFIYSEAVYLANLHKVLGAKELTSGIIEEFSIQVRSIIDQQKTEKLLISTVNNLISDQLNSDSRFGMHSNYQLDDNDSLAIENKLNEQFGSSTWAEIGETQKRLYFDFTARNYKAFLQKPINHKKEDIFLKTPRLHDKIFTYLKDVYSLPDKNIKYLWHPSEQETYLPAKVKNGIKQLGDPQPISRGFKNPMALKTLHKLKQLVNHLLETAKIDEDTRVVVEIARELNDANRRRAIEKWQRDRENKNDEYKKKIKEVAIECNLDLDTTNKKIIDKYRLWVEQNHTCLYTGQVINICDLFNGLRFDFEHTIPASLSFDNELKNLSISESKYNREVKGDSIPYQCPNYHSDATVEGILYTAIKPRLKFIEEKAEHLENLLDEWRAKSKFASTKEIKDACIQRRHYISFDLEYWHKKLDTFTCKEYKAGWRNSQLRDTQIVTKYALPYLKTAFNKVEVQKGTVTAAFREIYRIQPRLEPKDRSKHSHHAIDAAVLTLIPPAAIRDKILLRYNEEKDKNANNTYHEKPTQWNSFESHQIRSIEEEVLINHLAQNRTLTQTFKNVRKRGKQQFVKEKIEQGKWQYKLGEDGKKIPLVAKGSTIRGQLHKESFFGAVKFGEQLWLVERYPISTFTSITDCKNIIDKAVREIVQTTIEKRMADGQTFDQAKMLPIPFPSGKEVIKKVRCKVAAGRGYLTPGKALEIHKHTYKSKHEHKQYTYAQNEENTLCLYYENANKIKRAFRIVGLHELAQLKLGKIDDIRSEAFYKTIELGKGESKFEISISQIITVGMRALFFKESIEELKDLSTEELIKRLYAVYKFNEVGSPYIYLHFHLEARPNDSLGDGDTIFDPAKYQPRLKLKADKFKCALENKDFEVTLDGQIKILFP

SEQ ID NO: 9037 - protein, 1328 aa, unidentified
  REGION 1..1328: note = Description of Unknown: Cas Enzyme sequence
YHIAQRRGFLSNRLDQSAEGIFEEHCPQIQSAIEDLSTSNEILIELKDYFFNTGILDESIKGGFKKDLDDGEKKLKSLYNSLVAITNKNESDIEKCREELIARLNKKEDFGAVKQKIGEISQAMKDGKFATLGQYFYSLYNKEVEKENATTKEKEKFNRAKIRNQYTAREEHYLAEFEIICKAQNIEGINDKEVLPEKRFESIAKDLYKAIFFQRPLKSQKGLIGKCSFEKSKSRCAVSHPDFEEYRMWTYLNTIKIKTPKDETLRFLTAEERQKLVSKFLRKKDNFSFEDLAKELIPKGASFDFYKSFKAQNVQYLFNYKPKDSVSGCVVSASFKNIFGEDWKTKQFVYQTKNGKNESVTRNVDYIDLWHLLSVATSDIYVQEYAKEKLGLDEKRAKSFSKIKLKKDFASLSLNAINKILPYVREGLLYSHAVFMANIENIVDDKIWNDQTQRKYIQINIAKIIETNTYDNGLLEVINGLIKEYKKDSAYYSKEAETSFKNDLQQKLLSFYKYHKIEDNKDQILNELYPVLIEQIKKQEYIQVKRLDEKVLEFLSGENENGEIFCTDEKQLKKLYHPSDIEVFKKKIIKDANGNEQLVLGSPLTSSIKNPMAMRALHQLRKVLNALILEGQVDSKTIIHIEMARELNDANKRKGIKDFQDENKKAKEKYREEIKKLYFDETKKEIEPTEDDLLRYQLWLEQDKKEIYEEGKSIGISQIIGANPDYDIEHTVPRERSQDNSLMNKTLCTKKFNREVKKTKMPVELANHEEILSRVDHWRKEAEKLTWQIDQIVKSTKAMATKEAKDRKIRLRHFLTLKRNYLQGKYDRFVWEEPKVGFKNSQIPDTGIITKYSQAYLKSYFNRVESVKGGMVAEFRKIWGVQKSYQENGKKYHEIKDRSKHTHHTIDAITMACMTKDKYDVLASAWTLEDKEQLNDARKLLADSKPWKTFTEDLVKIEEEILVSHYTPDNVKKQSKKIIRVRGKKQYVAEIEKDVNGKTILKKGANGKLIYQLDEKGERIPRLQQGDTIRGSLHQDSIYGAIKNPLNIEEICYVIRKDLESIKAIDIENIVDEIVKEKVRMAKENKILIFSANAQQKNKLNGTVWMNEEKGIPINKVRIYANSVKNPLEIKNHAVISKSRHEHKQKVYGQNDENYCMAIYDDGKNRDFELINIFNLAQLQKAGHGYYPAYKEKESKGKTIQIPILKRNSRDVVLKKGQQVIFYDKAVENPKVVTDIVDFKGRVYIVEGLSIQRIVRPSGKIDEYGVIMTRYYKEARKSDDIKKDNFKPDGDFKLGENKPTRKMNHNQFNAFVEGVDFKVFPTGKIEKI

SEQ ID NO: 9038 - protein, 1401 aa, unidentified
  REGION 1..1401: note = Description of Unknown: Cas Enzyme sequence
AWKKFKSEIPEPYHFPCYYDAWKMGLWNEAKPFELKSQIDHNADSTRNVRFDRPDVTEEIHALATAAGEQIPSLKGKADYLLFGPAGEPYASHDAGLRKQHKLHLGSKDDWQGVLGQKIPRFDNRILAPCALIPRMHVCRVMPKFKKAEPQTKRELETKSLLPAEVIFLMQAKNLQVDDKNTGVVRFLETGEIQELLDKATTDVLDAVRDEKTEAQILECYKITVSEWKHWCADKNFRYLNDAQGTKTKNPAIDEEKNEGGKTTDIVKAPRPSGRSRFSRPALSILRHVLLNASPELPPDKIIEKLHKDDLELFDLLGLDVLEKEPLLNGKKGVYEKRPRTWILVSDLVFLPFIWKQRLDDDKTPLSYSPNQIRIPDLALRFLRRKHEITNKPFSEILRDKDPEVNRRAKAILELIGEQNNPIVRDRLTRFWQRLLHFNNPVVNPDTKKQKPGLGLDDPECLVLEFVRDDEDNSLDGKARKGAIKDAIDNNTKERERIRKLLEDGNLPTSDDHILRRRLWEDQGCQCIYTGKGIGCTNYQNFELEHIIPRSKGGPDAYWNWVLADPEANAEKDSRTPYQWFHDEKADSEWVDYKNRVLNLKGKLGSRKADLLLSADAVELVGEKYTALADTAWISRLAQSIARLHFGWPLDDDQGKERVITISGGLTARIRRKYLLDSLLGSANRSGEHSEDDPDPAVVRNRIDEALQELETLKSKHPTTDPELSEVKEERRELLQTLRDLAAQSNKNRKDKRHHALDAMLLTFLPNWARDKNKEDFFRLEEIGDNTIYSEEGSRRKEAHRERIGKLYNENEAVFSQIREAKKEGNDAKMERLKKSILPARKEMAVLYQSIDKQKQPRNIKAVREWFKNQLATANFGNKVLPQNIARSRPKIEKTIYADRYVIQSAKQQKSVALCNFGLRPEFHDESISIFDARYLRTQLQAIIGIKGSKEKEALKKLKRLLHGKVSSEFPLETAQWITFCEQSEVLSHFPKMGKNKTLPTTAECLLDLHKIAIWATSRPPGHTGLINLAYKDGTSLVLDMEELGLKVPKFAKRIERPKKSKFKKETKPSLVLICLEDQCEKWPGFVFDRISQSKITNPDFQKSLEELSGFLSGPKPKDEDAKVDWGQRDETWKQKSKEFLKAHSLSPNLFLYEVGKTEPRPREKSSIWGVLFRKVERQFSLPELKKQTKKITCINSAKAIDLFADSLNSIPEIKDQERLWKEFCSVWKSVNKQAWEQFESSAKLTSQKWIDFHKSQSGPLVHKISQKSGDSLEEYVDLSKDGTGQWFKGNNQGYLLAKKGEKYHSHAVRFFEKESDVTARLKRDKWELLDETPWRLGMLLKLDKQAGTEKRPILSGHYFFGSFSNNTSINLNSCFGEKIPQGISLKSLWENGLRRMTDKL

SEQ ID NO: 9039 - protein, 1072 aa, unidentified
  REGION 1..1072: note = Description of Unknown: Cas Enzyme sequence
VSYSLGLDIGTNSIGWCIIGYSDTGIADHIKAIGVRIFSDGRDPKSKSSLALARREKRAMRRSRDRFLRRRQALLNLLVEYDLLPKDRSERKQLELYNPYIARAAALDGSLPLHQIGRCLFHLNQRRGFKSNRKTDKGDPASGKIAFATSKLRAAMCDSRARTFGEFLAGRLKNGQPLRIRMRDDEGPQKANGEASEGYAFYPDRALLEEEFRLIWDTQKKYHPDALTAERLEALFLCVFFQRPLRQPEVGRCMLLGTERRLAKSDPLFQKRRLLEELNALMIERGPGIVPERLTIEQRNTLLMAMHGKRSIAFTSLRKTLKISDAVFNKERAGRDKLTGDEVFAELANKDRFGPFWSEVDLERQRAIVSKLRDEQDGEKLVAWLISECNLEEERARKVAGASLPEGYGRVGETATRTLIRELTAPREDGRVVVYSEAVERAPELGHHSDFRTGEIRDQLPYYGEVLERHLIPGSGDPDEKNIEKRLGKLTNPTVHIGLNQLRRVMNAIIQNYGHPSEIIVELARDLKTSDDQKRDIQRKQKQDFEAALKRGEKLRELGQPDTGANRALLKLWEQLGEDPLDRRCIYTGQVIGPAMLFSDAVDIDHILPWSKTLDDSNANKIVCIAGANRAKRNRTPFEAWGGSSEWDAILQRAEHLPHNMKWRFNPDAMKKFGDESGFLARHLIDTQHLSRLAKQYLEAVAPDRVWVSTGKLTAMLRRHWGLNSLLPDHNYAKTVHEKNRTDHRHHAIDAAVIGVLSLSLIQKVAREAGLRELQGVQDVIDSIAEPWEVFRKDLGDAVNRIIVSHRPDHGDLGEVSGKRNQQTAGGLHNDTAYGLTGEKDSKGNAIVVHRVPLSAIKPTHLEESGTRIRDDQLRNLLRETTQGLSGKDFEQAVQTFAGTHKDFRGMRRVRVTEPLSVIEIKDREGNAYKGYKGDANYRYDVWRLPDGKWAADVVSMFDAHSSQDGNQPRRPHPAAKRVLSLHKDDMVKFEDDKHGDGIGRVVKFDQSGSVYIAPHNEAGSLKERDAASNEEDPFKYFKAAASRLKKAKVRQVRMDEIGRVWDPGFREPDDA

SEQ ID NO: 9040 - protein, 1068 aa, unidentified
  REGION 1..1068: note = Description of Unknown: Cas Enzyme sequence
RTSLDFPANWREANFTKVSYRAKRKAAGSWINIVTTDGLSVVLGKFGQEDVRKKANKAIKVRLEAGTMPFAELRRLYELKAGDRFEHIRNDAEIVPVVLETTYGIPDGKKTFIKLLFAKSKKPIALKGRAMKALSDLTKEDPNATLAVLRQKIENADRLESSWQFEYCRKETIPIQLLDEPATQVPIEYEDAQQAEDDTLIELKGWHDFKRALASECPDWWGRLQAAYLKPQTDAGLTAARQLDEIAELLTKAQTDADVADGLVRLGLTPPQIKALEPVRFKQYRSLSLVALRKILPGLESGKTRTDACKDAGYETLTHQRAKFLPPLETYLYERIRHGKKTTYTERRYKDLTNPVVARAFNQARLVINALIDRYDSPAYVHIELARDIARPLKGRYVQGKYIEGRLDIQKKQEENRNKRNAVRQNFTDTHKINSPTARQILKERLYHEQQCKCVYTLECLDLDSVVKDENYAQLDHIWPRSRTFDNSMENLVLVHAHANQDKGNRIPYDFIIQKYGEEHWRRVMAHVIGCHGISGNKQKRLLATELDADEFSARNLVDTRYSTRLFARMVRDRLLFAGQIEDRIDDIDPSESGKSRLEKFHKTRVRTPQGGLTAFLRRSWLGDIKDREASDKHHALDACIVAACNPKVINEVNSYFANEEKVPSRFKKNADGTYTDRDDGSGEIISKKEARERGLYLPMPWDGFRMEFLDKYESLFVSRAIRKKRSGELHDANPSGQSQQYHQKRVPLRLLSLISLETSNLPPEFLKRNESLVNALRSRLELAGDDASKAFQEPFFWPKENGAIVKAIRLPAVERRRTKLVEVTPPTLTEKQTFKRVALNKLTLDDLAPESLGVQYHRRNLVLITALRERLELFEGNGEKAFASEFRKPINSTHRGEDIPAVGPVVRKFSLPIAMNSGVKLRGGVTGIGGALFTQVFWTGAEYFFRPRYATRESDSFGIAGVPSASVRLFDITQNDLVEVILKDGQLVIGYMVMYETDGRLQIRDHDRAGKGRAAKVENDRLPKLHHPIGPQLHRFSVSKLASIRKFQVDVLGGFSIDATELPHGLA

SEQ ID NO: 9041 - protein, 1057 aa, unidentified
  REGION 1..1057: note = Description of Unknown: Cas Enzyme sequence
MSAQTAQSYILGLDIGVASVGWSRIECDPDNNFRPLRLLGAGAHIFEPGTEGSQADIAKGKDVARNQQRRTARLTRRQTWRRARRKQQLLRLLIANDLLPASITPLKRPEEIDTYLKRFDADLRQRWITNKQHTDELRLAYLVRSAAADRKIDRHDFGRALYHLAQRRGFLSNRRADARKQDGDDDRSVVKTSIGELQKRIDAHTPPLLGAYLASLDPEQEKVRRQWTSRPMYTTEFDALWLKQAEHHGLVDDAHDSIRQAIFYQRPLKSQKNLIGRCSLIPTEPRAPIAHRLYQRFRVLQTVNNLQIVPLDGSPRALKKEERTGLLSLLLEKGDLTFDKARKLLKLPRGTMFNLEAGDEKRIVGHRTDAKLREVFLKRFDSFSAADQDRMVEDLRSFRLPEALERRGRKRWDLSAVDPTAFAAINLEEGYAPLSIAAMKLLLPKLEQGMPYATVRRAEFPESFASQEPVPTLPPVQEAVNDLRNPAVARSLTEIRKLVNEVVRQFGKPHTIRIELARELKNPRGVRERITKQMRDREKIRAGIVQRILDEPKLGIGQPRRDDIERVLLAEECGWNCPYTGRSFNMAELLGPTPQVDVEHIWPRSRSLDDSFLNKTLCFHDENRSRKRGRTPLEAYGGNRELWADMIKRVERFKGDPYARLEKLRRFKAEEIDADFSNRHLSDTRYIGRAAADYLGLLYGGRDDATGTKRVQVCTGGLTAWLRSGWGVSDLLGEDGEKNRADHRHHAVDAIVVALSDTRSVQLLSSAAAVADQRWARRAFDHVDEPWPGFRQEAAKAIDAIIVSHRQSRKVSGPLHNDTIYSGLIDGTPRVRKELQKLSPSEIRDGKVVDKRALAAIRAKLEQAGKPEPTPRDISQLFGLAENLPLVRGHDGQMVKLRKVRVLADPGQTRIGKPGFERHINTASNHHTIIYAELDAAGKDKKWFDEPVPLLQAYRRQAAGQPIVRRELGADRRFVFSLAPGEFLEMATPDDATKRAVYRVLSISQGDMELRLHHDARMADEVRKSKARLRASADKLRKLLARKILVTYLGEIRNAGG

SEQ ID NO: 9042 - protein, 1176 aa, unidentified
  REGION 1..1176: note = Description of Unknown: Cas Enzyme sequence
IELFKYKEETKIPITEIGDLKEVEIISKYDEEGTIDNKKTEFIINEVREFLITEVRNTGQKIKENLIFEVELETGWIKEQQSKFTPKWKGTKRDFIIRTKYDENGNRILKGADKGRNINIPKEEDWTLMKLKTETSLTAFNTKNNTKGVASFVYYNILQNPKQKIKADLITVIERDYYRDELDVIYKNQEKFHPELKNRNLYEQAIQLLYPNNNNHQKTIKELDFNYLIKEDLLLYQRDLKSKKSLIADCIYEKENFERTDEKTGKKYKKPLKAVHKANPIYQEFRLWQFIKRLKIIKKEDTFNDEININVDVTSNLLTKELKEELYVFLNDKENVTEKDILNFFNKKHKDLDIKEEYYKWNFASEKEPCNTTRYKFILLSKRVLRSKYKDFLTPENEYSLWHFFYSVKKKEEFTKGLKNILCRLLEKSNLSQDYLNELIKSFSSFGGYTNDYGTYSEKAIKKMLPFLRLGKYWNSKDVEIIITKTNHDVKQTVLDKEDINGELNDFQGLWISSACYLVYGRYSEVGEVQFWHSPYDIENYLKNELKQHSLNNPTVEKILVETLHVVKDIWKFYGKEIGKDETGRVIYDKLFDKIHIELGREMKKNNKQKERDDKQNKENRKANDRIVELLRELKSTNSSLQEKSPFQQEKLRILEESLLTSIEYDKDNTEYKLSSGKITKKEIKEITTKEFAKISKSDFKRYKLWLDQRYQSPYTGKFIKLSDLFDRKKYEIEHIFPQERITLNALYNKVICETEINKEKKSSTGYGFISNSKSKKVFCTAHDAQVEVINLNDYEELVKNNFSGKKREILLSKEIPKEFTNSQLNNSQYISKMAMKLLSNIVREKDEDTFRSKNVLATNGTITSTLKRHWKLNDAWNEIISPRFKRLNELTNSNLFGNYREINGHQVFINEVPEEANQNFDSKRIDHRHHALDALIIALTTENHINYLNNISSQENNEEKLKTRKGIKFQLTNSRKGFNEEKEWYFLPPAHIKTKDEIIEYEYEFKDAKNKIFKEIALNALENTIASFKQKNRVIRQRWNKYFKTEDGKLNVVKQEGLKELGNYNVRKRLHEDTFYGKVKLQHKTISINLEKAINEGFDLFDIELSKEIDELKKIDGKSFKDIIEELGNKYPKVTVYEKFVATRFGNNLESFAQIPSDKIIKAIESITDTGIQQI

SEQ ID NO: 9043 - protein, 1156 aa, unidentified
  REGION 1..1156: note = Description of Unknown: Cas Enzyme sequence
AGLGDDYRRACYFDAFHMKLWNPSAPDVVALHPTDRPESTRKVVFRARDIEAEIFALAQNAAALLKVLEKGYAAQMKKYRDTVDERIARANSYRAQHGKKLVTAPDFSRGAENFAELLVYGPGGNPKLANGVRPIASADPAIRRATGLRPGSPDDRMGVVSQGTARFENRLRSDCAVIPRLSCCRNLGGDEFSQITDDDDPKLLPAQVTLLMKLKNMRVQEITEGRPQRGLKHSDIAEIFAALNPKRKYHLTKTEWRKWCKTFDVLPVLDSHDKAKPGPKATNEAAGEKKSKDDDAVEKPSTQGRSRYSRPALRIVRELVLSGDAPSVFHARLLRREPELLAKLGTKQKKEGRIEDRPLEISDDSADAKVNVANGIKGLLVSDLAALLRMRKDGATTDTWEDLYIPSQQLDRLALQSNATREERDAAIRALIGQQNNPIVRHRLDTFWKRLRILEAMKGSDGQPLGEPHRIIIEMVRDDSESSWLGQEAVKEITLAQKKQRERRDNARDRLTEMGQPHGDVLKYLLWEAQGGQCLYGKEVKSSACAYTATSISFTEIAKCRIDHIVPRAMGGPDSFSNKILTTDEANARKGDRTPYQWFRQDRTTEDWDAYRNRVSAREFQLGAMKTRLLLSADAETLVSRYTPLAETAWITRLAQTVAGLHFGWANGNDAKGDKRVIVVSGGLTGRVRRKYFLNSLLGSNRALDERIAAVLDKLAALRTSPLPREQVKDIRRELRDELGELGKQAEKDRSDKRHHALDAMVLSFLEGWVNDPKREEEFRFTALGDAPAFPENRKSEIGILRQRIIALGAATADKSKTREQREELQRQITTCHDALASMRQPHDARTIREALRKELEGSESEGIAPVLPRHLHLPKPRLEATFHRGVWLRVETAKAEQATIDNYDRAFSEVRLALERIAFLENRETRREEFSVKHGLRLAAEIAPHKDYDEKAVRGVVRDFLRTQPSEDQWREWCASDAIPTLIKPKKGTPDLKELSLYKIEEKRTKRVPLFDLGVGSNEVPDWNPTHFAMQVSRIIRRPEKGKDLPDIPLEPDAEVQAKLLALQPRIEEHYRTYPPDPGDRPRKASERSAWEAHREAAKDAFDQFLRDTGLDRNKVVYLRTDSAKVTDRRYEKAGISSILLVKTKRFDSEQLAKQ

SEQ ID NO: 9044 - protein, 1014 aa, unidentified
  REGION 1..1014: note = Description of Unknown: Cas Enzyme sequence
QVLNKIAPHHYDDRVRGRYTLRKWYEEEFDEIWARQCQEPAYAALNEQMRALRNEVIFMVRPLRPVERGRCQFEPGKMRAFRSHPIMQEFRFRDELDRIRITHGERINAPLTEEERKSLWEAVLGKKNKKDRSGTTLSYAPKEALDWKEVRQILGLPGFPEASKEKDAQPMGKGKGAAQVENDHKINLQRTKTGGLNGLKTYNQLAKIPHEPLKAHLKTAFEYLLLPRDAYVRVDNDGEEGQQLRTAEKHLYDLWQLLDFAEDPDWLQTHLQTATMKDSGALRYAFSAEAAEKAVKTALEKGTASLSVRAARKLLNQMRSTGDPYHLAAKEVYGTHTQLAKDGTADALPPVKDAVQDLRNPIVNTVLMQLRKVVNEVVALHGKPDVIRIELGRELRNSATKRAEMEQENGINRARRDAAKQFLRAEGISVTEDAITRYRLWKECKEECPYSGKSIGKSQIFGEDPKFQIEHIFPYSRSLDDSLQNLTLCHRDYNVYKGNRLPYEAFGHGRATVDGALVDWDEMMQRITRLLPHKAARFRKKELDIDTFISRQLNDTRYAAKLAKSYLEHICPTVEVTNGRATAHLRHLWGLHNVLLDAEVCHFPEVVQALKERANTTNDAKLRIDHRHHAIDALVIGLCDRRIMQQLATANAHRYRYHHVPDFECPVEDIRSKAIALCRRMVVSHKSDPYPGGQLHDETFYGGVYDAEGNLVRDGNGKGLHFIRKSLDSLTPVQITKIMPKSMHEAVVRHIAATSQKPFEYEEKDKKGTHAVTLTTVLEEEKVRTGKGYTKEELERLATIFMQAPLYLEKHVHPVRRVQVRVVGDLVPIRAHKQDGKPVYVNPQNNFRLRIWVDANGKREGDIVQMIAAVRQVPPIPAGCTLVTELHKQDMWLWGCEPDQVDFGDLGRYPEYAKALYRVQSISHNDIRFRHHAAAVLEWEIPKQDEILLTEEEEEPETPANEEEGPESEPPVEEDAGPAEKGKKILLGLKRCGNYQDIKGFKVIIDAAGRLKRE

SEQ ID NO: 9045 - protein, 932 aa, unidentified
  REGION 1..932: note = Description of Unknown: Cas Enzyme sequence
MSGSSGYSVLALDIGTNSIGSAWLNLRRGSIATGTSIFPAGVDETEDKRGDPKNAKRRMTRRTRITLRRRAERKRELRLKLIACGLLPETAEEFKALLQSTDPWQLRRNGLDNPLTPHEFGRVLLHLAQRRGALGLHIAEAEEGEDGQQEASDDGKVKAAIGEMRIKMRDAKVRTFGEFIAMQRDKRVHPLTGEDRRAMNERKGPREYRDAVRNKAGNYEHCADRAMIRDEFRRLWEEQSKQRGDTAKLLTDALRADLDNEQGDSIWRHKGLLFGQRRQTWDLGTLGRCVLEPTERCAPHADMYASRYLVVETVNNLRIIERGASPRPLSVNERKKIKEYLSGPLGVSPARKIKGKTFPERAKQTVSVTDLRELMGWGKATKSTPYRFNIETDEDRQINTDWFSREIIHGAIGSEAWAKMPERLREGINKAILKHDPEQDGEADRFKAGVMKWAGFDENQAAALVVAWAKRPKIDAKRLNMSRRAVRNLLTVMDQTAPWPQPKSADGPSHRWLTQIEARKLLAGDADFCDLTTGKPMDGITRRRYATGAKGATASDRHYMGKHVLMKDGKPIIGPDGHPLAEPPPAPFISNPVVRKAIHEVRRHVVEYMTTFGRKPDEIYIELAREARMGAKDADRALFRNRLRSRIRTDIIDHFQLDSQTPTQQRAAVDRIVLCVHQGGVCPLCGNQSITTKLTPRMAAYGEGCEVAHIIPKGSGGHNGAGNTVLAHTKCNRDMARRTPRQFWSDSVKGGFDEGFRWIEGIFEQVGRPKPAEIKKAEGDALWACYFDWKDDKRKIEQFAKDVKDIQDMTQRQDAATKYAARQVMAYLSDALFDGKGLPERSGGTDARTIFASDGMWTSRLRREWGLFFDPHYARAKGLSNEAEHGRKEKNRGDHRHHAIDAIVIGLCTQSVRNAWENRERSAADEKDHDGR

SEQ ID NO: 9046 - protein, 1340 aa, unidentified
  REGION 1..1340: note = Description of Unknown: Cas Enzyme sequence
MKKILGLDLGTNSIGWALIEEKNNILKKIDDIGCRILPLEKSLLDEFEKGNDITKNATRRQKRGSRRLNERYKLRRNNIIKLCKVLGIVPKGLEPLFEKISFDNKKLIIPQAAYEKGSHQFKPHELYELRVKALNEKITLEELFRIVYHLNQRRGFKSNRKAPKPEEEMLTEDIFTGIKKKSEISFEKVKIVSVEPTGEKKGKKQSEVFKIILEDGRFCLTDKYIFKKYINETVILEIKKETLKTATEPKYTFSFPTKWQKNRKELNDAILKSGGYPGKYFFEEFLKAKNEGKWYEFKVRESIVNRELFESEFQMIWEKQREFWLTENNIDLHFLSNFQVAIENIVPFHNKEEKQKWIQKGLGDFIKNYIIYYQRNLRSQIMTIGDCRFEEKYYQKIDEKTGEITLERNGPKCCPKSHPTFQEFRIWQQINNLIAYDEREEAIYIDDETKVDLFNYLNERDEASQDEIKKFLKKKLPQLSEINVVKNWMGNRTLYFFKKIFDSENFDGSLILKQNEKLLRLWHLVYSVTSEKGMNTGLKKLNPNLPDKIIKILTLSDFKEKQYASLSLKAINNLLPLMKTGSMFNKHELTEKIKKRLNQFSKGELDEEFDDKTLEKLKEKTTSENFSGLPYYQAASLIYGKHTAKQEDRYERADEILPIPRNTLRNPIVEQVVNETLMLVKEIWIKYPDLIDGEIRIELARSLKSNKEERQRLSNRQEMNKKENQEAVEEIRRHFGANYNPSLADIEKVKLWKEAQGKSPYTYKTINISELFSSNIDVEHIIPRTRYYNDGLINKTICESHINADKDKMTSYEYMNTGTRCQDEKISYDQFLQVIKRFSVPKRKMFTMKEIPDDFIERQIKDTQYIAVRIREELGKIVGLHNVKTTTGQVTYYLREQWGLGELMRRILKPRFENLQDKFDVQLVSEEEVIGKNDKPTGKKRTVIKGYSKRFDHRHHAIDALIVACTRQGIVQQLNLLNQITKGKTKQIEDTIGESLRKFIPPTGRVDRNANRFYSMAENVVNSIIVSYKNRKRLVSKGINWFQKFNPEKNKIDKFRQSKGIPWAIKGRLHEETNYGLVDYGGVLRFTSRCELIKLTENKILNILSPLIKESILIQINKPEYKGDIKKAFGPEGLIEFNKERRIPIYSVIVMKDGNVEEVSGTKFLYEKERKLAVDTGGNYYFSVYEHPETKERKFDVVSFFDAVQLKVNEENPFKTEVGYKYELEGYKLIFSITHNDLVYVPEQGEVIESIDWADKKSLFAMVYRVQKFDQNKTIYFQPHNYAQEITIHEGKASSAKEYKGEFNKGTNGTEKIPGTDISIKNVCIKLQVDRLGNIKPQFS

SEQ ID NO: 9047 - protein, 1012 aa, unidentified
  REGION 1..1012: note = Description of Unknown: Cas Enzyme sequence
MAYVLGLDIGSNSIGWAIIDKQKRQLVDIGVRVFPEGVDRNTKGLEKSKNATRREARGARRTHQRQNQRKQQLLKVLQSTELLPQSESELMSLFQKKESNPYQLRKKGLDEKLEPYKFGRMLYHLSQRRGFKSNRKSGESKDDGKVKKEAGELQEKIDAANCRTIGEYFAGLNPDEQRIRSRYTFRSMYETEFDLLWTKQSEYYPKILTEELKNKIRDEIIFFQRPLKPTDELIGDCELEPDEKRCPRGDWYARKFRVLQDVNNLKIRNPDGLEDKLTIEQRNSVLDELSKKKEFKFDNIRKRLNLMETQLFNLEQEGKVKSLKGDTFAAAMRSKNVFGSKVWDAMAEQEKIKLNEAFVELEDDELIKILGAEYKLNPAQIETAMKAPLPQKYMSFSRKAILKLLPFMEQGCLTSEAKTKAGYSINNDINREAVNKLPLPPDLRNPIVQKGLFEVRKLVNAIVREYGKPKNIAIEMARDVQGSSRQREELYWKMRENEKRNKEVGEKLINDMGIRRPSRDDKIKYKLWEECGRRCPYTGKSISQAALFGEHPEFQIEHILPYDRSLDDSYMNKTLCEVNENIHIKKGQTPYEAYSHNPEKYEQIKQNIRPLPWPKRQKFLQKEINLDEHIKRELNDTRYICRETIKYLKQLGVTVRGTRGKTTAELRHQWGLDGIFDELGTRRDDDHRRHSVDAAIVAVTENEHLRRLAKSKYAVSGVAFEPPWSNFREEIRENIKQINVSHRVQRKVSGKLHEETAYGPTGRKDKKGQGVFVYRKKLEELTLPMVEKIIDPEVWAVVRIRLLEKNINPDGWDRKISRKAWIKKIGRQKRSASKQNTIPKEVWKEPLYMKTTKSSKKVLIKKVRIEDVYNNLIPIKDKKTGKPYCAVKPGDNHHVEIYEYKDTKGKIKKDGEVVSIFEAVRRSTQKEPVIKKDFGNGKKFLYSLSKGEMFMLETGNNGNLLCRVQEIWNSKNIVFRSHINGKDLEDINKTVSKLKGHKVTIDLLGRVYPAND

SEQ ID NO: 9048 - protein, 936 aa, unidentified
  REGION 1..936: note = Description of Unknown: Cas Enzyme sequence
MRWRLGADLGTNSLGWAAVELDKDNVPFRVIAAGSRIFTDGRDPKSGASLAVDRRAARAMRRRRDRFKRRQAALLKHLTLAGLFPADNAEREALSQLDPFALRARALHEALPLHHTGRAFFHLNQRRGFKSNRKADRGKNQEDGKVRQGVARLHEAMRDAGAETLGEYLHGRRAAATDPNAIPSVRTRLRPESGEDAKGDGYDFYPDRQMLEEEFDAIWEAQAPHHSDALTAMIKERLFEVIFHQRPLKQPNIGTCTLMPGEDRLPKAHPLFQHRRLLEELNALKIVRAGQTTEPLMLEQRDLLYLKLKDRRTATFESLRKTLKLAPDTHFNKESENRKDLKGDEVAAELGAKSRFGKRWQSLDIDTQWDIVSRIRDQESDEDEQALRDWLQDTHGLTPEQASAAAGARLPEGYGRFGSSATARLIEALRAEVIVYSEAVTKAGLGHHSDFRSGEVLDKLPYYGTVLERHIMPGTGEPTDPDELRIGRLTNPTVHIGLNQLRRIVNRLIKRYGRPEQIAIELARDLKLNDERKREINIRNRKNRDAAEERSKKLVELGMADKGGNRALLKLWEELNQDNVLDRRCIYTGKQISIEMLFSDAVEVDHILPFSATLDDSSDNRLLCMREANRDKRKRSPYDAFGHRSDWDDIAARAARLPRGKRWRFEPDAMSRFDTEKKFLDRQLVDTQYLSRLAHQYLGALYQDRGEGSSHVWVSPGRLTEMLRRSWGLNSLLPDHNFGGGADQPKNRRDHRHHAIDAAVIAVTDRHLLQRIAREAGQRGHEAANRMTADLPEPWDGFHDQLREIVSRIVVSHRADHGTVGKTTLPKGRDATAGRLHNDTAYGLTGEKDVKGNDLVVHRVPLTALKKAADIEGVRDPGLRAALLAWTSGLEGKAFEAKLLKFPELGPLYPPIACHRAAVGHRHSGQEWPRLQGLQR

SEQ ID NO: 9049 - protein, 1094 aa, unidentified
  REGION 1..1094: note = Description of Unknown: Cas Enzyme sequence
MKSSKSRIGLDVGSNSAGWAAIKLDDGGKPCGLIGLGVRIYTDGRNPKDGSSLAVQRRVPRGMRRRRDRYLERRSDLMNALIALGLMPADEAERKALEALDPYALRAKALDKPLTPHELGRALFHLNQRRGFKSNRKAGGKEKEDGVISDGIKKLNVLMEDAGARTLGEFLNMRNRNGDMVRARPEAGFYPARLHYEKEFSAIRGAQEKHHTLRADQWDTLADIIFHQRPLKPVDPGWCLLEDGERRAHRALPCAQEFRILQEIANLRVAPRGEAAVPLSKEQREKVLHELRTRKELKLDSLLKLLKLPSDTHVNLLGEDRKTLKGDETAARLSAKALFGKSWHGLSFERRTQIIRMLLDTEKPEDIERVARADWDLDQDAAEKLSTVSLPEGYARLSEKAIGKLLPIMEFQGLNYSEAVAEVPEYGHHSDFRPDEAHDRLPYYGAVLTRQVVGGDVTKPKTDEVGHYGRIANPTVHIGLGQMRRVMNRLIEAYGKPEEIVVELARDLKMNAEEKAAERKKNRDNEEANRRREEQIRSAGFAPTPHTIRKLRLWDEQTYGMNKVCPFTGEPISFAMAIGDATEIEHILPFSKTLDDSMANKVLALREANRAKRDLSPYDAFHTDPKIGKHQYVYADILLRADSLPKNKRWRFHPDAMERFKDEEKFLDRQLNETKYLSRIARQYLAHLYNEKAEGRLRVRAIPGKLTAMLRAKWGLNALLRGHNVGGEEADDGPARKNRDNHLHHAIDAFVIALTDQRLLQKISELNSDADRKRLIEGIPLPWEGFTPDELRPHLEKLVVSHKPDHGTFPWMAKGNGKSRKGMGRAQTSGALHNDTAYGLVAPGKNGNWKVVSRAPLSAFNTPEAMDKALPDIRDRALREALAEEWARFQKSYKPDTDGDDDKRKKQNPAQAFAKHVETKGIKLNSHIVKVRRVRMTEELDVVVIKDRKTGKPYKAYKPDGNAFADLYELPDGKWKAVVIRRFDANQSDFDPVKYRPHPAAKKISRLHIDDMVAVGEGETRRILRIVKMSGQIITMAEHFEGGALKARDSDKSDIFKYFAPSASRLKELGFRKVGVDEIGRLTDPGPRKPRPTA

SEQ ID NO: 9050 - protein, 1018 aa, unidentified
  REGION 1..1018: note = Description of Unknown: Cas Enzyme sequence
MPFRYRLALDLGPTSLGWAVFRINAEDRPTALVLSGVRIFSDGRSPKDGTSLAVTRRLARSMRRRRDRLLKRKNKLIAALIRYGFFPEDVKERKGLEALDPYRLRAEGLDRALTPQEFGRALFHLNQRRGFKSNRKTDKREADSSVMKNAISSVRSALEEGNFRTVGEWLYHRKRQGQKLRARFNARRTATDAGKSKIEKSYDLYIDRAMVEREFDALWNRQAGLNPALFHERARIDLRDILLFQRRLRPVDPGRCTFYTEEARAPLALPSVQRFRFYQELNNLRWLDGSLEEKRLTLAQRDAMAQALETSTKKTFQQLRSIAGLNSSATFSIEDLKRQEFKGNTTSCILSKKQHFGSRWERFDETLQDEIVMRLLTEENESALIAWLRDHTGVDEAHAEAIANVALPEGYGRLSLKAVRQILAAMREEVRTYDKAVVAAGIGHHSYLGARATGEVLPELPYYGKALERHVAFGTGNPEDPEERCFGRVSNPTVHVGLNQVRVVVNELIRRYAHPAQVVIELARDLKQSWEQKRETEREQAANQQRNARYRQEIAAVLGIGEERVKRDLIEKRILWEELSFDPMKRCCPYSGVPIGLNMLLSDEVEIEHILPFSKTLDDSLNNKTVALRQANRRKGNQTPWDAFGRQVVDGFNYDDILLRAQAMPRRKRYRFAQNGMEQWLKNDKSFLDRALNDTRYLSRLTREYLEWICPQETWVVPGQLTSILRRVYGLNNPDILGWQGQKNREDHRHHAIDACVIGVTDRRTLQMMSDTSARARDQMYGRLLKDLPMPWPTYRDHVKRAVNRIWVSHKPDHSYEKAMHNDTAYGLLPGGYVRVRKDVDGVRARTTEKLAVIPISSAKAGARHGYLPDGSPKPYKGYKGDSNYCIEIVRDDASGKWQGEVISTYQAYQVIRQHGRVAGWSRLRHPGCGLSGRSLVMRLMINDIVRLEDDGKLKTWRVAKISGNGQIYFADVHEANVDARNRDKNDSFSYVSKTAGSLNKAKARRVTISPAGRLSDP

SEQ ID NO: 9051 - protein, 1071 aa, unidentified
  REGION 1..1071: note = Description of Unknown: Cas Enzyme sequence
MKRIYGFDIGTTSIGWAVIEYDVIQCLGRILAMGARIFPEARDPKGTPLNQNRRQKRLVRRQIRRRKQRRRALNELLTQNSLLPPFSKDKNSAWAKVMALSPLPLRNKGLTEQLAPHELGRALYHLARLRHFKGRDIEESDKPDEEESAEEKEAKSARDITIKELKASGQTLGQMLAERVPAEGEVPKQQTRRIHALRSHVEDEFRRLVKVQESYHPALRDPAFAESLHETIFAQRPVFWRKNTLGQCRFIPGAPLCPKGSWLSQQRRMLEKLNNLAIVGGNMRPLDPEERAAILDKLQTQASMTWAGVRTALKPLYKKRNEQGEEKALRFNLELGGESKLIGNALEAKLADIFRDSWVNHPHKQAIREAIQERLWKADYGEIGEQRVVILSATERPKRRAEATESFVRDFGISGQEAKALGELKLPAGWEPYSIDTLNLFLPKLEEGIRFGALTAGPEWAEWRDINFPNREQPTGEILDRLPSPADREEQKRQTAIRNPTVVRTQNELRKVVNNLIEAYGKPDLIRVELAREVGLSKREREEMQSRLGKQEKRRRDAEADLKSKGIPLPSRADIEKWLLWKEGQERCPYTGDQISFDALFRNGQYDVEHVWPRSRSLDDSFRNKTLCRRDVNIAKGNRTPFEFYKARPDEWSAVAKRLQGMVAGKGTPGMPFGKIKRFLAESMPDDFANRQLTDTGYAARQAIAFLKRLWPDMGPEAPVTVQAVTGRVTAQLRRLWELNNILSSDGEKTRADHRHHAIDALVVACTDPGVTNRLSRYWQQRDDPRVQSPKLDKPWANIRIDAQRMKEEGKIKISHRVRKKISGPLHGEMPFGDTSDEEVKNGTMFGVYVKKMPIERLSLATLRIGHVSQITRTAPFVVRDPAIRQRLAQHLEQMGGDPKKAYPPYPRLTPEGPEIRKVRVLSLQQKSLMAPVAMKNNDRDKREPTGFADLANNHHISVYRRNDGVADFEIVSLYEASHRLTKGEPVVRRKRESAEFIMSLSPGDAIEFPNGDHRGIRIVQGVWASGVIVTLDGFDAVGDSVWRPSPSTILASGARKVSIDPIGRIRSAND

SEQ ID NO: 9052 - protein, 1061 aa, unidentified
  REGION 1..1061: note = Description of Unknown: Cas Enzyme sequence
MTTRLGLDIGTNSIGWCLYDGDSIRDIGVRIFSDGRDPKSGASLAVDRRNARAMRRRRDRYLRRRSALLQALVETGLMPADAKDARALAGCDPYDLRKRGLDERLEPHEVGRALFHLNQRRGFKSNRKAERKSGDDKESGKIATGAKALDIAMEEEGARTYGEFLAGRDTKRVRMPLGGEGYDFYPERRHLEHEFDCFWAAQAPHHPALMTDAARDRLRRIIFFQRPLKAPKVGGCTFFNEEPRLPKAHPLFQERRLYEEVNQLEITRAGAASRKLTFDQRDAIILKLKSAKTASFHPTLARLLKLADGESFNKASDNRTGLTGDEIFFAFSHKNCFGPRWAHFDAGVQWSIIEAVAEEEDPVRLHEWLMTTHGVTAEQADAIGRIRLPEGHGRLGETATRLIVEQLKTGHIDGRPLTYNEAVEAALGKSHSDFRTGEVLDFLPYYGEILSREIPPGTLDPNDDDETRWGKITNPTVHIGLNQLRRLLNAIIRVHGRPDEIVVELARELKLNEKDKAKYNKELGENTRKAQARSGKLAELGQTDHGGNRMLLRLWEELSPNSALNHFCPFCAKPLPIHMLFDGQAEVEHILPYSRTFDDSAANKVIAHRSCNREKGNQTPWEKWGGTPRWDAIAEQVAHLDKRKQWRFAPDAMERFEKDGGFIARQLTDTQYLARMARTYLSGLYPERPSDRLPGDGVRGVYVVPGRMTAMLRRLWGLNELLPDHNYVENPHSGAPKNRLDHRHHAIDAAVVGATTRGLLNKISKAASRAEEQNLDKLFDGLPTPWDGFREDLRESLARVVVSHKADHGRRRKPAKDRDATAARLHNDTAYGLTSLTSDSGLPIVVHRVPLTSLKPADLTDPDRIPDATLRDALWRATRDLSGKEFEKALLDFSRKDPVFKGIRRVRVREGLKVIPVRDKSGVAYKGYKGDANARFDVWQLPDGKWTAAVVSMFDAHRHDFVPERPHPAAKKIMSLRQNDLIAIEKDGAFREIARVVKFGANGQITIAAHQEAGPLKERDAKPNDLDPFKYSSPTAGGLKKMRARQVRIDELGRIFDPGPR

SEQ ID NO: 9053 - protein, 1123 aa, unidentified
  REGION 1..1123: note = Description of Unknown: Cas Enzyme sequence
MPRYGERKYRVGIDVGDRSVGLAFIEFDEQDMPSELLRMFTVRHDGGIDPTTNKTPKSRKETAGVARRVRKMRKRRTRRLQELDALLMASSFPIVDVSVGETYECWQARAAAVEGFIADEQTRLETVSRAIRHMARHRGWRNPWLTWQGFKELEVPTANHQKNIESANSKLHLDLEDTATLGQIAASASASNWMLRPRNGQKRKAASDPVLVAQVQQADQLAELYKILEVQRIDSTITEKIARAVFDQVRPYVPKGNIGLDELPGMGNHYRASKASLAFQEFRVRAAVANLRIKNTARGQERFRLDPQDAQAVAEYLLTWREDQPPQWGDVANALNIDENLLVIPVFEDAFLKLAPYDRTSSDLEQRLSSSANKKKVAGVREWWDSADTQMRELFIEFITSPNESVYEEADESGFSDVFNGWSDEAKEVLLGMQFESGRSAYSVESLRRLNLRLRTGEVDLHEARRLEFGVDDTWRPSLPSIDERTGQPAVDRVLTIVRRAIMGAVDKWGVPEAVVVEHARSGFMGASARNDYLNEVSRRTATRAKLREIVKQQGVERPSDGDIHKWECINRQRCTCAYCGNEITFTTAEMDHIVPRAGGGSNVRENLVAVCRRCNSEKRNIPFAIFADSDAHPYTSLNETLTRVRNWDWSRDRSEQRLKNRMLQRLKRRESDPEIDERSLASTAYAAVEVRQRIAEYLGRVTGKDELNRVQVYTGGATREARRAGKIDARIRIRGKDEKDRFDVRHHAIDAAVMATLNHSVAFTLRERAEMKRSATMNRYLDPNEEWKDYSGRTPSAQERFTVWRQQAHRLADLIVDAIEADSIPVAQQLRLSASRGSVHKDTVSALVRKQLGDPWTAQEILQIVDPDIYALLRDFATPNRGVLELDPSRRVQLPSGVWIEGSDLVEVFPKAAASMKISSGSVEIGEQIHHARVYAWRGTKGEFQYGILRVFTAELPWLQRQAKSKDLFTMNIDDRSMSYRDLQPTVRKKIESSESQCIGWLTQNDELVLDVEVLQQGSDKLAHFLKTYPESRWKLDGFPMSRQFRIRPLYLSREGSDHLDPICAEILEKGAIVSASGVLNNTHQVLRRDSLSYVRWRSQGGLPVSWSISVAATNTLGADVK

SEQ ID NO: 9054 - protein, 1022 aa, unidentified
  REGION 1..1022: note = Description of Unknown: Cas Enzyme sequence
MVISFGLAMRESLTLGIDLGIGSCGWALIENADSTNGRIVAMGVRCFDVPETAKERTPTNQVRRRNRLLRRVIKRRRQRMNEVRTLFRVHGLLSNDGKRALAVGLNPWLLRAEALSRPLNGQELAVALGHIAKHRGFKSNSKRDQGKNASDESSKMLGAIEKTREHLRDWRTVGEMFAKDEAYAARKRNRDGNFDRSVLRDDLEREVRLIFDRQRNMGNAIANADLECKIIFKAFYQRPLQDSDDQVGFCPFEPDERRAAKHSAAFELFRLASRLCALRVRSLGGERALTAEEIVQAMADFGAPGVKLTYRRLRKLLDLEDGTHFDVPQEDEGKRELASRSGDQAAGTKAFRNVLGAAWKTLAGHPEKIDRAAAIITFRESLDSIRAGLEEIGLEPLILEALMKGVKEGEFAHFKGAGHISAKAARKLLPHLMQGLVYSDACKAAGYDHARRPETDLSSIKNPIARKALGEALKQVRAIAREYGMPGAIHVELARDVGKSKEERDEIRDGIEKRNKAKDRLRAEFAAATGRLKATAEDLLRYELWKEQNSKCIYTGDHIPIDWIAGDQNLAEVDHILPWSRSGDDGFINKTLCTAKANREKKGRTPFEWFKREKTEKEWEELVARVEGSKTFKGRKKRNYLLRDARVLEEKFRPRNLTDTQYATRVLAETLKAMYPQDGSRRVFTRPGALTDRLRRAWGIQGLKKDKDGKRIPDDRHHALDALIVAATTEGALNRLTRAAQIEEERGTSRFIANFAMPWPTFKQDVDAIFPTIFVSRAERGRVRGEAHGATLRSIGNDGSVVYERKAVDALGEKDLDRIKDADRNHRVVNTLRAWIAAGKPKDKPPLSPKGDPIRKVSLSTNKKVDVLIRDGAADRGEMVRVDVFRKKNRKAVYEYFLVPVYPHQIADKEGWPTPPRLAVRSGAPESEWYAVDNSFEFLFGLNQLSFIEIEKADGTSMDGYFRGMDREGGKIAISPHLSLQELIRSIGARTLKAFRKFHVDRLGRRYEIDHEVRTWRGVACT

SEQ ID NO: 9055 - protein, 1157 aa, unidentified
  REGION 1..1157: note = Description of Unknown: Cas Enzyme sequence
MITLGIDVGTNSVGSAWIDTEKKLIDVAVSVFPAGVEESETKRGAPSGQARRDLRSQRRSIARRARRKLRLRKLLTEAKLLPCKTGEWDALVRQIEQDPRKPTPWHLRRLGLTEPLAPYEFGRVLLHLAQRRGARGVDWGDEEDQEAGRVKQAISETHQEMVRRNANTFGELMAAVYDQRRQAVPGKSEKYFHGVIRNREGQFEFHADRELIRQEFHQLWKVQRGFKSELSKILTDDLLRKLDDPTPDRIWSVRGALFGQRRIYWDAGTLGRCSLEPTDRLCPQCDMYASEFRVLQTVNSIKIEEKGQEPRTLDDGERAAVIQALTVTKTATTATLRKALKIHTPAKKKLFDLNLERMKQPEINTDWFGREIIEGVFGRENWKTLTDRQQASVNQALQKIDDQERLRQGAATWWNLELEQIDRLVDAWKKRPPLEKRVNLSRRAIQKLLPHLRDGQDVTTAKQNCGYSVKTSSLTKSQQHYLQKHTNSLPPAPYILNPVVRKCVHEVRRHVNAWLRKYPGTKPDRIIVEFARGMTLSSRDRNDQLSANRAREFERRKIEEDFAEYIRPGNPAHKVVLRVRLWTEQKWKCAYSNDPERVISRDQVGSGEGLEIDHIIPDSRGGGNSFHNKVLCFRESNRNKGNRTPREWMSREEFAAFERRFAYLNGRTRGKQGEYDLVPNPRKYQLMCSSGRSEEEWRESQLTDTSYAAKAVTAYLQDALYRNDVPDSDGKMKRRLFATKGQYTGMLRHDWGLLEDLMPQIDVTGTLSATDPRARREKKDRADHRHHAIDAVVIAFCGPELLTELGAKAQYAADYKSRTGYYPPRQPIDPHPDWGTKEEFRQRILNAVRNAVVAHRPVKRRLIGALHEATCYGVVDIDQRRFTTRIPLAKLTPKMLRLPVSVSSPDGRTVLQDPPLEKSGLVRDQELRRILRTQLTRLGVNPETFSKKQIEEVAKNHLVRMPSGVPIRRVTLLRTITEPVIIQNSAKPTRVYQGGNNHHFEILRDENSGKWVGRCWDMFTVAQRVRPPRGLPKLPMVIGRDLHRVLAASLLDEQTATFYRGRTFIMSLSQGETLYCRHKDRQYDHPDAVGYYVVVKLDKDRITLAPHWDAKREHTWPITPEGLRGLGPTPGTFPHKVRLEPWASTQEEFTGIIRLHD

SEQ ID NO: 9056 - protein, 1090 aa, unidentified
  REGION 1..1090: note = Description of Unknown: Cas Enzyme sequence
MKARNLVAYRLGLDLGSNSLGWFIVWLKWNGSLKRWEPLGLGPGGVRIFPDGRDPQSGTSNAVDRRMARSARKRRDRFVDRREQLMQALVRHGLMPAEETARKALEGLDPYELRAKALGGALPVHHVGRAFFHLNQRRGFLSNRKAERKKDDDKGAIKQGEARLKEAMAAENAPTLGAFLWTRQQKREGVRARAIINGTKASYDFYPTRGMFLDEFNVIWDRQSPHHATMTAEARKEIEHIIFYQRPLKDPVVGKCTLSPATTSFAEDPEGYRCPWAHPLAQRFRIYQEARNLEIRETGKGSRKLTKEQSDAVARALLGNGTVKFDKLRTLLKLPSEAKFNLESERRKELDGDETAARLASKPAFGKAWYGLGLERQCAIVETLREAEDEDGLIAWLETECGLSPEAAARAANTALPEGHARVGLRAIGKMLPFLQDGLAEDGVSGVNYHEAATRADYNPAKQPDGVLSLNGYLPYYGEWLPDAVVGTGDERDTSERRHGYFPNPTVHIGLGQLRRIVNELIRQYGPPTEISIEFTRALKLSPKEKVEKQREQRINQDKNEQRRTRIREDLGNAHYDPTPRDLLKVRLWEELGGRDGLDRKCPYSGETISLRRLMSEEVDIDHILPFAMTLDDSAANKTICMREANRFKRKQTPFEAFGTSPGTYRWDEIVVRAASLPKNKRWRFDANAREEFEKRGGFIARQLNEAGWLARLAKQYLGAVTNPYDIWVVPGRLTAMIRGKWGLNSLLPDHNYGGVKERAEEFMSATDDMEFSGVKNRADHRHHAIDALVVALTDRSLLWKMANAYDEDRARIEIPTPWEKDKLRDDLKAALDRMTVSHKPDHGVQGKLHEDTAYGFVKEPEKEGGNLVYRKPIESLNENEIARIRDARLRDLVRAHVDAEKAKGAALRDALHKLREPSGDAHIKNGLRHVRLLKPEKAEYLVPIASRGTGEPYKAYSAGENFCIEIYETPVGRWEGETVRRFDANKPAHDLRWRTDVPDAKFVMRVHKGDLLRLDHDGRSQVMVVHRLDAAAGRFKLAAHNETGNLDRRHATDNEIDPFRWLMASYNTLKRANAERVRVDELGRLWRIG

SEQ ID NO: 9057 - protein, 1029 aa, unidentified
  REGION 1..1029: note = Description of Unknown: Cas Enzyme sequence
MSNVTNGTVSGGLVLGIDLGANSLGVALIDVENQKIVHTGVRIFEAGVNSLDTAKEQTKNVERREARQVRKQTDRRKRRYAKLFLLLQQNGLLPDGKRQEALEALDRELSKKFNEHATLPYFLRARALDEVLEPFELGRALYHLGQRRGFLSNRKFSAKAADQDEKGKVKEGIQGLREQIASSGCRTLGEYFYRAVDPHQERIRKRYTHRDMYSEEFALIWKKQSEERLELLTEGLREQIYGAIFDQRPLKDQSDLIGLCALEPHERRAPMASLEVQRLRVLLAVNNLRVFFEEGNSRTLSAAERASILPLTETKDKLTLAAVKTHLKLPRTTKFSIEAGGEKNLPVNATATRLRKILGSQWDQLPEDERVRLVEILMLAKGTEEALAEDLVERFGLDAATAQKVAEEGLPEGYYSISLKAIRKILPHAEEGLDHTSAVMAIEDYRLASRSEPLSLLPGVVDSLPEVRNPIVMRSLTELRKTVNGLIREYGPIDTVRIELARDIRRGHEERMRMQKNNRDREGVRDRAKAELARYLNCKPDDVKQRDVEKYLLWEECRHQCPYTGRQIGMDALFGPHPLFQVEHIVPLSRSLDNSFNNKTLCATDQNALKRNRTPWEAFGHDGSEWERMVAAVKSFNNSAKLSRFILTEADQEAMLAEFTTRQLNDTRYASKLAARYLGLLFGGTSDDTGRQRVFTCAGQVTALLRREWKLNGILNPEDHTKTREDHRHHAVDAVTVAMSSPAIIKQLSDAAQRAGTDRRFQFGGYFLPPWEGFKEAVAESIQRVNVSLRPEYKLRAAMHDQTLYSRAWIDRDDKRKYVSVRKPVEGAKVEDIIDIATRRIVAAKIAQLGTQKALATNPPLDAAGRAIRKVRVKVRTETDLPTVGIGPRARNVMPNSIHHTEILLDETVPGKSKYRHVTVNTIEAMQRQKYGVPVIQKDHGERVSFICSLRPGDVIEADKGDGNGRQLWRVRTVTSLGRFAVHLLNDARMKGDIKQAGALWQPTINAVYEPGAQKISVNHLGKVIIGND

SEQ ID NO: 9058 - protein, 1101 aa, unidentified
  REGION 1..1101: note = Description of Unknown: Cas Enzyme sequence
MKTLGLDLGTNSLGWAIIETRGEPGENDEGRVVASGVRIFSQSEMAGRDPQSKASLAVARRQARGARRRRDRYLKRRQRLIDLLVDLGLMPADEAARAELVRNHGDGKTGDLSSSVYALRARALDEALSPYEIGRAIFHLNQRRGFKSNRKADSNDPEQGVISEGMRALDEKMAEAGARTIGEWLHMRRLQGLPVRARIAPDGEGYAFYPSRGALEREFDRIMARQTLFHPDLLTDASIRELRAVVFHQRPLRPVKPAKCSYNPPEERLPKAHPLFQKFRLLKELNELEIVGEDQKHIKLTPEQRNALALQLRTNLNKQGKIPFSKLRNTLKLGREVRFNKETDNRSDLEGDVIYFRMSRPECFGNRWASMSVEMQAAITERLRTEPDYNMLMNWLRTEAGLDEAGARAVADTPVPDGFGRLGRSALTTLIDALENDVGEGGFVITEAEAAKRVRGRTNSEADPDRKGMNQLPKYQEVLARHIPPGTGEPDDPYDDFMGRITNPTVHIALNQLRRVVNALIRTYGKPDRIAIEVGRELKMNDRERDEVNRRIGRNTKAAIERGMKLTEIFRQLDTGYNRLRLELWEDLNQKPENRVCVYCGKAIAGHMLFNGETDIDHILPYSKTLDDSKANRILCCTACNREKKNRAPADVPQWRGRYGEILARATTLPKNKQWRFGEDAMTRFGEEEGFLARQLTDMQYISRLALTYLAHLYDYEEADLDGIYKRHARVRALPGRMTEMLRRQWGLNELLHDHNLIGGDVAKPKNRLDHRHHAIDAIVIACTSRSLIQRLATASAAAEERGAERVVERIDPPWPGFREDVRAAVNAIVVSHKPDHGTMSREDYAKGRGQTAGKLHNDTAYGHTGEKDASGNDIVVRRIAITDIRGPADIMKIRTNAHGHSELRDRLYEATRGLEGKAFEQAVLDFVKGDAKFRGIRHVRITEVANPVWITHGGGRHKKGYLPGGNDRFDVWELPDGKWDAEVVTTFDAHRPGFVPRMRLENHNARKIMSLKKGDMVAYDDPDNGKRIIAIVRKFDQRNKQLYLDPHNEAGNLDRREKEKTYKPLRPMPNPLKKYRPRQVRIDEIGQVFDPGPWWEKQGG

SEQ ID NO: 9059 - protein, 971 aa, unidentified
  REGION 1..971: note = Description of Unknown: Cas Enzyme sequence
MAKEHVPADDGVHRREWILGLDIGSRSIGWAALAAGEDLKPTGELLDAGVYIHDGGILDDSKGITRHQKRGEVVRSRRRLRRRRSRRRSLAEVLRSNGIVRQSGWRERNPWWSRSLLAVEPVADPARVRHLAAIAIEHIARHRGWRNPWLPAPEPVAEPVPEDLRKAFDEMSEWAGEQGLDAPPAPVLGVMSWTVLGWGGSVRHSSKEKDRDDNRPGIEKWLPKVLQEHIAAEIATIWKVQSRAHPDLFTDELLKDLTGVVLHQEKPGVPLENVGPCELQPHLYRAPKASPLFQRYRLLSTIANLRIRTPDGELTLDDSQRETVFDLLDGPERLDWAVVADAIDVDPADLRTADAKGTAGKAPNNQIVEKLEGLEAKGPDWRRFREWWKEASDDKRELVVGMAIGDRVIEDEHPEELKELADEIDELGWFELVEKFGRALPPGRARFSRLVLSDLNRQMDAGADLHLATEETYGSGAVGAHVTWETEVPNAGVELSMKRVRQIVDELAGRYGDPSAIGVEIVRDAAMSHQERQDRQNRIKREREARDKVREILKADYGMESPSDADIAKREHLTAQQGICLYCGKVLARLPDVELDHIVPRSTGGSTIWTNLAAVCRPCNERKGNRPFGAWASDGGAPRSLEDVLADVDKMRSDRWREVPKKPYINPDNGRWVISDGEKARREIKSRLRKTEREREFDGADLQHTAFIARAVRERLESRFGGDVKVRVHRGATTAALRRETGLSKILGGGTVKDRGDRRHHAVDAIAMALLVDDKWAWRVRVRDEAYSNHRYELIPWSWVESTRERADISELQVEVDRLVDEGAAVMDQVIPVIQRRLVASGRVHEDTISEWGRRRVGDAWGRNEIVQVRDDAIRTALWQATGRGGKLPADPDRVLVVEGATGISELGPNDEIEVAGERVWIPVRNGWAKSAGLHHARIVKVDYARNGRRESAIELVSVPVVDVYRRENAL

SEQ ID NO: 9060 - protein, 1161 aa, unidentified
  REGION 1..1161: note = Description of Unknown: Cas Enzyme sequence
GISWRSVRSSRSRRSGGRAYSENVRGGPQATPFGAFQLVNGRPSITRPLSPGKLPNDFQAQPYDAILIKARQDAQRALRERNKMHGGVPRAYRLGLDLGSNSIGWFMVMLDTTESRRKPVSLGPGGVRVFPDRRDRHSGSSNAVDRRAARGMRRRRDRLLARQKALIAALTEHGLMPTEENQRKALEALDPYELRSAALNEPLPLHHLGRAIFHLAQRRGFLSNRKAERKDDEKGAIKEAAAKLRKEMEKVSARTLGEYLWARHRQRKSVRARNIATGSKADYEFYPTRALIEAEFNAIWEAQAAHHPMNREARDAIHRTIFFQRPLKQPPVGKCSLDPATQPFELDPEGYRVSWAHPLAQRFRILQEVRNLDVGETGGPRRRLTKEEGDTIALALLQNDKVSFDKMRALLKLPAEARFNLESERRTELKGDETAERLAHRSRFSKAWRSFSLDRQCTIVERLLAEADEEALVDWLQTECKIERAVAEEITDAPLPESHCRLGLRAIRKLLPHMDAGLNYPDAAKAAGFDHSKQPTGEMLGRLPYYGRWLPDAVLGSGDPRDLKEAQFGRFPNPTVHIGLGQLRRIVNDLIDDWGEPTEIVIEFTRSLKLSPDEKKDLLREQRQNQAKNAERIAKLRETVGQAEFDPSPRDLLKVRLWEELNPRDPLDRKCPFTGETIGLKRLMSHEVEIEHLIPYQLGLDDSPANKTVCLAEANRAKGRLTPFQAFSSSPTIAGIHYDWEAIIQRATALPRNKRWRFDPDAHEKYKEMGGFLGRQLNETGWLARVAKQYLSAVCDPNAIWVVPGRLTATLRRQWGLNSLLPDHNYGGVQERDETFRAATDELEFSGVKNRTDHRHHSIDALVVAMTDRSLLQRMASSYDDRRDKIDVQEPWQGFRDQVKSRLNQMTVSYKPDHGRQGKLHEDTAYGLVKEPEKEGANLVRRKDLVALTENEIDMIRDRRLRDMVRGHVTKAREAGVDLASALRSFRDNVRDPHIANGLRRVRLLKVEDSEYLVPIANRSDGTVYKTYSAGENFCVEMYETPDGRWRGEAIRRFDANQSSYQPRWRKLHPDASFVMRVHKGDLLSLDHDGKRQVMVVHRLDAAAGRFKLAAHNETGKLDRRHAAANDIDPFRWLMASYGTLKKAGAERVRVDPLGRIWRVR

SEQ ID NO: 9061 - protein, 1050 aa, unidentified
  REGION 1..1050: note = Description of Unknown: Cas Enzyme sequence
MKRLGLDIGTNSIGWCIVEYDTDHEGRPVDRSIIDIGVRIFSDGRDPKSGTSLAVDRRQARAMRRRRDRYLGRRSAFLNALIEHGLMPANADEAKLIAQRDPYDLRKRALDERLEPHEIGRALFHLNQRRGFKSNRKAERKTKPGEEGKIASGARALEKAMAEAGARTLGEFLSDRLRNGKHARVRLGGENQEYDFYPQRHHVLEEFKAIWNAQKEHHPNLMTEEAFAALWRVIEFQRPLKDQEVGYCTFAGMAGVPEDERRLPKAHPLFQQRRLYEEVNQLRIVSAGAAERPLTRDERDALILKLQDKKKVSFQSLAKVIKLREGERFNKESENRKELIGDEIRAELGDKKRFGARWLHFGPDEQLRIIDRLQNEEDPDALHAWLKGEYGLDDAAAEAVARAHLPEGYGRFGLTATERLLDALRADVVTYDQAATAAGFHHSDHRTGEVLDRLPYYGKILAREIAPGKAEYGDELERRYGKITNPTVHIGLRQLEKLVNAVIAIYGRPDQIVVELARELKLNEEQKDEHKRRIKRDTDAAIARGKKLSSADIPDTGANRMLLRLWEELNPGNPLDRRCPYCAEPVGMHQLFSGEADVDHIIPYSRSLDDSAANKVVAHRHCNRMKGNNTPWERWGHDEERWDIISAQVARLHKSKQWRFGPDAIERLEKDGGFLARQLTDTQYLSRIAGKYLRSLYPTAETGRVDVIPGRMTAMLRRLWGLNSLLPDHNFVENEHSNAPKNRLDHRHHAIDAAVAAVTTLALMQEIARAAGRAEEKNLDRLFEGLPQPWEGFREELGAKLARVTVSHKPDHGRRGRPSRHRDVTAGRLHDDTAYGLAGDVGADGKAPIVVKRIAFERLRPEDVNTPGRIRDSHLQQQLGKATAGQEGKAFEAALANFRKTHPHFRNIRHVRVLGERPGTPSLSVIPITDREGRPYKAYKGNANARFIVWRLPDGKWTHSTVTMFNAHKAGFEPTRPHPAAKKILDLRQNDLIAIEREPGAPEIMIVVKFSESGQVTLARHNEGGSEPPRDCRRPFGLSYAAMGLSSSMA

SEQ ID NO: 9062 - protein, 962 aa, unidentified
  REGION 1..962: note = Description of Unknown: Cas Enzyme sequence
NLNQRRGFKSNRKTDKRDNEQGKIEIGVNRLGDAMREAKAETFGEFLHGRRLEGKSVRTRLRPETAEDAKGDGYDFYPSRAALEREFDLVCEAQAAYHPDLLTDESVAHLRAIAFYQRPLKPTIPGRCSYNQSEDRLPKAHPLFQTFRLYKEVNELALVGEDQQARKLSIDQRDTLIRKLRSAKTTSFKALRSALKLGSEFRFNKESVTRDKLLGDEIYVSMIDPRCFGPRWATFGTDRQWQILSKLREEEDPVELHAWLVESCGLDDEQAKAVAKLHLPEGFGRLGPTALEALTDALKTETYDDGTVITEAEAARRCGYNHSDKSDPDFLGHDLLPNYQEVLERHIPPGTGNPDDVYDVFKGRITNPSVHIALNQLRRVVNELIKLHGRPDRIAIELGRDLKLSDKQKEEVDRTIRKNTRDAEERSKKLAELGQADTGYNRLRLKLWEELNKDQPLNRVCIYSGEPITASMVFTSEVDIDHILPYSKTLDDSEANKILCLTKANRQKRNRAPADVTEWASRYDDILARAGTLPKNKRWRFARDAMEKFADEEGFLARQLTDMQYGSRMALTYLASLYPTEEADAGGVLRKHSRVRALSGRMTEMLRRKWGLNELLPDHNIGGGDTVKEKNRKDHRHHAIDAFVIACTSRSLIQKIQTASRALEELGTEKVMGEVKEPWPGFRDELFERLKTTVVSHRPDHGTVSRAGYAAGKGQTAGKLHNDTAYGLTKDKEGNDCVVRRRSIDQFRSASDIEAIRDDQLRETLLSVTCGRTGKDFETAILSFSKQDMLNGKPNPFKNLRHIRVLEVQTMLVPLKDKAGKPFKAYLPGGNYRFDVWELPDGRWDADVISMFEAHQPGYISKIRTTHHNPKKVLSLMIGDMVAYDDPKTGERVIARVRKFDQRNKQLYLDAHNEAGKLDDRHKDAGDPFRNFSKTPNALKSINARQVRIDEIGRVFDPGPRG

SEQ ID NO: 9063 - protein, 1022 aa, unidentified
  REGION 1..1022: note = Description of Unknown: Cas Enzyme sequence
MAFPYRLALDLGPTSLGWAILRLNEQSKPIALVRSGVRIFSDGRNPKDGASLAVARRMARAMRRRRDRMLKRKSKLIAALIRHGFFPEDIDQRKSLEGLDPYRLRAEGLDRALAPHEFGRAMFHLNQRRGFKSNRKTDSRENDGSVMKSAIADVRSALEQGGFRTVGEWLHHRSRQGQKVRARFHAQRTITDEGKAKIEKSYDLYIDRAMVEGEFDALWSKQAELNPAAFHELARTELRDILLFQRRLRPVDPGRCTFYPDEKRAPLALPSVQRFRLYQELNHLRWLDDHLVERCLTLEQRDAMASALEKSLKKTFQQLRTVAALGSDATFSIEDLKRQDFKGNTTSAVLSKKQYFGAFWERFDEAQQDEIVTRLLTEEDESALTAWLSEHCDVDESRARSIANVSLPSGYGSLSLKAVGQILPELRKDVCTYDEAVVASGIEHHSLLGARATGEILPFLPYYGEVLQRHVGFGTGIPSDPVERRFGRITNPTVHIGLNQVRGVINDLIRHHGHPRQVVVELARDLKQTWEQKRDAVREQAVNQRRNERFREEIAAVLGMSEQRVKRELIEKRILWEELSFDSTDRRCPYSGVQISLEMLLSDQVEIEHILPFARTLDDSRNNKTVVLRQANRLKGNQTPWEAFGRQEVGGFIYEEILDRAQAMPMRKRYRFAPDAMERWLKNDKGFLDRALNDTRYLSRVAKEYLECICPQGTWVVPGQLTSMLRRLYGLNEPDILGWKGQKNRDDHRHHAIDACVIGVTDRGLLQSISRTSERARDEMRTRLLKDLPPPWPGYRDHVRRVVNRIWVSHKPDHSYQKAMHNDTAYGLLPDGYVRVRKDVEGVRRRTVEKLTVIPFVSAKAGSRHGFLPDGSPRPYKGYKGDSNYCIEIVRDDASGKWLGEVISTYQAYQVIREFGEVGGWHRLRSRKQGLSGRSLVMRLMINDVVRLEEKGSLKTWRVVTISGNGQIFFADVHEANVDARNRDKADPFSYISKMAGSLKKANARRVTISPSGKLSDPGFTP

SEQ ID NO: 9064 - protein, 1050 aa, unidentified
  REGION 1..1050: note = Description of Unknown: Cas Enzyme sequence
MGYVLGLDLGSNSIGWAAIDLDGGQFHGAGVRVFPEGVERDTTGTEKSKNLQRRTARGHRRQIARRARRKALLRNAIRECGWWEDDSQEQLVGVDPYSLRAKALDEQLTLPELARVFMHLNQRRGFLSNRKADRGRGKENSETLQAISQLQDDIVKSGARTLGEYLHNLRMQDPEQGRSLRVRGRHTHRLMFLEEFKQIWESQRRFHPDILTEELRFGRRGRQDYPKEPIPRKRSGGATFLQEFGFHGLLFFQRSLYWPKSVVGRCELEPREKRCERADRAAQKFRLLNEVNNLRVIPQSGEPRDLTPEEREKLIAYLSIRKEATFDQIRKELELLEGDGFNLEAGKRTKLDGMPIDTALSSKKLFDKKGWQKKSEMEKDEIVRSLIDDEEPEILRKATSEWGVSDEIAQELANIDLTAIVRGYASYSRAAMVKLLPSLQAGHKLNSSDGTPSALALAGYLNPHQRAETKGTAVPLPSEKIVNPLVKQALYEVRKVVHAVIKEWGMPKEIHIELAREVQGTATKRQEQIEKMRRQEARRREAADFCRERGVSPTRNAIERYLLWKEQGGDCAYSDPLRTISPNQLFSSEVDVDHILPYSRSLDDSLMNKVLVFRSENHDKANQTVWEWIGTSNPEKYDSILQRARNLPLDIRNRKRMKLQVKDVVLEQFLNRQLTDTAYITTQVVDLLKHLEGVDVVPVKGQCTAELRHMWGLNAILREDGLNLKKSRDDHRHHTVDAIVIALTSRSTLQNLARVRGTKEQLPPPWPHFRNDVETVIDGIKVSHKAVRDISGALHDETIYGSTSKPHRASDKQGERPHANGWIEEDGVFVFRKPIEALTLSMVNDIRDPQVKAVIIERLAEFGLDSSQKKPIPKEVWKAPLFLKRKSGRTSSNPSPIRRVRVIKRDLTIQTIRGGSACVKPGNTHHIAIFELPAKEGKKPKRELIAVTMLEATQRARKGEALVSRVHPTIPEAKFLFSLSWGEMISAEINGRDDLYVFRTAASTTGQMAFVSHTDARPSKDVTLFRPRANTLDAQKVIVDPLGRIRNAND

SEQ ID NO: 9065 - protein, 1022 aa, unidentified
  REGION 1..1022: note = Description of Unknown: Cas Enzyme sequence
MPFRYRLALDLGSTSLGWAVLRLNDQKDPTAVVLTGVRIFSDGRNPKDGTSLAVSRRQARSMRRRRDRLLKRKSKLMAALVKHGFFPEIVDQQKSLERLDPYKLRAEGLDRALEPYEFGRALFHLNQRRGFKSNRKTDKRETDSSVMKSAIVGVRLALKEGGFRTVGEWLHHRMRQGQKVRARFNVSRIVSEQGKAKIEKSYDLYIDRAMIEAEFDALWARQAELNPGVFHEKARLELRDILLFQRRLRPVDPGRCTFYSDEARAPLALPSVQRFRMYQEINNLRWLDDDLQEHELTLGQRDAMAHALETSLKKTFQQLRTVAGLGSGATFSVEDLKRQEFKGNATSCILSKKQHFGSQWTKLSEEMQDEIVSRLLTEENESTLISWLMELTGIDEVRAEAIASVALPEGYGRVSLKAIRKILPALRESVRTYDKAVIAAQIDHHSDLGARATGEILPRLPYYGEVLQRHVGFGTGNPEDTDERRLGRISNPTVHIGLNQVRIVINELIQRYGHPAQVVIELARELKLTREQKRDIEREQAANQQRNKRYRQEIAAILGISEEQVKRDLIEKRILWEELSFDPMERRCPYSGEQISLEMLLSDQVEIEHILPFSQTLDDSLNNKTVSLRQANRCKGNLTPWDAFGRQEVAGFRYEDILQRAQAMPQRKRYRFAQDGMEQWLKNDKGFLDRALNDTRYLSRLAKEYIEWICPQDTWVVPGQLTSMLRRTYGLNNSDILGWEGQKNRADHRHHAIDACVIGVTDRRMLQVMSDTSRKNRERAHGRLLADMPLPWPTYRDHVKRAVSRIWVSHKPDHSYEKSMHNDTAYGLLPDGYVRVHKVIDGIRQQSTEKLAVIPIASPKAGARHGFLPDGSPRPYKGYKGDSNYCIEIVRDEASGKWLGEVISTYQAYQVIREHGFAEGWKLLRSPSRGFSGRSLVMRLMIDDIVRLEHNAELKTWRVATISGNGQIFFADIHEANVDARNRDKNDPFKYVSKMAGSLKKANARRVTISPAGKLSDPGFSP

SEQ ID NO: 9066 - protein, 1014 aa, unidentified
  REGION 1..1014: note = Description of Unknown: Cas Enzyme sequence
MTRLNSRPYRLGLDLGSNSLGWFVVDLEKRNDRHEPVALGPGGVRIFPDGRDPQSGTSNAVDRRLARGARKRRDRFVQRRKELIAALVRSGLFPADAGERRALERLDPYALRKTALSEALPAHHVGRALFHLNQRRGFQSNRKTDGKQSEDGAIKQAAARLQAQMDEDAAPTLGAFLAGRHLHKSYEERQAAIRAELVRLGKDHLTGNARKKIWARIRKRLFGDEVLPPMDAPDGVRARATITGAKASYDFYPTRAMLLDEFNAIWSAQREHHPTMTDAARTEIERIIFFQRPLKPAIVGKCTLDPATQPFKDDPDGYRAPWSHPLAQRFRVLQEARNLEIRETGKGSRKLTREQGDLVVAALLANKEVKFDKLRSLLKLPAEAKFNLESDRRAALDGDQTAARLSDKKGFGKAWRGLALERQIAIVTKLEESEDETELIAWLERECGLDGASAARVANAMLPDGHCRLGLRAIGKMLPIMQNELDEDGVSGAGYHLAAKRAGYDHAKLPTGEQLDRLPYYGEWLQDEVVGSGDPRDGKEKRFGRFPNPTVHIGLGQLRRVVNELIGAYGPPAEISVEFTRALKLSEQQKAERQREQRRNQEKNEARAEELARFGYPRNPRNLLKMRLWEELARDPLDRKCVYTGEQISIERLLSDEVDIDHILPVAMTLDDSAANKIICMRYANRHKRKQTPFEAFGASPTIQGKRYEWESIAARAASLPRNKRWRFDADAREQFDKRGGFLARQLNETGWLARLAKQYLGAITDPNQIWVVPGRLTSLLRGKWGLNSLLPDHNYAGVQEKTEAFLASTDDMEFSGVKNRADHRHHAIDGLVAALTDRSLLWKMANAYDEEREKFVIDPPWASMRDDLKIALDKMVVSHKPDHGVEGKLHEDSAYGFVKPLSITGRKDEEDGNLVYRKAIESLNEKEIDRIRDTNLRKIVRDHVNARKKEGVALADALRQLQSPSEERAQIKHGLRHVRILKKESAAYLVPIAHRRTGDVYKAYSAGENFCVE

SEQ ID NO: 9067 - protein, 1343 aa, unidentified
  REGION 1..1343: note = Description of Unknown: Cas Enzyme sequence
MKTLGLDLGTNSIGWAIRDTTEQDNQLIDKGVLTFEKGVGEGKSGEFPMVQKRTESRGKRRNYQAEKYRKWELLKALMTTSMCPLTIDELNEWRHYKKGVGRKYPQSKKFIQWLRFDFDGDDKPDFERFGLSKHDSLYVFRMLAASEEAMSKKIFENEPQILGRVLYQLVQRRGFRGRDEEESKTIMQGGGASGAKGVQEVEPFIAQYGTLGAALYHLQKDKGERIRKRYNLRSHYEQELQHITKVHGLSEDLYKHFWKAIVWQRPLRSQKGLVGICTLEKNKSRAPISHPFYEEYRTWVFINNLKIVLPASINQEEYLQGKIYPLFYNASKDFKLKKILERLKKDGGHIEAKFKEDTKVISCTLLYEFQKLLGNDWKEKYGWYQAMNNEPKTVNYSFEDVWHVLATFDSREKLKTFALEKLELDEEDAEHFSKLKLQQGYATLSLAALKKLVPYLKKGFKYSHAVYLGNMHKVIGAKQIDTGMATHLAETFDKIENEVKQQRTIDEIVNSLISDHQNADQRWGMEPGYKLDEDDKNDIDKKINAIIGDKTWQERKTEEERSAIQIGVATSYQNYLQQRINTSLNKIFPKKERLHDKIFKHLQETYSLPDDAIKHLWHPSEQEGYTPAPIKNGNKILGDPQPISRGFKNPMALKTLHKLKRLMNYLLAEGKIDEETRIVVEIARELNDANKRKAIERWQREREKENAEFSKRIEEIVKQYNLFVDPYDKEMVDKYRLWVEQNETCLYTGKRINVCDLFNGSLYDFEHTIPASMSFDNELKNLTLADGIYNKQIKGKRLPTELPNYYEDAVINGKTYTAIEPRLKFLVDKVEALEDQQDDWKKKTSDDKGVKDAIIQRRHLIRMDLDYWRKKLDTFTIKEYKAGWRNSQLRDTQLITKYALPYLKTVFNKVDVQKGLVTAAFREIYKIQPRMEKKSRDKHSHHAMDAAVLTLIPPAAIRDKILLRYNEEKDNNPHNTYHETPRDWKAFAAHYILSMEDELLINFQPQHRALTPTYKNVRKRGRQQYVKQKHADGKWHFKLDDAGKQIPLVAKGDSIRGQLHKESFFGAVKLNGEQILVERYPIAAFTKIEDCKNIIDKAVSKIVEDVLKERMAKGLSFDKAKLDPIPFPSGKAVIRKVRCKVAAGRGFLTPGKALQIRRHDFASKHEYKNFVYAQNEENTLCLYYEGIVDGKTERAFKIIGLFELAQSGLKSISTLYNEPYYNTIEVGRGKTKTAIHLKHILQPGTKVIFYKDNKEELIELPEQDLLRRVFRLYKFNEPAPGTIYCYLQNHLEARSNDQLGNGEKDLALEKFQPRIFLGSSKFTCIIEGKNFEVKPDGQIELFF

SEQ ID NO: 9068 - protein, 1025 aa, unidentified
  REGION 1..1025: note = Description of Unknown: Cas Enzyme sequence
MGKKILGLDLGSNSLGWALLEEVEGQVSSIIDIGSRIFTKAVEEKVPTPKNQKRRDMRLGRRVVQRRARRKQRMLNYLVSLDLLSNELQRNFQPELILNSLGDPYYLRAKALDEQLTRHEFGRILLHFAARRGFLSTKKQVAGDLIDDPDTLSYLNQLDDKPSLDKEEGAFKADISELRNSIETSGSRTLGEYLYKLEHGICKRNRSHDGGHLRTDRAMYKDELNLIWEKQKQFFPDLPDDFMTDNKGIKQIIFYQRPLKLKKDRVGKCSLELEKNRAPMARIEVQRYRYLQDINNLQYFERHSEQWLSISKSDKQKLVEYFEKNLKITVAALKKELGLDKLTKINLETKNLKGNITACEIRGVLGERWDHYSDQDQHALVEDLLTIKKKSALKTRLLNHWTLSASEAVKLCLLEFEPGHSNHSLKAINKLLPYLEQGYLYSEARVKAGYDYEIVKIEPHDTLCAPDTTSNPIVNKGMYELKRVVNAVIKQYGKPNAIRIEMARDLEMNTKRYKENEKRQGQNKKANEVAVDAYKGLKLGRYPSRDDKIKYRLWEEQSHRCAYSNKTIPLNAVFTAEVEIDHILPFKKSLDDSYMNKVLCYTAENRIKGDRTPIDAWRGNAEKWNQMTQAIGKWKGLESKVNRFYQTEEDLQKRDFISSQLNDTRYIAKLAQEYVKQLGCDVSVTKGFVVSQIRHQWGLNDLLGETNKKERTDHRHHAIDAVVIAATSRGLYKKAVSQIQRNKLNIPVPYSNLREELQERLKHTIVSHATQRKLSGALHEETGAGYIERHGGLVYRKNLSPDFTVKNAASIVDSVVQDIVLSHLEKHENDPKKAFADGKTVLHKDGKTPIKRVRVLQSKTTLKKLEQNKVGIKDKAGNVFKYMSYGNMHHVEILQNKQTGKYKGEFVTMMQVSHRAKGIQSKLNPEGRKQPLVQTTHGDDWQFVMALHINDSVSVLANSGERIFYRVQKFMKEQGYLVLRLCTTSVLSDKSEEVQLPIHKLMTDQMLKLHKVNAIGVISDDKANN

SEQ ID NO: 9069 - protein, 1062 aa, unidentified
  REGION 1..1062: note = Description of Unknown: Cas Enzyme sequence
MNTKVGQVDYVLGIDLGVVSLGWAAVEIDENGGRSLLGAGVRCWELSGGGLEEVEKGKEEPPGQLRRQARQQRRQMYRRAQRLRRTYRVLQEMRLFPAGPWSSTARKAYLETLDQKAQEWLRTKVPDANDDGLLAHTFIYRLRAAALDHPLPSELLGRVFFHLAQRRGFLSNQRISQRTKEEELGVVKKGISQLQDDIQKSGARTLGEFLSRLNPHEQRIRNRYTSRKMFQDEFEQIWKAQCAYHPNSFTDSNKARLWKALFFQRPLKSQSGLVGRCPLEGLTRKRPNGQVEYVYAFRRAPMASLEAQRIRYMQRINDLEFIDPQGTIRLLTAEERQKLYDLAERNEDLSFTLIKKALGIPTGKKGQGWQCNLERGGEKKLPGNRTAARIRKIIGDIAWENLGSEKQKALVDTVIAFLNADALEEHLQRAWGFGREMASQLAEMPLEEGYHSFSRRAIRKLLPLLKQGDRLNAAIQKVYGGTRMRVNQHPKLPPVRQVLPTTRNPLMIRALTELRKVVNAVIQRYGIPRYIRVELARELKRSRKEREEISRRMREQQKRREEAAQKVLEALGRTATARDIEKYLLAEECNWECPYTGRQIRLESLLGDHPEFDVEHIWPLHRSLDDSFLNKTLCYHQENRSVKAGRTPYEAYAADPVRWQEILTRVRNFRGPFARQKLDRFQAEHIPPDFALRHLSDTRWISKAAADYLGHLYGGRIDPAGRQRVFTVTGGLTALFRRAWNLNAVLGGSPEKNRYDHRHHAIDALVVALTDPSMIQRFSEEAKKLLRTSDRGAVKVDPPWDTFLTDVRRHVEEIVVSFRVSRRLSGALHDQTHYSPPVEQGKTKVRKRLNALSSHEVERIVDPVVQRLVKEKLEQLGMSDPKKAFATDANLPIIRGKNHTALPVKSVRIWVSSSVIPVGDGTRRRYVVPGNNHHIEIYAVIDEQGQEVQWTGKIVSLYEAYERKKRGEPVVCRDHGPNTRFKFSLAKSEYIEWINDDGQKQLLRVVGISHNNLELRLPYDARPITLIREQRERIRATYRQLFQRRARKVMVTPLGEVLPAND

SEQ ID NO: 9070 - protein, 935 aa, unidentified
  REGION 1..935: note = Description of Unknown: Cas Enzyme sequence
MSDRPTILGLDLGAASIGWALLSARAEGDSWRPDGLVAAGVRIFQAGMEGDMESGREESRAKARRDARLARRQTERRARRLRTVFNALRNVGLLPSYPDLDLSSSTGRHQTILRLDQEIRDSGRLDRLAQEIGVQGAADKLPYVLRAAALDHPLEPHELGRALYHLAQRRGFQSNRRSPRRDDEEGVVLSGISQLRDDMARTSSRTIGEHLSRIDPHQQRIRARYTARAMLIDEFEAIWASQQRFHPSILTLELKKRIYHRIFHQRPLKSQSDKIGRCELEPKRRRAPRALLDAQRFRLLQSVNNLRLRNEFGVEYELTPEQRQTLIDELDRKKEVTFKRIRRLLKIPDDVTINLERGGDKAIRGNEINAILAKVFGDRWWQFDRETRNKIIEDLLSIQKAETLERRGREVWGLDAEKAREFANTRLPDGYCRFSRRALAKLLPHLEEGLNIQLAIERAYPHHRLVGRAYELLPPAKQVLPDLSNPAVIRTLTELRKVVNAIIKRYGRPAEIHIELARDLRRSRDERQRLQSENRKQEAIRKAAAEEIRAAGEEPTRNNIERLLLAKECEFTCPYTGRKFSMAALFGPEPQLDVEHIIPFHRSLDNSFANKTLCFADENRHVKRGRTPFEAYGNTPRWNDILERVRNFKSRLAGEKLFRFQLHGEELVRWLSDFASRQLNDTRYASRLALRYLSLLYGGTADGVDPEGKRRIIVVTGQTTAHIRNWLQLGSILNDGGEKTRDDHRHHAVDAIAIALTSQRTVQMLSIASRNQLLRKGRLYGDPEPPWPTFLEDVRKTISRVVVSPRVERRVRGALHAETYYSPRTEEGAKSPEGRYVHYTKPLADLSRSEVEKIVDPAVRRLVIEALGGGEPKDVFKDGGRPPRFVRRNGTTVPIRKVRIRAKVSVTPIGEGDRQRFVQTSGNHHLEVFEVTDAK

SEQ ID NO: 9071 - protein, 1036 aa, unidentified
  REGION 1..1036: note = Description of Unknown: Cas Enzyme sequence
MNNTKNKYTDKFKQFKKGLVYGFDLGTHSLGYAVRKGDVWLEEGVIAFHGTPETLDQRRSHRTARRRNQRRKQRLNWLKDQLVKMNFIDKNHEPGSKASPVKEHPATLRYRALQGEKLSGEELHTALHHLFKKRGFKFDVPWANQQLSSGDDEKEVREQWKETREQLDEYDSDYIGEYLHKLWEKTLECQKEGKPEPRMIDHNFPRDLIEEEYRQIVKQQKQYYPVFEETTPEASEERTWEDWIIYGDCELVKEHDGPEVAVYDRLSEQNRGMLALRYAHFNNRNVGRDQYQPFDENGRPLHRVSRDRDEYREFQFGEAITNFRVRNEDGKTVDPPAEIIKAIREHYETKKDNQKPQITVNRLQKIIDKYNEEYGSDYSLIDGQTRLTPGPMSGRSRFSTPTLKKFDQEYAKKGKRPPVNQQPLLRYPEESIEDACERWLRDMAFPLGEHRLRIYLNLMRRLKKEHSAPDYVVMETTRDLAVGKKTASKIIRQREEKEKKRDKAFNFWQEAGFEHPSRNQIALFRLWEQTEGQCIYCGETISQDELINDKAELEHIVPRSTIVCDELFNRVVAHSSCNADKAGNNPYEAFFNSENEKYNWDEIVQRTGNFFREGSLKYKLIVLPPDETENILRDKFQAPLTKTGYIVQMARTLTIIEMDWLNEEGRDPSSEGADHDGRRYMTTTGGTTYMLRKHWGLKYVLHDHHEDLEKEADIENLESEANEDRRHLKARFDLRNHALDAMVIACTYPPMARMRSSKQHKKKSPDGYWAREDGKLTAMSDLFYIGYDAVREMIPDIEVTHYVPNQLNASHAEQTFLGKRTFEDEETEKEKTWFIKRKSLRDLVSTSSGKLKKNINTSYTPIYPPELGSYLEIALEKYREEDNPTPEGFVNQLCFSTFQSWRDKGADPDQFSFPCEVKIPIKKVRVRAYKGGKRPVIKVQPHAYVARDGYKGIAIYETPEGEREAIMVPYWENDPKYQEEKAKIPSGSRQVYFLPTHGTLKLEQEYLQEKGWVEFGDKYRLQSYDNQGHGFLVPIF

SEQ ID NO: 9072 - protein, 1026 aa, unidentified
  REGION 1..1026: note = Description of Unknown: Cas Enzyme sequence
MKDYVLKDANQAPSGKDSFLNGLVFGFDVGTGSIGYAVRKGSEFKDVGVLICDSEGSDLSKRRDLRRQRRTLRSKKYRRQWFAKELIKLGLSKPQTALDDPIALRLRALNGEVLKPEELYTALTHLFKRRGYSKVPWANVEKTAKETGKPKKADEEGVIKEKVKEIKAELGDKHPCQLLAERRVEVGKSPTENWARKIYWPREALRDEFLAIVAAQKKYFPKLAEKTDWLLYGDSQPKEKNGETFHVFFKTTEARNPGVLGLRWPRFDNRGPALDSLQPVDEQGRPLHVVRKNKEAFTKAQWELALMNFRVLDFETRQKRDPRTDFPIFIENIRNEWNKKGKVTEARLKKLAEPFKEKFLLIEDQKPLTPETGAGRARYSSPTLELIRKEIGEGRRVDPPQPILRRKGENAEQALNRYLADIKHPLVRHRLVLFRRLLMQLASRYGQPDMIVLEAVRSLALGQKAKNELNKRNEQFRKERENAREQLSSNNESFSRKAIQRYRLWQEAKGRCPFCLQTIERTDLGHGADIEHLVPRSVVDCNEFYNLTVAHIKCNRELKGDRTPLAAFGGTSQWEGIKVNAENCFIGRKLEIFLSPNAEQLIEQKSDLQHTAYIARVIRHISLIQLGWLDDQGRDPTPEKQNPALSFQVTNGQLTSRLRKAWGLNQILHPLPPDKRWDELTETEQNQFTEKNRGDLRHHALDAIVIACTLPWLAHRTHGATDKFGRHGWWTQDEKQRSKAANPIFPNDGQMHDVVKTEIEKVVVRHHVSRSNHQQAYATTLYAKKAKDTYVAREIFTSLTPKNLGSIWPEAFASYCESAWRRYSDESADLAGELKKTKGNVPENFTKKLCFAHFQKWRADDCPEFSWPKEIKIPIRNVRLISVKDDTAVVPFSPGTHAFVKRTGFKEVQVYLAEDKKSFVPVFIPYWKGDKLVCEKPIKKDAKPVVVIRRGMVVETKKAFSAGQPPGKYRVLVTSQLQLKLLPHHIANKEDAIVSFGLGKKGIQPMWADFIRVLGHELPHPPSVKP

SEQ ID NO: 9073 - protein, 1171 aa, unidentified
  REGION 1..1171: note = Description of Unknown: Cas Enzyme sequence
MNGKGKVLSAETDLQFAFDVGHSSIGWAVVRAPAGQTPALLGCGSVIFAADDCLASERRGFRRQRRHIRATRQRIARMRRLLGHLGVLTNKELEAPGCAWPWLLAARVLRGGKTLTWSELWDALRWYAHNRGYDGNRGWSKHAAASAEDSEKEKRAGELLMAFAKKYGRPGTMAEVFCDVLKVDPLGVVKSSTERVRNLGAAFPREGVEGEVERILRAHMGVLSQVDDRLIQALMRDHTALPSPDLPPPARYGQRLKDGSFSPGGLLFGQLVPRFDNRIIARCPITFERVYQGVKAETGDEAKAKREAEKQAKVPSVACVEFHRFRWAMELAKIKVATGNSHAPRNLTAAERQAVNAEMEKKGYLTPGELKKAVRAQTGGPPDNLDQILTHPDAERALLLDPVRQYIHNDELVSAFWPVLPQRLQKRLSGQWRRGNALTVSELLEDSGQARAGAEAVGERYLDAQNTKKRRKEEPLTRESLLRTVLRVKPTNGRAPHTRAVMREVVDFVFRTDRHPAEEGGPLYRSEAIRQAQLKRALDEQTNNHLVRHRLKLLVGETEEEARKHPKQRRLRGLFRDLVDTYAGGDLRRIARITIEVNRELRQMSGKTAQEQAKLLGQQLAHFKGVARKLAQAYEGLAVHVGPGLIRKGRIAEDLGWTCPYTGKPYDPLDLLHGRVDKDHIIPRSHRASDSLDSLVITFSEVNELKGKRTALRFVEEEQCKPVPGRPELMIKPLSTYRKDVEALETFKGHDDDQRRKKNRKRLLLLRDYVEKEFTPGDLTQTSQLVRLGAQALQKQYAGLPKQPVITSLPGSVTAAVRKSWRLTGCLAVANPQVLNPEEVDNDGRPKVRTKTEIRSITHLHHALDACVLAFASHFLPRDGGVWELLVKRRLSADEQRRARQLLGRTVEITKDGELRLADLPCKLTAQICDRLKERRVVQHLPADLSGLRCKETVWRVFDPTDPHRSTKRLARWLEEKKVPVPAGDANTALIICRKRRNAGTDREEAAGGKVFRETKTWRWVYDLKDRTALLGLAPVGDATTAKLKRIKAVKVLGDNFGLALDPEPTLIRPHKVWHQLEALRRRNGGKTARLLRLGTLIRVETKAARSDYRGTWMVRGMSFKQRDGLVLEIAPPDYVRSRRVPGVFESASVATLLKCGLEIIKPPLCGVAPG

SEQ ID NO: 9074 - protein, 1058 aa, unidentified
  REGION 1..1058: note = Description of Unknown: Cas Enzyme sequence
SSIGWSVLTVSNGMPTGIVDGGVRVFHDGRDPKTREPKGAIRRDARRRRRKRERFLRRRSALQTALRDSGIFPLLPAAQKELEKLDPYELRARALDEAIPIEQIARILLHINQRRGYLFSKNRNVKSNESGVVKVASERLDTEIAAVGARTYGEFLHIRRCRSMELSRMQAVRTRRMMSADGKIEGFEFFPERKHLEQEFFQIWSSQSKFHPTVLTDELRNLIYSIIFFQRYKGAEKPSFCRLTSEYQLARSHPLAQRLYLYEAVNNSQILLNNSSIQSLNLEQRDKIISALDRGGMSKQNETISFYKLGKIIKLQKGEKLISAKTTTLSIMRDPIVSQMSDVARFGDTWLTLTLQQQSEIVEKACINVQDMEHEDVVEWLCNEFDLDRISADHVVNAKLPEGYIPFGNTATAQIFDQMKSCVQSLDDAILDIGYDLVGLNAKGSLQELPYYGKVLPGITLGGSQREVDEEITRHGRVSNPSFHIILNQLRRLVNSIIKKHGTPCEIFVELGKDLRWSEARKKIIASASSQRNKDFNKLNELIEEMGEEQSGKNRLFLRLWLEQLSGQEIAICPFSGQEITKKMIFDGSCVIAHILPFSRTLSDDNSNRVICLKEYAIQKGNLSPFEAWGNTEGWQIIKSNFDLLPAKKRWRFAPDALTKYAEEDALHKRLSKPDGHIATVIHQYLSLICNQQISASNISVGKGQLNRFLKRRWKLETDEVFARTHSSNSPKNLETDYRVQTIDATIAAVTDTKTIAELSYASAQNEKAGKSVPPKSVDEPWFGFTNAINEHARSIIVSHRADHGVTGLGFIGLENSKTIGKLHEDTAYGFTRDGNVVHRKSLASLTLGDIRKSSGGVNLRDEHLREHLLEATKNQTGRNFTNALITFSLAMTLPNGEKNPYFGIRRVRLIEKKTLIPLSDRDGEIYKGVASGSNHRFEIWKLPDGSFATKIVSVFEAHLDEIVKPHPAAKLIQRFHKGDLIELRDSKFGPVIAKVMKFDGNGTIELVPHNEVNASTRYRKYSEDVFIRLRLGSLVQYRARRIYVDELGQTRGKSRDW

SEQ ID NO: 9075 - protein, 1011 aa, unidentified
  REGION 1..1011: note = Description of Unknown: Cas Enzyme sequence
MSSQSVDNPEQLDLFQPQEFTLGLDLGIKSIGWAVLSGERIVRAGVYLFETAEELNSTGNKLVSKAAERGRKRRIRRMLDRKARRGRHVRYLLQREGLPADELEKVVLHQSNRTLWDIRAEAVERKLTKQELAAVLYHLVRHRGYFPNTKQPLPEDDSDSADEEQGKINRATSRLREELKASGCKTVGQFLARNRERQRNRKDDYSNLMLRQLVLEEAQQILSFQSQQGYQFSADFEETYPKLLMGQRPGRSPKLGNCSLIPSELRAPSSAPSTEWFKFLQNLGNLEIHNVYREEWPIDEQRRNQIIEACSQRSTSTYWQIRRDLQLPDEYRFNLVNYERLGPNQDLQEYLQHQERKNLANFRSWKQLEKALGTEYPMETLDEAARLITLIKDDEKLADQLADLLPEASDKAIAQLCGLDFTTAAKISLAAMYRILPHMKQGMGFYDACQQEGLPEAGEAPAGDRVLPFDEMYNPVVNRALSQSRKLINSVIDEYGMPTTIRVELARDLGKGRELRERIKLDQLDKGKQNDQRAEDFRAEFKQEPRGDQSLRYRLWKEQNCTCPYSGRIIPAHRVLSDDTQIDHVLPISRSFDNSLSNKVLCFTDENAQKGNKTPYEYLDAERFQRLEAISGNWPEAKRNKLLHKSFDKVAEEWKSRALNDTRYLTSALANHVRQNLPDVKVQTVNGRITSYLRKQWGLEKDRDKHTHHAVDAIVVACTTPSIVQQVTLYHQDIRRYKKLGEQRPTPWPETFRSDVLEAEEKIFITRQPGRVSGGIHTKDTLRKHHSKPDRQRVELTKVKLADLERLVEKDASNAKLYAYLKQCLEESGDQPTKAFKAPFYMPTGPDAKQRPILSKVTLLREKPETPKQLTELGGGRRYDSMAQGRLDIYRYRPGGKKRDEYRVVLQRMIDLMRGEENVHVFRTGIPYNEGPEVDQHYEFLFSLYSDDLVEFQKSAEGEIVRGYYRTFNIANGQLKVSVYPGGRQDFNFFGAAQLAHFAKVQVNLLGKVIR

SEQ ID NO: 9076 - protein, 1061 aa, unidentified
  REGION 1..1061: note = Description of Unknown: Cas Enzyme sequence
MCLGMPSPHELTPFCLKQTINPDDVGLCNLILQEILSRGHMETIWGLDLGTTSIGFSVVRMDIKKEQGEIIKTGVRIFPEGLNNDHEPRNKRRRDMRLHRRQLRRRRIRRIELSRKFKEMDLLPEFSSDCWNKLMEQDPYVLRNKGVSERLELHQFGRAIYHLVQRRGFLSNRRSTGSEEGKEEEGIVKSALQDLDQELGESTLGQYLSEQEIKRGRYLDRNRVIEEFKRLWQCQRAYHAEILTEKIEKELYEFIFHQRPVFWRISTLGNCRLLPDSRLCLKGSWLGQQYLLFQELNSLRLDGSNEPLPNEERQQLIDALLDEGELSWAACRKILKTSWQKRGIPLKTKFNLEFGGKSKLAGNRVVSSIRSVLKENSIEVKEIEKLYQLLPQWHFEILYKEVGEGRNARIVMRNNQEIEQKERFFVNQLMSEIKIEETIAKKLVSLDFPAGWLSHSTDAIERLMPYLEQGFVYSDACDRAFPSHRVVEGEGLEFLPSDQSYLKEVRNPTVKRALNELRKVVNNLIRTYGKPDRIRVELARELKLPSTKRRDYQKKTKQRENERTQARDAIRKANFRGNSLEIEKYLLWKESDEKCLYTNQSISFSALFEEGKYEIEHILPYSVTLDNGFMNKTLCETNFNGFKSNRIPFEAFKNSGGEEEWKKFVERVKKSKLPDPKKRRLLAQKIEDLVGDDPAERQLRDTAFIAREARDFLMKLFTKKEDKAIPVETSNGMITAQLRQLWGMNQLLAEGDKKNRDDHRHHAVDAVVVAMVHPGTVRHMSFLSKNWLRGERTQFPAPWQNFYQDVQKSIESIIVSHKVRSKVNGKLHDELVYGKRKDQTGSKKGSSVYKRRVNLQSLSKSQLQKLKDGTLEAAWDGGGNVQQILRNHLEHNKDFSTLPFFNLEHGEKRFIKSISLLYNKKDHLVEDLHGKQSTFVDKNENHHVAVYENGDGEIRFEVISRMDAAKNLSQLGSPVIREIKGGFRFKFSLVINDAVISYDEENRPNVLIVQSIWDSGNVVFRDHRDAGNKDRGINKSISTLISEGWEKCAVDPIGRLAKKND

SEQ ID NO: 9077 - protein, 1063 aa, unidentified
  REGION 1..1063: note = Description of Unknown: Cas Enzyme sequence
MAAEIPREQTEGAYRLGVDMGTGSIGWAAILEADGKPAEILAMGVRRFEAGVLGDIESGKDKSRATARRDARGPRRLTWRRQYRLRKVFRLLQEMDLLPPSDDDSHDERHRVLAEFDKQFRESSQCPDPQAAHRMLPYLLRAQALREKLSRHELGRALYHLAQRRGFLSNLKAAKKDEDLGVVKKGISQLAQLIDEAGARTLGEYFAGLDPEEHRIRGRWTARHMFTAEFEKIWSAQARHHEDLNDGQKQRLHQAIFDQRPLKPQKRLIGMCDLEPYKRRAPSACLAYQEFRIVQKVNDLEVTQPDREVLPLDSQQRETLIAALNENAEMTFRAIRKLLGMKRSPEYGRNYSFNFEEGGEKRLVGNRTAAKMAAALGERWHQLNLDEQNRLVDEILSFESEEPLIGRLKTGWGLDDVQARAVAETPLEPGHGALSRKAIARVLPGMREGKRFATVREDIYQVAEKTEDPLDRLPANHETAVLRQLRNPAVERALSELRKVVNALIHRYGKPSRIYIELARDLKHGRKRRQDMTDQNKKNQASKDAAKRQILKGMNNDERFCTERNSLKVRLAEESNWECPYTGRSISMEALVGDHPQFDIEHIIPFSRSLDNSFANKTLCHHEENRKVKANKTPHETYHGTDKWDDIITRVRRFKADSRLAARKLALFQTEKLPDPEDFGARQLNDTRYMSRLATEYLGLLYGGQIDEQHIRRIRVSPGRVTHFLRQRWDLNAILGHPDKKERADHRHHAVDALVVALTGADQISGLSRAAEEAEQMHLDGLFPRGGDFEPPWDGFLDDARSHVEDIIVSSRVARRLNGRLHEDTIFSKPIQTQDNNGKDVKVHHVRKPVGSLSTQELDAIVDDRVKQLVKEKLTAIGGTPDKAFKDKANHPYFKTKDGRVIPIHKVRIRKSDKPSIVGKGTKGRYVNPGSNHHMEIVAVLDENGNEKKWEGHIVSMFRAARRHRQREPIIRRDHGEGKCFKFSLAGGEHVEMEHEAGKRQLYRVLGISAKVIEFSLHADARPSTVVRKIPRARITRSAGALLDVHARKVSIDPLGNVFPAND

SEQ ID NO: 9078 - protein, 1074 aa, unidentified
  REGION 1..1074: note = Description of Unknown: Cas Enzyme sequence
VGSRGRLPVPPLVGKAVPMNYILGLDLGTASLGWAVLECNENGEPFRIERTGVRIFEAGVEGTIENIAQGRDASRAAARREARAPRRQNWRTQRRKRQLFKLLQQHGLLPSSAKNDSSARKEVFDNLDKELTAKHITKGDHAAHQHLPYLLRTKALTEKLEPFELGRALYSLAQRRGFLSNRKTDTDEKEDGVVKGAISALGEQMGDRTLAQTFVEDVHPDNTDPDQQKIRKRYTARSMFHDEFNRIRQQQQAHFDLADEDWNTIYKAIFFQRPLKSQRHRIGKCEIDGGRRCLDALDAFQQFRIWNSVQNLRLADAYIHGRDARLTLEEQKKLVDALQTHSLMTWSKVHTLLGLKKARFTIQEWTKDRGLVGHRTNAEMLKVFGDEWLDKPLDEREAITKEVVYFRKPSAMKRRGQKAWNLSVEQAALLPGVRLEEGHARHSAETLATFVKRMSSGEDYSTIRTELTGKDESKPIDKLPPVSQAGLDITNPAVIRGLTELRKVVNELIRDHGKPAAVHIEMARELKNSRDKRIKLHRNNEDRRKRREKAIAGILETIPGLKYSGTDIEKWLLAEECGWHCPYTGRSISPKSLFGGEFEIEHIWPRRYLDNSFTNKTLCYSQFNRDVKGNRTAFDACSGLEGWDEMVQRVSNFDGPVAALKKKRFLTGADQIPEDFTSKHLNDTRYNAVVAKKYLSMLYGGLWDQEGRQRVFAVTGGHTALLRREWGLNGTLSGTEEKTRDDHRHHAVDAVVIALTDPKRIQALVAAAELAEKKASKRFYEAVQDPWPKFAVCVEESINQIVVSHRPTRTLPGALHAESIYSKAQTDKNGNESHRIRKHITKLSATELKKDKIVDPAIRQLVNNQLKELGETNPAKAFAEEKNHPFLTAKDGRRIPIHKVRVLADKKPRSIGQGPRHRYVASGKDSNYASMIYAVVDDDGNEIRWEHKVITRLEAHERKSRNKHVKGEKVLIPDPTDFDDDKTRIFKFALVKNDTVMLQGSDGENVLYRVQKLSQKELQLCPLATPSIQGKARNKWNRIGSFDMFRQWNLRRLIISPTGDCQVLDSVAALEDVD

SEQ ID NO: 9079 - protein, 1131 aa, unidentified
  REGION 1..1131: note = Description of Unknown: Cas Enzyme sequence
VARDVESRTVLGLDLGVTSVGWALVEMRGDAPVGIRAIGVRHFDTAATSEKEFEAGRHKTKNADRRRPQRQMRRQLQRRKTRKKQAFAALQAAGLLPAASAQNEDQRHKVIRQVDARLRRKWLVKGDHRQQQLLPYLLRDAASRREVTAEELGRALFGDRQIRIYHPSPCPLPCYSAAQARERGQLNLPIAFHLAQRRGFKSNRKTDRDDDDQSKVYAGIGKLAEKMQAAGCETYGQYFATLDPQEIDRRIRGRYTSREQYQKEFDKIIATQLPFHPQLAPHVKAIRRAIFYQNPLKSQRQFLGKCELEENRRRAPKACLEFQRYRVCYQVNNLSLEAPTGHREPLTPEQRQTLYTALEHKEKLTAAGILKELGYKRNSGYAVQGIGESGKEIIGNRTACKLQKELGPAWDHLEDDDRTKLVDEIIQFTNPTALARRLIRLFGFSEEDAHKAANAHLDGDYASYSRVALKKLLPLLKAGHTLPAAKEMVYGEEAAGEELASETPTAETHSRDGAGPFLPPLYKTKPGRYVRNPVVMRCLSELRKVVNHILREHGLPGAIRIELLRDLKRSKKVREERHKNIKKNQERNERIKQHLLSDAETKRFFAHDPPKRADVDKWKLFEECDGECPYTGRKISPGDLYGPSPQFDIEHIVPASKFPDNSLANKTLCEHHENRQRKKNQTPWDAYHGTDQYDQIIARVKKFKGPLAGRKLELFQQRDLPVSMTAQQLVDSQYTASLAADYLATLYGGQVDASGRRRVVATNGRVTSHLRGLWRLNELIGSEDGQKNRADLRHHAIDALVVALTGPAAVARLARFVQEGEGLGLDNPFAARHHRRPKPFDLPWDGFREEAQRKVLEIVVSHRPERRLVGQLHNDTMYRGPGRRGSPSPNLLTQRVELVKLRREQIEGDALVSPLVRRCALEKLRTFDQPGKKADPQKVFKDETNLPLYPGRNGQPPHVIRRVKIYKSMSKTISVRKANAKGHYEPGGNHHVPILVEVDAAGNEQRDNQGRPILKFGDVVSRFDAVKRLKKNAGEVIERDCGPGLRLKFTLMRGDIVEMEDDEGMRRLYRLQKLSQNDFSFRAIHLAEGDEKTLKGRKDLFIRETSPARFSRRSPRKVIVDPLGRVHNCGG

SEQ ID NO: 9080 - protein, 1298 aa, unidentified
  REGION 1..1298: note = Description of Unknown: Cas Enzyme sequence
MSKYTLGLDIGSNSVGSAAIDTKAHIVKLGDSVFPAGVEESEEKRGAPKNQARRGYRGSRKVGRRHSRLKHHLRAFLFENSLIPTEAQKLREWEKLNPWKLRRDAVHEEIKTDEKFSAKEKFGRILLHLAQRRGAAGIDVEQESREIIASTKGFIKAVFIEVDQSIENKQPLFLLSKENITLSDEQIKTGRSGKTPRGTKIIKASGLRKKKGKVAHIEVLPGDYIEPQQLLCEVAIEKDDSDEGKIKGAINKSYAEMERLKAKTFGEMMFNFYEQRRFRANSKKRGEIRNPIRNRKNASGEAVYEFCADRKMIQNEFTTLWNKQKEFNGELSKLLTSDLRKTLCNPEGDKTWKQKGIIFGQRNFYWDIGTLGRCDLEPTDQQCPKPDMYAQEFLVLETLNNIRITPPKEVSRPLDDKHDQERKKVLELLQSQKSVKVGAVRRVLGINRGENKTLYSLSLDADPNRSLNTNWFIREIVIRAIGKSQWETYDEKTTESINSALLKYDTENLKHEEKLFQGSRKWWNLTEEQAQKLVNAWKHRPRKDERVNLSRKAIKNLLPYMREGYSVTEARQLVAEDAESGASDEQRQRYALISKRSNKKMRHYLEKHPEQLPPAPMLANPVVRKAIHEVRNHIQAYLNIFGSKPDRIVVELVRQAKQTAKDRSEQLTRNRKREEERKNIIKKYELNRLTKNQREKAIKRVLLCREQKFISAYSDRSISEKNAAEGMDLEIDHIIPKSKGGPDALVNRILCYEEENQGKGSKPLKEWLTEEDFGRLEQRLRHLRDDNPVKWDYLHKDVKDIAGFTDSQKIDTAYATLQVTSWLRDTLYGGEVDGKRRVFATKGSYTNEIRRDLRLFPDTNDGTAGEKKNRLDHRHHALDAVVIALSGPEQLAKLAKKYEKFEEEKSNGYSTAKPEPLAPPWGTHESFRADVMKEYDKLVVSHRPAGRKLMGQLHNDTQLGTVMKDGEVDTKHCKKRIFAIELTPNHLRVPHEWDRLRKQLEKAVSKSENKAIRSRMLELDDVKPAKSGIIRDRWFREELREYLREHGINVDDCREQNKKNFKKQIKELIKTKGIFLKSGVPVRRITLLRSPTMTPPIKRKHWSIETGKMEDDTNPKSVRLYEPQSNHHIEIRKDTKGKWTGEVITNFESAQRNVKRLQMLKKSGVPSIRKFRLMERNDRQRYLPIITKINREYQVVNRDDTDTDKFVMSLSIGEMVYMKLRDTEKADYFVVFKIDGTGRIHFTPHYDAGRSKATEKCAARQDISLSAGQLQGLGVEEGKGPYKVWVGPLGDIKKLNRD

SEQ ID NO: 9081 - protein, 1003 aa, unidentified
  REGION 1..1003: note = Description of Unknown: Cas Enzyme sequence
MSKYTLGLDIGSNSIGWALLDTGKSPKIIDLGVRVFPEGVDRDKNGGELSKNATRRAARGARRNRWRRAYRKDKLVRNFKKVGLLPKDPKKLNQLLTIDPYELRSKGLDQRLELYEFGRVLFHINQRRGFLSNRKSGSAKEDGVVKKQAGELQNSIDESSNRTLGEYFAKLNPHEKRIRANYTFRSMYEHEIDLLWQKQSEFYPDILTEQVKEKIKDKTIFYQRPLKPTDELIGECSLEAAQKRCPRSDWYARRFRILQDVNNLKIYNPNGAEQGLSDEQRKIVLKEMLSKKDVSFDSLRKKIGLIEAQTFNLEEGQADKKKANLKGDEFAAQMRSKKILGAKKWNSLDIKEQVEINEALIDDDIEDEPFVQMLIEQHAFTEDQAKATLDVTLPQRYMSFSKLAIQKLLPHMENGLLTPEAIKIVYGEKAIEEKDLSFDKLLMPEDLRNPVVNQALFEIRKVVNAIIKEYGKPAKIAIEMARDVHGGKKQREETHLKMWKNEQRNKQARKELIENTDIKNPTRDDIIKYKLWDECGKVCPYTGRSIPQYALFGDNPEFQVEHIIPYSRCLDDSFMNKTLCEVHENIHVKKNQTPYEAYSSDTKKFEAILQRIKILEYPKRKKFWQEKTELDDFIKRQLNDTRYITRETIKYLKRLGVHVYGTKGKITGELRHSWGLNNILDYTGAGLKNRDDHRHHAIDSAVVAVTRNKHLRELARTKYAVDDNSFEQPWPNFREEVRDRINKINVSHRATKKVSGQLHEETAYGPTGLKDDKGQDIFVYRKKLEDLTIPMVAKIVDPVVRNIVEGRLREHGIEPGNNQKIPKEVWNEPLYMKSKKDKKISIKKVRIRDVFNNMIMLKDKSGKPYRAVAPGNNHHIEIFEYTDKKGNTKRDGKVVTMFEAVRRSQNNEPVVKRDHGPDKKFICSLAKNEMFKLELDDDSQILHRIQKITQSGNSISIILRPHTYAGQVKDTDRPPIIQRRSPNTLEGYKVTVDPLGRIHRAND

SEQ ID NO: 9082 - protein, 979 aa, unidentified
  REGION 1..979: note = Description of Unknown: Cas Enzyme sequence
MQKILGLDLGTNSIGWSLLEEDSADSSRILGAGVRIFSEVTESKSKTLKNNKRRQKRGERRQRARRKMRRDTLISFLLKKNFLPAHTEDSNPLEEWFCQMPNPYELRTRALDDSLSMAELARIFLHICQRRGFQSNRKAKKKDDDGKVKSEILELQESIDDSPYRTLGEYLFHQPTQRRRYTSRQMYEEEFRTICESQQKHHPDLLDAATQGRLFQILFFQRPLKVQKHLIGKCSLEPNRKRCSKAHLDWQRFRIWQDLNHLTVKDPITRQNRALSGTEKEKLFEKLDEKTHLTWKQARKVLGLHDGELFNLEESDRKHLSGNETQGKLIKAIGSTYSNLTPDRQDQLVTDLFTISDERPLINRLKNYWNFSDEEIASLCEVELPDGYGNVSMKAVRKLLPHLQQGKPYTNAREDAGYEIVVNYGEGADKLEEVPDLRNPVVSKALHELRKVVNGVLRQHGKPDIIRVEMSRDLKQSEKQRKETQRIINQNEQKNERVREVLRNDFKLSNPKREDIQKYILWEETNHECPYTGATIGREKLYSSEVQIEHILPYSRTLDNSLSNKTLCLAIENQQIKRNQTPYEAYSGKPERYQEILQRVKKLPLSKRRKFEQQALEEDAFSERHLNDTRYISRAAKDYLLTLGTKVQIGNGRLTSILRNKWNLNQILNPHGDTKKKNRDDHRHHAIDATVVALTSPGLLQRVSQLSAKLEEKELNDANFVLGEPWPGFHQEICKLIYNINVSHAPTRKIAGALHKDTAYGYIESENKFVYRKPIETLKKSELERVRDKSVKEILKTRIEEYDGNLKQAFAEPVYHVDGKTSIMNVRINKDKISKVSVFSVARNGKEYKHYQTGNNHHLEIFEEVSGKWTCEIISTLEAARRVRIRKINLYNRESPKGKFVFSLVANDCIQIPDGEFKGIYRVQKIETTGGGRVVLRRIEISSTDSKEGSITKNINPLKKLNARKVMINPIGQIYPAND

SEQ ID NO: 9083 - protein, 953 aa, unidentified
  REGION 1..953: note = Description of Unknown: Cas Enzyme sequence
MNLLGVSIGTSSIGWALVDEEAKKIVAQGVRVFPAGTDGDIESGQDKSRNSRRQDARQRRVQLRRRAGRLRLLFKTLQASGFFPPGKRQEVLETVKTSPYLLRKKALDERLAPYELGRILYHLAHRRGFKSNKKQSAPDDEEKAKKLGKVLQGIQDLSEALDASGDRTLGEYLLRQPVKRRRWTARSMYEKEVVAILLTQRRFHDIPRVEKILFDQKPLRSQAGRVGPCLLERSKRRMELAHLLAQEFRILQKVNDLRAVDDMGAETVPLTQEMRKKVVSHLLLNGDSTFKTIRELLGLPKTVRFNFERQDEEKKAEKRLIGDRTRQSLGLLDPGAVDDFLQISEEKGLIRRLVEVHGLSQERAQEVAQAQVEAGYLMHSKKAVLKLLPLMRRGTAYATAVKEVYGDRGEKAIKKIVKLYSVRRIFPRLNNPLVTRSLGELHKVVNALVKKYGLPGKIRLELHRDLHTGPKKRKLAAKRMFAQRKAKKDASALLLKELGIKDPAPWQVERVLLANECGWTCPFTGKGISLRTLLRGEPSFYAMHLVPFHLSLDDSFANKTLAHVSIHEARGDKILSEMYSKPKEIEARFKDFKGPLAKEKLRRFKLPREKMIQEYDDAYAERFLEDGAYSATLAREYLGKFYGSINAVEATRTRVTNFIREATGLSRVRRDLDGDHRQRVIDAVAVAVTDAGTFKKLSIAAKTGDRRRFSSFSAPWETFVEDVREAVERTLVSFRVTRRVRGPLHEETNYSFPKKDKDGNVYHVVRKPLASITASDVGLIEGDKIRECVAKAFQPKAFADPENLPKFQGSVVRRVHVKRTEGTFCVGTGPQRRYVTNEQNHHALVRETDSGKWVRDIVSLFEAQRRLRNGEPIYNEGLFSISTGEIFRVDGKLVRIRSVSKDTRISYVPLSDGRKLETIIDAKELERQTVEQLRKKGIRKVSIDPIGVERGDG

SEQ ID NO: 9084 - protein, 947 aa, unidentified
  REGION 1..947: note = Description of Unknown: Cas Enzyme sequence
MRVLGLDGGIASMGWALIEIDEDCWRGAIVDAGVWMFDAPEEKSQNGTKLKSELRRTFRGQRRVIRRRRQRMNEVRRILHRRGLLPSVDRETLKQPGLDPWRLRAEGLDRLLTPMEFAVALGHIARHRGFKSNSKGAKTTDAADETSKMKKAIAGTQEKLARYGGSLARMLTEDESFVVPGTQVRRFRNREGDYSRSLLRDDLAAEMRALFRAQARFQSSFAAKEFEEELAQAAFFQRPLQDSEKLVGPCPFESREKRSPKRAYSFERFRFLSRLNHLALREGREERSLTTEEIRTAAGDFGATAKFTFAALRKKLKLPDAAIFVGVKPDEEKKLDVVARTGDAAAGTAKLRRLIQENLGELAWGALVNAPERLDKIAEIVTFRNDLDRIREGLNEAGFDSALVATLAEAAARGALDLFTGVGHISVKAARNIIPGLLRGLTYDKACAEAGYEHTVSRERHACDVGVQGKEALKKILHEERISPELVGSPTARKALIEAIKQVKAIVEKHSVPDKIHVELARDVGKSIEERREIHFGIEKRNRQKDRLKELFEKEVGRAPQDGDRGKEELLRFELWNEQKGRCLYSDAYISPTQLVASDNSVQVDHILPWSRFGDDSFLNKTLCTAKANQDKKGRTPYEWFKADRTEADWDAFVARVESIQYMKGFKKRNYKLKNAEDAVEKFRNRNLNDTRWTCRLLAEALKQIYPKEGKERRVFARPGPLTDRLRRAWGLQALKKNEKGERIPDDRHHALDAIVIAATTEGMLNRLTKQVQKLEELGSPYDLKDVPFPWEGFRADAERAFENVFVARAERRRARGKAHDATLRHIAVRDGEQKVYERKKIADLKLSDLTRVKDAERNAAIIESLRKWVETGSPKDVPPLSPKGDPISKVKLVTKNKVNVLMDTGNPDRLATVDRGEMARVDVFRKANKKGRHEYYLVPIYPHEIA

SEQ ID NO: 9085 - protein, 991 aa, unidentified
  REGION 1..991: note = Description of Unknown: Cas Enzyme sequence
FGGEEWSAVMSGDPYALRAQGLSGPLNPYELGRALYHLAKRRHFKERGPAEGGDAPSEPAETKSKAKHVQKPASEEEKQEQEQEQAREREHLVAALKASGETLGQWLSKRAPLERKRGEHATRAVVLEEFSRLVAAQAPHHAALRDEAFRAALEDALFAQRPVFWRKSTLGQCPLMPREPLCPRGSWLSQQRRMLEKVNNLAIAGGNARPLDAEERAAIVAALATQGSMTWGRVRAILKPIWKRRGESENAKFNHEVNDEGSGLKGNLVEVAFAKVFGDAWDAHPRQPELRACLPDALWRADYGEIGDQRVVIRSEKERAAQRAGVRRMLAEEFGASEAQAEALAALHFPQGWEPYSTRALERILPELEQGERFGALVNSPEREAWRDANFPNRDRPTGEVLDRLPSPAQREESKRLASVRNPTVVRVQNELRKVVNNLLALYGKPDLIRIELAREIGLSKKEREERANGMRAKERRREDARKDARKDLLAKGVPDPSRDDIEKWLLWEECGKTCPYSGAKINFEDLFINGLFQVEHIWPRSRTLDDSFRNKTLCRAQENKDKGDRIPSAFFAGRADDWAAAKERVWKMVGPKGMAPGKAKRFCAEAMPEGDFAARQLNDTGYAARQARAMLQRLWPDEGPTAPIKVQVVSGRVTAQLRKLWGLNHLLGDDGQKNRADHRHHAVDALAVACAHGGYAQQLSRFLQADDAYERGQGRKPSFEAERPWPTIREDAGAAIDKTVVSHRVVKKVSGSLHAETPFGYTEKEIVKNGKRLGLYVKRLPVQNLNLEVLKLGRPEDITRTAKFFVPDKGVRRALLAHLERAGGDPKRAYPPYPKVNSAAPGEIRSARVWTTRQRELMIEAANGFVDSENNHHMAIFRSADGKVTSRTVSLKDAMERLSRRQPVIRRDDEAGAFVFSLSPGDTIERPFNGKPTFWVITGIWASGQIEMVRHTDAIRDKTTKQQPTAGGLLREGARKISVDPIGRVRPASD

SEQ ID NO: 9086 - protein, 1072 aa, unidentified
  REGION 1..1072: note = Description of Unknown: Cas Enzyme sequence
MNKEKVVLGLDIGVGSIGWGLVKIREEEYYDKKPDGTIDKNHRIIGGKIIVTGVRTFQIPQDRQKKSLALQRGTARRSRKTTRRKAQRLKRLIELSKKFNLIDDNFERDATLKPKKGDKESIWDIWFIRKKALEQKLSDKELFRVLYHIAKHRGFYFHTKAEEMEKEDVKSEAGKVKAGLSRIRKKLEEGNYGTVGQMFCEELRQTNTNNKRKRNAKDKYENSIHRSLLKEEVEKIFEKQQKLGNSKASKELKKRYIDEILMYEEGIDENRLQKMMSHCEFTGGLCAPKEGYIAERFTLFNRLNTLALVDAQNKDRHLPLDDKQRDKIETLAYKNNKVTFAQIRKGLELEDKQHIRFNLCSYGEKNPEYNKKLICNIQKGQPDFEEKHKLQIVDINTGEITVLDEEIKEIFRKRKEAWKNAKKLYVYYSDIRKQLNIPDNFRFANFKGYTKSEAELGSKAKYIKQFEDDIFVELKGYHKIKNAIEKLCGDNKWDKLAADTNKLDIIAEALVYHKSDKTRTEYLKEKGIVDEEVINAVLTINMKQLANHSKKAIEKLLENMEKGDLFNEAKEKSGFGKFEYEKQEILKPYSGFFENNPAVARVISQTRKVINAVVRKYKSQYQIEQIHIEVATELASSKERKNEIAWGQKRYKEAKEAAAERCREAGLDPEEGQNLLMFRLEGEQNQFCPYTNMKITLQPTGAANEVYIKDCEIDHIIPMSRSFNDSLNNKILCTQQANQNKRDRIPYEWFEETYGKESKEWVEYENRVKKMYSVPYSKRRNLIRKSWTEKDKERFLSRNLNDTRYAEKEIADYLRKHFDFSRSRRDDINSLSRIQVRSGGVTAFMRHMWGLTKDRGANDLHHAVDALVTACSTDGHVYLVSNLAKEIERKGKSWFKQFNFLREKFKPWVNIRDDIQDAVNKIFVSRMPRHTVTGAAHEETIISGEKRDKNRMIEVRGGYAKMGDIVRADVFEDGKGKNYVVPIYSIDIFSNKALPDKYIAKADVPYDEWPSVKRNSIKFKFSLFKDDLISLDGKMYYIAHIRGTRPIFVVKNVDGSVFEKNKKKIEMAYKNV

SEQ ID NO: 9087 - protein, 1065 aa, unidentified
  REGION 1..1065: note = Description of Unknown: Cas Enzyme sequence
MSRVLGLDLGPNSIGWAIVDEAEGSIIDAGVRVFPEGLENFDTAKEKSLNEQRRMKRGARRQTARRSQRKARLRAALIEAGLFPPDLDEQNRLLAMDPYALRARALDERLWPHELGRALLHLNQHRGFQSNRKKDRDDKDVKGMLAEINELAADMDRTGARTLGEYLFRKVEALDHTDRAEDDHIRNRHTHRTMLAEEFEAIWNAQKRYHPDLLTDRLCYGRLGRQTYPCKPIARHEDRRKGLTDLEAFGIHGSVFFQRPMYWPTSAVGPCELEPKKKRCPRAHRLAQRFALLQNVNNLRYLDPETGAECALDDGYRQMLLEYLSRREKATFNAIRKKLGFDETVRFNLERGKNPSMRGHVTDWTLAKAAGKEWDALVEDDKTAIVELLLDVETNDEAALEMLTGEHGLSDEQARALLKKDLPSGYIHLSLTALKKLLPHMERGLLYMAEDETNSAMHAAGYLRPDQLQRRIFDRLPDPRRTRDCPIADIGNPVVKRTLVELRKVVNGVIRRYGKPDAIHVEMARSMQMGEQARARYNRRNRQRQAQRDAAAERIRELGVKVTRHAIARYLLWESQNSECMYCGQKIGLRQLFGGEADVDHILPQSLWPDNSQTNKVVCHRKCNADKGQRTPYEWLEEAAYERLCTQARSLLRKGMISYRKCQRLAQKHVEAGTFTARQLVDTGYIARLAVQYLHCLSEHKHDVLGLKGQYTAELRHQWGLGTILAELPDSPAWQEDSTLRDGQKNRADHRHHAVDAIILALTNRARIYQLGKVARTGRADPQTGEYLGLPEPWDDFRADVRRRVEAINVSHRARRKVRGALHEETFYRAATDHNGRPVEGRYVVRKKLEDLSAKEVDDIRDAGIRRIVKQRLAEAGIATGRGKSFNRVDFKAAVSNLCMPSGVPIKRVRVYRDDLTIQPIRQGTAAQVHVKPGSTHHLCLFRWTENGKHKGGADFVTLLKAARRRKRKEPIIQRTPSPDHPTIPPDAQFVMSLSKGEMVLADWNGTEKLLVFKTAASTQGQIYFAEHTDARRSSQQAKYVANANTLRARKVTVTPLGRIRWAND

SEQ ID NO: 9088 - protein, 1056 aa, unidentified
  REGION 1..1056: note = Description of Unknown: Cas Enzyme sequence
MAAGEEGSGGQSLTLGLDLGPTSIGWALIDEGREQVIATGVRVFPEGVDRDTAGGEKSKSQTRREKRGIRRQIQRRARRLRILRGALAEAGLLPTDAAEQDLALRDDPYPLRRRALDERLEPYQIGRVFYHLAQRRGFLSNRKSDRAKDSDSGVVKEGIAALQASMGDEHSRTLGEYLAGLAAEDERVRGRYTHRDMYQAEFDAIWEAQRAHHPALFTDEVKYGSQGPKTYPDDPDRQRQRATESHLQRYGLHGIIFFQRRVYWPASVIGRCELERGQKRCQRADRLAQRFRILQDVNNLRYRDPLTGAEQQLTDVQRQALLDYLMAGRARSFDHIRKHLAKSGLPVDARFNLERGGKSQMKGHATDAAIASKKCLGKAKWQAVDEDTRDEIVTALTDERLTDQEMLELLERDCGCSAEDAEALLHANLPDGHMSLSRLAIEKLIPFMEQGMQLMGTDATNSALYAAGYLPLLVEEGDHTHLGPVPSGITNPIVRQGLHETRKVVNAILRRYGPPDQIRVELAREAKKSFAERDKILRDNRQRNREREEAAERLRDDIGIEQPKRNDILKYRLWQEAGGICVYCGQAIGAAQLKSGEANVDHILPRWRSLDDSYMNKVVCHRHCNEDKGDRTPREWLEDSDPARYQQVIALARRLPYAKQGRFSQRDLVLDDFVGRHLTDTAYISRQVKDYMQTLGVRVACSRGTISAQLRRFWGLNTILYPEGQGQKTREDHRHHAVDAAVVALATPSRLQRLAKVRGGQRNDDIEPPWASLRADLADSIAAINVSHKPRRRLSGALHEETFYGPTQKRPDDQRQPVEKRPWAKDWQEGEHLFVRRKPVSEIKNAKHLTAVRDRAIRDCLAAHLRAQGVDPHDSKPYPKGVFEGEHEPSMPSGIPIRKVRLVEHLTTARAASDSRSFQHVQPGSNHHICYYETTDKRGKPKWVAKVTTMWDAALRVRRDGLPPVDTSDCELGRFVMSLSIGESFTIRGDEGQEQLLVVRKIRQLDGLLYYREHTDARKAADLNADKLYISCDRLRGLQARKVTVDALGRMRRSGD

SEQ ID NO: 9089 - protein, 1208 aa, unidentified
  REGION 1..1208: note = Description of Unknown: Cas Enzyme sequence
MKQNDQDRVTAGKTSDGASKGSNSDRANTIWAFDLGKGSIGEAVRQDDRFLHKASLLIPGDFAETKTAAVRRRMWRTRLAHKAREHWLDEVMKKAGLEPLSGRRVGKVEENGKTKWRQTAKGDYRLEREFPPGEWGKDKEGKPKRRVYPDGKARDGAPAQTQKDFTTCYNSALLRIKLLRGEPLEPWQIYKALHSAVQKRGYGTVPWAARELKRTGRTGQESEQEMAKKDPEYKAAVEAWAKFKKEFPDPRFHFPCYYDAARMGLWQPDRFQERINCRAQSTRKVRFDRADVENEIAALARQAAQQRPQIQTAFEAIKAHDWRQRDRHFPVAAKDFGEFLVHGPAGAPPREANEDFGRYLSFRKEHDIRPGSADDWMGATAQKVPRFDNRIINDCALLDGLQVCNVGIKYDSKNKRPYPDSLLASEVTCLMKLKNTLVRQANGQRKLTAEEIRTIFNKLTTDALTVAPDSKDWADKVAERYALTKTAWGSKKGIKDLGLRPLVGHEIIKAPKAEGRSRFSRPALRLIRALILSGQRPGEFRRRLLAREQSLLDEIGMDVRDAAPTRETDGVKNFIKQSRPWILVKHLKFLEDLERANDTWEDLHIPEQRLDALAARHTDDAGALDKQAAIRELIGSINDPVVRHRLGVFTQRLEALHQAHGVPASIVLEFVREDFMGEQARRDLQKFQSDREKSRKEAKEKAAELGAGEKSASLKYELCKAQGGICLYCGQALAMTELADYEIEHIVPRSKGGPDAMVNYVLAHKECNDQKDEQTPFQWKHGKEGWNGYETIVKQRAVALRNKKVQLLLREDAPELVQRYTALAETAWISKLAQTIISIHFGWQNGIDCLAKNPVKRVLVISGGLTARIRRKYRLNSLLNPPPPGTSDLNEWEANAEKNRDDDRHHALDAMVISFLPAWARDAHKERFFRFPEPIHKNAKAFFEKEINQVMPHTIAYEKAGLAETIYGARADKSGMVIVQRVALRDLAMKPITPGKMKFDLDYLREQIKAIRDDTIATVVADFAETEPDETGWVDFCARFQLPQHDGSTGARVFNVSVKVGAPTEYREMSKDGTGAWRKGLGSHKGQIIFWDKNGVLGVRPVFAHGSVAKERQFVADIGGKAKFYGFFQSDCAVRTTREIPAEGYKLVVRNEAKQKRRISADKPLPPCELTLRTIITKDFIAELTLADNQRVVASLDVWVGAGLTRIT

SEQ ID NO: 9090 - protein, 1077 aa, unidentified
  REGION 1..1077: note = Description of Unknown: Cas Enzyme sequence
MKDQSIELAFDVGHSSIGWSVLEAPGMSPGAAILGCGAVVFRADDCLVSARRSYRRQRRHIRSTRQRIARMKVLLAHLGALKEAQLDQPGCAWPWQLAARVLRGGKLLSWPELWDVLRWYAHNRGYDGNRRWTAGEADAADEDTEKEENARSLMEKHGVDTMAEAFCAMSGIDPLGKKRSTNLPGDKRPKGQNAAFPRSTVEGEVRRVLRAHFGKLARVDADLERVLLGRDSQDSEAWRAILCPGLKVPKRYKGALLFGQLVPRFDNRIILECPISGEKVPSRNCVEFLNFRWGMQLANVRVARFGERELSPLTVLERKQLDALMREQGGMGVEEFKKQARRVSGAIRDNLEAMLMHPDAKEGLLLDPVQKLVQSPELKGFWALLPERLRKRARGQWRRGRAISLARLREQLEELGGDPGVFDAEITRQLDSINTRGRKKDKPTTREDLLSKPFAIRRLDQRAAFARHLLKLAFEEVMAGKHPKEPGGCLFMSEEQRRAQSARAIAEQTNNHLVRHRLLILERLLGDMVREYAGGQKGRVTKVTIEVNRDLREMSGMTAKQKAQDMGLRIAQHHHVAEKLEEDNSLTRILEKRGARITAGLIRKARVADDLGWTCPYTGQRFEPVDLVTKRVDTDHIVPRAERASDSLDSLAVTFSAVNRWKGKRTAWQFVAQEQGKAVPDMPNLSIMSLSRYKGFVEGLDAYRGHEDDKRRKRKRKELMLLPSYEEKEFTPRDLTQTSQLVRLGAQALRRNLPHLRESDVVSLPGSVTGTVRRAWRVLGCLSLAAPGALDEQGQVRTKDEIRDITHLHHALDACVLALASRFIPRNGRVWELIVKRRWTPAQEKELLALGIFGRDSEGRLQVKDLEKGLKEEIGRRLAEKRVVQHVPARMDGLRVEQNTWRVVAVSAGEAKLRQRIRQPDGSRPLKEALEKPAKLLGLAPTVGEGKLRANKGALVMPDNFGVALVEPEPVIIPFHKVWPRLRELKSVNGGKPPRVLRNGQIVRVRGGKNFKGVWRVFSIKNNASGLALDIGAPDVVRLRNRTEGHKINVRLATLLRDGMEVIRTPLTGVPVENSDS

SEQ ID NO: 9091 - protein, 1127 aa, unidentified
  REGION 1..1127: note = Description of Unknown: Cas Enzyme sequence
MSGALRRKLTKNSRAIAAQVHWYTFTPQSFLGQGGVMSSATEAQQKYVLGIDLGSASLGWGLIALDGADSPTGVLRAGVRIFEPGVDGTALDIQEGKDKSKAVERRTARLHRRQLRRRAYRQGKLFRLLQEHGLLPRSESSGSLTPSEERNAVLTAFDSQLCKKWRASFPASDFAQLPLYQLRKTALDDKLEPHELGRVLYHLSQRRGFKSNRKEGRKESEKELGAVKKGIAELATRIESTGSRTLGEFFAGLNPHQTGQNVRRLWTARKMYEDEFSEIWKKQATYYPDILNERLHSDVSRLLFFQRPIAAQSHLIGKCELEGNNHRRAAWATLEAQQFRILQKVNDLRIVCPGNPIAKPLTPDQRKMIFDLLDREGDQTFANLRKQLKLDKKSEFNLERGDEKRLRGNRTKKAMLSVFREHWNVFSGEEQKQVVDDWRTSESEESLVRRGLEHWGLDEIAAQRWAATTPEDGYCALSRKAINRLLPLMFDGMSFKEAETAVYGNRFSGGRALDKLPPLHVHRKLSSSAEADKMLGTLRLGAVRNPAVERALTELRKVVNAIVREHGKPYEIRIELARELKKPRKERKMLTDKNRQRERERGKVKADLLRECGIRNPSRADIEKALLHAECGGICPYTGRPIALSNLFGESSQFDVEHIIPLSRYPDDSFQNKTLCWHEENRGIKRNRTPFEAYGTDPERWETMQTRIKAWRPGNPGKLKRFMLRDEEELGEFTARQMNDTRYASVLAGRLLETLYGGRDVQSSTGNRQMVFASSGAVTATLRRAWGLEHILREAAPSNNGQSKGKPRTDHRHHTIDAITIALTRQAVIQSMSRSASLDPRFQQDSRAFRKIESPWPNFVESIRPHIAGMIVSHRPEHKMTGALHDETNYGKPYHLNGKTVVHIRKPIAGLSPKDIENIVDPAVRLAVQRKADSFNGDLTKCESSGDWPLLQSNNGHSIPVKRVRMRKVLDVTAIASQERERFVSVTNSHHTAIFALIQEDREVEWEGIPVSLYEAMERKRLKQVVIDKNHPDGSPWRFKFSLMGGDTVELHRNCAHRDGKCIPEIYRIRTIAGNGQLCLVKITDARLIKEIKEAKDWWSPRADALRKLDCRKVSIDTLGRVHPAND

SEQ ID NO: 9092 - protein, 1046 aa, unidentified
  REGION 1..1046: note = Description of Unknown: Cas Enzyme sequence
VEILGCGVVTFRADDCLASARRGYRRQRRHIRSTRQRIVRMKILLAHLGVLKPEQLYLPGCAVAWLLAARVLRGGQLLTWPELWDVLRWYAHNRGYDGNRRWSAAEAEAEKEDTEKEENARTLMSKHGVKTMAETFCALSGLDPLGRKKSCHLAGDKRPKGQNAAFPRATVEAEVRRILKAHFGKLAKVDEQLERVLLGRDNQDATAWQAIPCPELKLPRRYQGALLFGQLVPRFDNRIISKCPISGEKVPSRNCPEFLNFRWAMQLANIRVARFGEKELSPLTAPERKQLDTLMRQQGGMGVEEFKKQVRNVTSAIRDNLETMLMHPDAKEALLLDPVQKLTQSAELKAFWPLLPERLQKRTRGQWRRGKSVTLAKWREQLGAETASFDAEVTRQLDAANVKGKKQNKQVSREDLLNKPFFVRKLDQRAAFARHILKQAFDEVMAGKHPKEEGGCLFVTEQMRQAQLQREIASQTNNHLVRHRLLILERLLGDIIKEYAAGDKTRLARLTIEVNRDLREMSGMTAKEKAQDLGKRIANHHHVAEALEKDESLMKLLQQQGTHISAGLIRKARVADDLGWMCPYTSQRFEPIDLVTKHVDKDHIVPRSDRASDSLDSLVITFSAVNKWKGKRTAWQFVQQEQGKTVPDLPNLSILSLTRYKQLVEGLETFKGHDDDKRRKKKRKDLLLLPNYEEKEFTPRDLTATSQLVRLGAMSLRKAFIGCEKQPVIVSLPGSVTGTVRKAWKLLGCLSLACPQVLDANGDVKKKDDIRDITHLHHALDACVLGLASHFIRNDGHVWELIVKRNPNEAEKKELMALGVFGFGPDGRFEMRDLDNRLKEQIRQRLAEKRVVQHIPARMDGLRVEQNTWRVLGTKEGDVTLRQRIRQADGSRPEKQTEDKPGKLLGLNPIDRNGKLAAHKGVLIIPDNYGVALDPEPAVIPFHKVWPRLQEVKKTNHGKTPRIIRNGQIVRVPGGKNFKGVWKVFSAKNNASGMALDIGSPDVVRLKNKTEGHKINVRLATLIKDGLQIVKTPLTGIAACPTTSSA

SEQ ID NO: 9093 - protein, 1098 aa, unidentified
  REGION 1..1098: note = Description of Unknown: Cas Enzyme sequence
MKDKEKFLPASGRSGPGPDLQLAFDVGHSSIGWAVLQAAAPGSTQTPGPSINILGCGVVTFRADDCLASARRGYRRQRRHIRSTRQRIARMKILLAHLGVLTPKQLDLPGCAWPWLLAARVLRGGKLLAWPELWDVLRWYAHNRGYDGNRRWSAVEAEPEKEDTEKEENARTLMGKYGVKTMAETFCAVSGLDPLGSKKSCHLPGDKRPKGQNAAFPRATVESEVRCILKAHFGRLAKVDESLERVLLGRDNQDATAWQAIPCPELKLPKRYQGALLFGQLVPRFDNRIISKCPISGEKVPSRNCPEFLNFRWAMQLANIRVARFGEKDLSPLTVPERKQLDSLMRQQGGMGVEEFKKQVRQITSAIRDNLETMFMHPDAKEALLLDPIQKLTQSADLKSFWNLLPERLQKRTRGQWRRGKSITLGRLREQLGPDTAAFETEVTRQIDSANVKGRNKGKQISREDLLNKLFSVRKLDQRAAFARHILKQAFDEVMAGKHPKEEGGCLFVTEQMRQAQLQRTIAQQTNNHLVRHRLLILERLLADIIKEYAAGDKTRIARLTIEVNRDLREMSGMTAKQKAQDLGLRIANHHHVAEALEKDESLMKLLQQQGTHISAGLIRKARVADDLGWMCPYTSQRFEPVDLVTKRVDKDHIVPRSDRASDSLDSLVITFSAINKWKGKRTAWQFVEQEQGKPVPDLPNLSILSLTRYKQLVEGLETFKGHDDDKRRKKKRKDLLLLPNYEEKEFTPRDLTTTSQLVRLGALSLRKAFIGCENQPVIVSLPGSVTGTVRKAWKLLGCLSLACPQVLGENGEVKKKDDIRDITHLHHALDACVLGLASHFIPNNGRVWELIVKRNPNDSEKRELMALGVFGFGLEGRFEMRDLDNRLKEQIRQRLAEKRVVQHIPASMDGLRVEQNTWRVVGVKEGEATLRQRIRAADGSRPQKPDAFEKTTKLIGLSPINGHGKLSANKGALIIPDNFGIALTEPEAVIIPFHKVWPRLTDLKKVNGGKVPVVLRNGQIIRVSNGKNFKGVWRVFSSKNNATGIALDIGFPDVVRLKNKTDGHKINVRLATLIKDGMEVLKTPLTGIASCPTTSSA

SEQ ID NO: 9094 - protein, 955 aa, unidentified
  REGION 1..955: note = Description of Unknown: Cas Enzyme sequence
FVNQLDSNIIASDWFKTKRAANNIGEIDQVMPYLLRAAALDEPLEPYYLGRALSHLGQRRGFLSNRKKPMKKGEDEGVVKESIADLRQKIQESGARTLGEYFLHLNPFERRIRQRWTHRDMYEGEFEKIWEAQAAHHPVLLTPERKKELKRAIFYQRPLRFPRELVGHCELEPEEIRAPRHYFIAQRFRLLQSLNNLRVAMPGEPERDLTQEERTILDSELELQGDRTFGQIRKLLGLKRATFNLESGGEKLLRGNRTTAQFCKVFGERWLEMSAVEHEQALQDVRSIVKDETRLSRGSKHWKLDPEHSRQFAAISLEPDYFNLSRKAMERLLPLLETGVSYATARRQLYPERFQAREPVPLLPPVHDAFEYVRNPAVERSLTELRKVVNALVRQYGKPAQIRVELARDLRKSRKEREANWKKNRDIEKSRKDMAERITAEAGLTNPSREDIRKALLAKECGWVCPYTGRAISMRALVGPDAQFDIEHIIPFSQSLDNSFFNVTLCYHEENRNRKRNQTPYGAYGNEPEKYQEILDRVRRFDSDLADEKLKRFQLKDTADILQGFVDRQLNDTRYASTMAGDYLGFLYGGKIDCQKNLRVRATTGQVTAYLRDEWMLNRILRDGPTEQGGKVAKSREDHRHHAVDAIAIALTDESTIQQLSRAAQQAPQLGRRRFAPVQAPWPDFVDSVRAEIGRVVVSHRPSRKVSGALHEETLYSKSMPVPDSQKSQEKAARVRKPLERLSKSEVEDIADLTVREMVQKRLAELGGDPKKFSIAANLPFFKTADGREIPIKSARVIKKTPTFSLGMGCRMRNVTSESNHHLEIFAELDEHGEEVEWEGVVVPLAEAYKRLLAEIPIVQRDFGVRRQFKFSLAAGDVIQCDDEHGGRRLLVVRGTSIEGGKTGRVALVPINDARKKNEIVASKDYFRFPLEKLRKLHTCKVSLSPLGDLGTAND

SEQ ID NO: 9095 - protein, 1105 aa, unidentified
  REGION 1..1105: note = Description of Unknown: Cas Enzyme sequence
MNKEKVILGLDIGVGSIGWSLVKIREEEYSDEKPEGTIEKKHRIIGGEIIGTGVRTFQIPQDRQKKSLALIRGSARRSRWTTRRKAHRLKRLIQLVKEFKLIEDFDRDAIFKPKQGDNESNWDIWTIRKEALERKLTDVELFRVLYHIAKHRGFYFHTKAEEIQEEDKKSEAGRKKAKVKEGLWRIRSKLEKGHWKTVGQMFCEEYKQTGKENKRKRNAENKYGKSIHRSLLKEEIEKIFKEQQKMGNSKAKKELKNRYIDEILMKEEGIDDEKLQKMMKGCEFVPGAKCAPKESYTAERFTLFSRLNTLAMVDTKNKDKRLALDDEQRGKIQRLSYEKAKVTFAQIRSELGLQDDLGLRFNLCSYKEKDPEYNKKLICEIRKGRLRFGERHRVRIVDINTGEVKVLDEEIQSIFKSKELWPNSKNMRIYYSDIRKQLNLSGDFRFADLKGYTKSEAELGSKAKYIKQFEDDTFVELKGYHKIKNAIERHCGDNRWAKLAEDENKLDIIAEALVYHKSDETRTKYLKENGVVDEDVINAILKINMKELANHSKEALSNVLKYMGSKDRMLFNDAKKKCGYGRADYDKQAILQPYSGFFENNPAVARVISQTRKLINAILRKYKDNHPIDQIHIELATELANSEKRKSQISEGQRRYKEAKEAATERCREFDLDPEEGQNLLMFRLAEEQRQLCPYSGKHITFKPSGASNEVYIQDCEIDHIIPMSRSFNDSLNNKVLCTQKANQDKRDRIPFEWFEDIYGKESEQWRDFENTVKKMYGMPYPKRKNLLKKSWTEKDKERFLSRNLNDTRYAARHIADYLRKYFDFSLSEREDIKEVSRVKVRSGNITAFLRYIWGLHKDREENDLHHALDALVVACSTDGHVYLVSNLSKEIERKGKNWFKHFNFLRDRFKPWSSIRDDIQEAVNNIFVSRMPRHTVTGAGHEETIISGEGRDKNRTIEVRGGYAKMGDMVRADVFVDEAGKNYVVPIYSVDIFSKKPLPDKYIEKADAPYDEWPSVKDDKLEFRFSLFKDDLISIDGQMYYIDHIRGTRPLIRVKNIDGSVFESNNKERELGYRNVRLKKYSVDILGRYKEVKQEKRLGGRFNR

SEQ ID NO: 9096 - protein, 1046 aa, unidentified
  REGION 1..1046: note = Description of Unknown: Cas Enzyme sequence
MSPNEREKPYVLGLDLGVQSIGWAILDMDEDDEPCSVRSTGVRCFDSGVGSEKEIEMGKDESGNLKRRETRQHRRQLWRRSRRQAKLFRMLQRHGLFPEGPAGTPADRHALLVKLDGELAEDHKINDDRIQAHLLPYLLRRKALDQKLDLHAFGRAIYHLGQRRGFLSNRKARKDEKEEGVVKEGIAHLEQEMAEAKARTLGEFLAGIDPEEHRIRSRWTGRNMYLHEFEQMWAAQAARHDSLTDKMKQDIHEAIFHQRPLKSQKHLIGKCQFEPSQRRAPMASVLAQRFRYLQRINDLEIIAPDGEILQPDAEQRELLLAALDAQAEMTFAGMRRVLKLTKPKGYTFNFETNGEKKLVGNRTAAKLGKALDGNWDNLSDQDREDLVDDLLEYENRDALILRMGDRYGIPAEAAGVAAEVSLEAGYCSLSLAALRKLLPPMEAGQHYATASKQIYGQRDDEEALSALPPVLEAVDSLRNPVVCRALSELRKVVNALIRKYGKPHTVRIELARDMKRSRRAREEVSKRMRQNEKAREEAKKILAEMGNDSPSRTDVLKILLADECNWECPYTGKQITPQSLLGESPQFDIEHILPFSRSLDNSYTNKTLCYHQENRDVKGNQTPREAYEGNDDKWREIIARVHRFRGIMSVAKLKRFQRKEIPDDFVLRQLNDTRYMSRLAAEYMSLLFSGTTGKRSDDQGKLRVQVSSGSATAYLRDQWGMNSILGDGPRKDRSDHRHHAIDAVAIAMTDPKTVKQLTRWAIEAERLGRRLFVQGEEPWDGFLDEVRASIEEVKISYRVNRRISGALHQETLYSKEHMHDNGSGKKTGYRHVRKPLQNMSAGEIDNIVDTHIRQLVQEKLKAGGGNPKKVFADINNHPYLRTRDGSRIIPIHKARFRKTVATIAIGKGNGRRYVAPGSNHHMEIFATTDVRGNKKWQGEIVSMYDAAQRLRQGLPVVDTEREGFQFSLSGGEDVEMEHEAGEPRLYRVVGISVGRVEFRTHTDARSGTELKKTKGARVFRSPGKLLTAKARKVAIDPIGNALPAND

SEQ ID NO: 9097 - protein, 1055 aa, unidentified
  REGION 1..1055: note = Description of Unknown: Cas Enzyme sequence
MLAGEEGSQHQSLTLGLDLGPTSIGWALIDEGREQVIATGVRVFPEGVDRDTAGGEKSKSQNRREKRGLRRQIQRRARRLRILRQALAEVGLLPSDPAEQDIVLRDDPYPLRMRALDDRLEPYQLGRVFYHLAQRRGFLSNRKSDRAKGSDAGVVKEGIAELQTSIGDTDSRTLGEYLARIAADGEKLRGRYTHRDMYQAEFEAVLEAQREHHPALLTDQIKYGSQGHKVYPEDPDRHRKRASETHLQRYGLHGIIFFQRRVYWPASVIGRCELERGQKRCQRADRLAQRFRILQDVNNLRYRDPLTGAEQQFTDVQRQTLVDYLMAARTRKFDQIRKHLAKSGLPVDARFNLERSGTAQLKGHETDAAIASKKCLGKAKWQAVDEDTRDDIVSILTDERLSDQEMLELLERDCGCTAEDAELLLHANLPDGHMSLSRLAIEKLLPFMEQGMQLMGTDASNSALYAAGYLPLAVEEDDSEHLGPVPSGITNPIVRQALFETRKVINAILRSYGPPDQIRVELAREAKKSFVERDRILRDNRQRSREREQAAERLRDDIGFEQPKRSDILRYLLWQEAGGICVYCGQAIGAAQLKSGDANVDHILPRWRSLDDSYMNKVLCHRHCNEDKGDRTPREWLEDSDPARYQQVIALARRLPDSKLGRFSQRDLVLDDFVGRHLTDTAYISRQVRDYLQTLGVPVACSRGTISAQLRRFWGLNTILYPEGQGQKTREDHRHHAVDAAVVALATPSRLQRLARVRGGQRNDDIEPPWAALRADLADSIAGINVSHKPRRRLSGALHEETFFGPTQKRPEEQRLPAEERPWAREWQEDESLFARRKPVSEIKNAKHLAAVRDRAIRDCLAAHLRAQGVDPDDTKPYPKGVFEGDKLPKMPSGVPIRNVRMVERLTTARPASASRGFQFVQPGSNHHVCYYETTDKRGRPKWQARVTTMWDAVLRVRRDGLPPVDTSDCELGRFVMSLSIGESFTIRGEDGRELLCVVRKIDGTGRLHYRMHTDARKAGDLSKENLYYSPENLRVLEARKVTVGPLGLIRRSGD

SEQ ID NO: 9098 - protein, 958 aa, unidentified
  REGION 1..958: note = Description of Unknown: Cas Enzyme sequence
MPLSLSFDIGHSSIGWAVLQDKQESAPNHPDIIATGVVTFPADDCLASQRRDRRRTRRHIRSTRQRIERLKRWLAHRKVLTTEELNRPGHPAPFLLAAAALNGVRKLSALELWHVLRWYAHNRGYDGNSRWSRQDADSSEDAEKVKAAKEQLNKFGTTTMAETVCKLLDINPLQPDRRISSHLPYKTLNTAYPRSIISAEVERILDLHQGVIEGLDNVTRSVISAERELSKDETQLLRAANVKLPKRYHGGLLFGQLVPRFDNRIISRCPITWASIYQANTEEKGDREARRLAECDSKVPAKKSIEFLEYRLARILANLKTDGAPISSECRKTIFERAQDQGRLTHKQIESIIASHHPHGTTNVHAYFQLHPDAEDALVLHPAVHELQKAKGSRAKLSPFWKHLPESAEAEAVAIWRAGKPVTIEWIREKTKGSDNEAALAATIESAFKKSTKEFADVDDFCQRTTASADWPSGRAPFARPVLKQVKAEVLAGHDPTKASKETDPQNGESKPSDGILYEYSVPGSPTNKLLQKRPLEKLTNNPLVRHRLLILERLVEDIVAEFCHGDEQAIKAITVEVARELKEFSGKTAKEIASELSGRHRDFKSAVDHLAKHAPDLPVTGGLIRKCRIAQDLNWICPFTGQTYDPLDLPRMELEHIIPFSKRKTNALHALVLTFPEVNRWKGNRTARQFILDEAGKPVPQRGGLSILTEKRFLDLVGKLNTKGHPDDQKRKRVRKDLLLVTTFDEKDQGFTPGALTQSSHLIKLAMRSLRARLPHAQLYSIPGIATGEIRKSWNLLGALGHPDVCGRDAMRWSEVRDRETGALVTEGYENLVALKRAPSIEKKRNGQIKKIPHPESFPCPNDECEVPLMWPEDDKTSKAHCPGCQCILRSSPKPKDEIRALTHHHHALDALTIGLIAHYFPLTKFGQNQSGLIWQALITRNPNEEQQQLLRMTGMF

SEQ ID NO: 9099 - protein, 1042 aa, unidentified
  REGION 1..1042: note = Description of Unknown: Cas Enzyme sequence
MSLTLGLDLGPTSIGWALVDESRQEILGAGVRVFPEGVDRDQQGGEKSKHQSRRVARGMRRQIRRRAKRLRLLRDALVSVGMLPPDPDELNRVLAKDPYELRRRALDDRLTPYELGRVILHLGQRRGFLSNRKTDRSREKETKGMLAEMTALETEIGNSESRTLGEYLAGLNASFDHATATEDDRMRRRHTRRHMHLKEFDAIWAAQRAYYPGLLSDNLRYGRAGPEEYPKKPSLCPKDSTWLSEFGLQGILFFQRKMYWPRSVVGRCELEPREKRCPRADRAAQKFRILQEVNNLRLLDLATRKERKLGDQERARLVDYLMGTKEATFDQIRKKLELADTVRFNLERAERKKLKGHETDAALRGRKILGKQYDSLPEEVRDRIVDILVREDMPERAVARLISDCGLTNDQAVRAAGVNLPDGHMSFSRLAIGKLLPHLERGLLLMADDATNSALHAGGYLRPDERAIRQRRFLPPPPDLTNPIVRQGTFEVRKVVNAILRELVYPRGQGLTTIHVELAREAKKSFDERREIRFEQAARRKSREEAEVWLEGFGEKATRAKVNRHLLWQEQQEYCPYCAQKISTAQLLGGEADVDHILPRWRSLDNCMANKVVAHRKCNDEKGDRTPREWLEAQSPERYEQTLALIQRVGLPYGKQRKFQQRDIQLDEFVERQLRDTAYISRCVSGYLQCLGARVVCPRGQMTAELRHYWGLNNILDDTGRGRKIRHDHRHHAVDAVALAMTNRQRLHALANARGENVRPPWETFWREAAEVIRAISVSHRARRGIVGKLHEDTYYGPTQKLPGGVSDTESRSWAKEWVEREGTFVCRRPLSKLTTSRQLQKVRDPAIRRILQEHLRAQGVDPHAPEKLPKNAFVGERTPRMPSGVPIKRVRMLEESNTFRPVARNRPFQCVQPGSNHHVVYRAVRSGAKEQWECEVTTMYDAAQRAKAGEHLVDRADGAKGRFLFSLSIGEMFEIDSDSGDRLRCVVHKIKQDGRLYYKHHTDARKDSEREELYLSTRQMQRRNARKVTVDAIGRVRRARD

SEQ ID NO: 9100 - protein, 1472 aa, unidentified
  REGION 1..1472: note = Description of Unknown: Cas Enzyme sequence
MNGKGKVLPRRPDLELAFDVGHSSIGWAVMQTCSQANPGADGPDRDSLPVSVLGCGVVTFPPNDCLASERRKNRRQRRHVRATRQRIERIALVLLAVLRDDDNQGAHELVRELRMYFMGPNRAQLTKEGTKRNEAHPWLLAARVLAASTEEEKAKARLTWPQMWDVLRWYAHNRGYDGNIRWSGDFRVEAFSETPLARRKELDDQAESLEGDDPEDDKKKIQAAAARMEDYGFTTPTFAETVAKFLLGPDRTVRSGGEGKPGLVEPTAAAFTETEFRRLLFDCDPGFENRPRHLRNYFKGVRAAFPRRVIKDLGGKATLVGGTEWEVRYIIRAHLGKLPGCEITGGQGISDLERVVCGGLPEAVSDWSALKPRFPRLYLSEQDAEALARFRVPKQLPRREKQKVIGERRRILEGKLALPARYHGGVVFGQLVPRFDNRIIEQCPITFSEIFRGVLDKDERALEPYHVSPAKIAASRRVAGGETESDATLARRWAAKLAKVPAKNCLEFLEFRWGMILANVRVGLQGEIYRDPEGKETSLRPLKAEERLSIDTEARKRGFLKAEPDKTGKDGCVRRGRNELLEIVVSQTGCNRHNLESLLLVPDMREALRILPVEGDARAKEAFQIAWSAFGPPGHDQDTGKYRDDPLRRRFSAQLMRGSKDSLRRLSLSTILSQLQRPDVVNRHAAAPETAAKIEQAARKAASDKRGLLDKEKLAGLMNAPFHCERLTGRARFGRKKLREAVQQIMHKDKPMHPFEKGGCLEQTDAIKGAALQRPLAHLTNSHLVRHRLLILAGDPHARPPKRGLLDDIISAKEFAGGDKGRIVRITIELARDLQTMSGMNNKAKARELSARHEGHDRVSQELTEKLAGVTDDKGRPVEITARLINKARIADDLGWVCPYTRQIIEPADLVRINPRQLATHAAEKDHIIPRTSRLSDALEAQVITLSEVNGMKKARTALEFVKECRGGPVDGLPNLHVRTESQFREFVNSLWPRSDPFVRARAGGKKVSDDEARCWRRKQLLLTEKWEEREFTPADLAKTRHLVKLAAQQLEAAFCGLPKERRPPVICINGAVTAAFRDKTWKLIRELSAVHAGVKQAADGEAEARKRGQDYNLKKEIRGITNLHHALDAVALGLITSCLVPPGHASLNNELVRFIIKTRLSAEERRRFEELRHQLGLPKFYRWSAGRCDDPEARRPAAGAGGIICINDLPRTLKSQIHERLQEVRVVQHVPADQGSLDTDETLYRVFDPLDGHPNSQRLRRWFETLLASGELTTLRKLPDPNDSSETRVLLVSRKRRSSAEDSGRVLHDTGHQWRWRYMLVAKDAVQGLAQNGKLSALKAAKPLGKNFGVIQISRPSQKPEFHIIRPCRAYAQLKEFREANPGAQISLIRPGSLIDLAGPDGTVTRLRIFGSGERPGRGVYFDAAPRDALERAKPEVPIGAFEKGRARLVRCSLVGIPATPVASRPSADSA

SEQ ID NO: 9101 - protein, 1058 aa, unidentified
  REGION 1..1058: note = Description of Unknown: Cas Enzyme sequence
MAERSDAEFVLGIDLGTNSVGWSIIGLVDGEPASLIRAGVRVFDAGMEGDIQSGQEQSKNLKRREARLHRRQLWRRARRLTKTFNLLRKFGLLPSGDASTPKERQDLINELDQTIRNSAWFPAKASSGAYPEPQQRLPYILRAAALDEPLEPHFLGRAFFHLAQRRGFLSNRIKSAKKNDDEGAVKKGISELRQAIQETDARTLGEYFAHVSPTERRIRGRWTARSMYEDEFEKIWAAQGPHQPTLLTDERKKELRQALFFQRPLWLDPRVIGRCELEPEEHRAPAYSLLAQRFRLLQTVNNLRVLPPGQPERDPSADERKNLIDDLEAKGDQTFARIRKLPGFKKCEFNLERGGEKRLMGNRTSADFQAVFGDRWSKMSAEERDSAVEYVHAFQRPDKLADAASKKWGLGDEAAERLAGVSLEPDYMSLSRKAIKRLLPLLEEGVPYATARRQLYPERFEAGAPLPSLPPVEQALTEIRNPAVKRSLTELRKVVNGVIGACGKPVQVRLELARDLKKSKKQRQALTEAMRKNERERAAAAKRIISEAGVTAPKPDDIRKFLLAEECRWQCPYTGRSISMGALFGPESQFDIEHVIPFDRSLDNSFTNLTLCYHEENRNVKRGRTPFQAYHGAERYDQILDRVARFTGERRMVAAKLTRFKMNDEELEVFLEDFRNRQLNDTAYASSLAARYLGLLYGGLNDAAGNRCVQATAGQTTAYFRSLWKLNSILNDGPSTDGGRVAKSRADHRHHAVDAVVIGLTDAGMVKRLSDAAERAPREGRKRFAALEGPWPNFVDTIRAEIGRITASHRVSKKVSGALHEETIYSGPQSEGASHVRKALATLTKSEAEDIVDPQVRKMVQKRLAQLGVEDPKKAFADETKLPFFESRDGRHIPIKRVRVKKQVPTFVLGSGRIERHVTSESNHHVEIYAQLDGQGNVGAWDGEVVSMYEAYQRQKTRKPVVRRDHGPPVKFIFSLAPGELIECDGKSGGRSLFVVRKASRLSSGQLQIGFAPINDARKAKEMQTSRAWLWATPESLSHRHPCKVLASPLGEVSETHD

SEQ ID NO: 9102 - protein, 1068 aa, unidentified
  REGION 1..1068: note = Description of Unknown: Cas Enzyme sequence
MKDYVLKEKSELVSNEMVWAFDLGKGSIGEAVRRGNEFLHKASLLIPAEFAETRTARDRRRMFRTREAHKAREKWLCKVMHEAGIEILHGRNYDAVGNWKPGEPAEKRLEQEFPAPADDTCYTSCLLRIKLLRGEKLEPWQVFKAFHSAIQRRGYDKDIPWKTRESRNPKAKDGDDDDAGTEKRMHDFELALEKMAPGKTVFHFPAYFDAHVMGLWSPDKPDEFKLRSDCHAKTTRNQIVPRKLVEAEIRQMVEGAAKHYPALAGKADYLLYGIALQSYASYKPELRQKFKLREGGATDWQGVVGQKIPRFENRIIAKCALIPRLNVCKLREGEKGQPHDKSLAAVEVAFLMKLKNLRVQRPGGNGWLSAEEIRAILENPKRTDWKFTKSAWKKLCVTIGAIPLPGHEEIESPRFSGRSRFCRPALEVLKRLILSGKKPSEFLQEEIARLNGNKDPLKGLVEADLKFISDMAAKNDTWEGIYIPNQQLDALTELSNNSNEAITRLIGQQNDPIVRHRLSVFYKRLRDLEEATSSRPNQVVLEFVREDFMGKKAKLEYFSFIKRRAEERIKAREEAANAGATEKSAGLKLELLRAQDGRCLYTDEGLVPSKLDEYQIEHIVPRSKGGPDAVVNYVLTTQKTNEAKDDRTPYDWFHQEMPDKWDAYVNRVRARATHLRNKKVQLLIALNAAELADKYTALAETAWIAKLAQAIVGLHFGWRNGIDENGNKRVTVISGGLTGRIRRKYALNQILNPNAKTEEEAEKKNRDDDRHHALDAMVISFIPSWVRDAMKEKFFRFPEPIHQNAKGFFEKEIASVIPQSLCFEKSALAETIYGARGEGDDKVIVQRVELLKLAYTTVKQKQVFSPDYLGDQIKAVRDEHIQKLLAAFHATLPDEGAWKNFCEHFNLPHKDGSAGSRVLSVLMNVGQPNEYKDLSKDGTGSYRKALKGHKGQIVYVETSVDKKGETKETAQVRPVYAFESQAQVSKELAEKFGKKCRVIGFFQSGCLVEVDKPVAHIKLPLPPGKYRLNTILTDSKNVKVTTADGRTYPDIPRYNLGNMIAAGFKRAD

SEQ ID NO: 9103 - protein, 1017 aa, unidentified
  REGION 1..1017: note = Description of Unknown: Cas Enzyme sequence
MSTVEYMLKPSPANAVPFDWKNEPFYTTAVVLGIDIGLEGIGVWLRKGLAPIYARTFIFETPDAAPLENRRGLRAGRRCRQAEQRREVALQKFCADFGLPWVEITDKGHDGGPFRFRWIATREDADGLRDIRAFSACLRHIIKHRGYDWHAPEDGGEYPWGDEAKAKDAIEWAKTAFCRKEHADQLLYVLTDCGWNDKERKSFEPELNEAVVKYNTKGIDAVLAEHFSQPKNNLRFPARRHNFPREMVWAHLSAIVKRHPQFLGGADRVESALRQLHDIINEHRKEPGALALRKVNRCPLAGILFEGPAPKCESSKDRHIRRFKLLEFLATRTFVTKDGKRELANMEMFRWLLDDLLETDIRALASNGQIQRSRLAKDDFKKAFLAKHDPTGETKLARDNQSHNGEYFTQLIDLLWPKLSELGGRASLSGRSAEALFDYATKEGFDAAHMAALLKDKRFERGGKRMSFYEIRQTAAAGFGIYEQVEFLLGRWTKDAKPGDKPAVPGKLRQIFAQLIKDGILPPDKAAPDYVIVETIGDIPRNKEQAKEIQKEQTARREFKERLRERFKDFETGDMSREETNKRLLLYDQQRGMCPYTSAPLGDNPLAHDLEIDHVFPRSRGGISEMVNLVLTHRKTNGNKGERTPYEAFGGESNSLQWREIRDRVLKMQWNGQKREFFLRVESSPPDWANMTRMAQLARQLRFEVARWLEITDNDAELRRRVGTPTGYQTSVCRGAWSDKLPEDFSPKKNRNNLRHHLWDAAILSHIPPGNGLNHVRCHGIFWNETDHSGDIKMLALPGLGPDLKKFEEETRGQCLVEKIQPAHSKKSRFDQWVYSPPDQNGVMWARHPIDKLADDTNLLEQLRAAGIDEKQLPTSRFHEWQEKRQAQFFTREEALSAVESLALPPQHQIPSPIFEEWWSDRLKGDKRRITEKSLRALLAKARVPKALVTDQQLGGVLINRGNPGPLTRKDGTIIRGVRGPSKKKMTPMAVVPHRNRKGETIGFKLATESFIRAEIW

SEQ ID NO: 9104 - protein, 1003 aa, unidentified
  REGION 1..1003: note = Description of Unknown: Cas Enzyme sequence
MAEHENGEFVLGIDLGSNSLGWSIIGLVDGEPASVIRAGVRVFHAGVNVNPKSGKEETLNAQRREARSQRRQTWRRARRLTKTFNLLRKFGLLPSGDASTPIKRRDFVNKLDQAIRTSDWFQAKAISGAHPEPEQTLPYILRAAALDEPLEPHFFGRALYHLAQRRGFWSNRKTAAKKDDERGKVEEGIRTLRTEMKDKARTLGEYFTRVSPFDRRIRCRWTSRDMYQQEFKAIWAKQAECRADVFTDERKALLYRAIFDQRRMKIRRNLVGSCEFEPDERRAPMYLLVPQRFRLLQVVNNLKVHPFGGQERPLTKEERIKLISGLERCPGMKFKEVREHLGFSRRDSINLQRDKEEAKMPGNDTGAQFWRVFGERWFTFSEEEQDKIVADASSILSNRDAEERQRRAQKYLQRKGAENLEEAVRTFLEITFEAGYSNLSAVAMKRFVPLLKRGFPYGAISPHYRHFSDETVGELIELADDGVPHIDACDRVFTAPPQRHEPLDLLPPVQSDQTQRRIGVVRNPIVTRSLTELRKVVNSAIRTFGRPARIHIELLRELRKPKKVREKIWKESFSAERRNDEIRQEIQQGAKVVQPSPRDVEKHKLWKESGNICPYCLKGMSWANLFGDDSEYHVDHIIPWKRCLDDSFANKVLCHADCNQNKGDRTPYEAFNGDPDRYDRIIKCVAGFNADKDTLHEKVKRFEMGPKELEEFLAKRTAQQFNDSAYASRLAADYLGLLYGGRHDEQGNVRVQARSGGLTRYFREAWNLNSILGDGEHKNGGKTHKPRHDHRHHAVDGVVIAVTDQGMVQRLNNAAKRGWVGRPGRFGHFDEPWPGFRNELKKEVMEKLVVSHRVSKKVSGALHKDTNYSTKEFGQGVRRHRVLLTDLSEKDVLSDDVIADPGVRKLVRQRLAVLGGGEPKKLFAEDKNLPHFEATDGRRIPVKKVRINEIVKTRPIGKGDRTRFVKPGGNHHLEIFGLPGSDGRDKKWGAPRVVTMLEPEFVN

SEQ ID NO: 9105 - protein, 1201 aa, unidentified
  REGION 1..1201: note = Description of Unknown: Cas Enzyme sequence
MNATKKIESTKADLDLAFDVGHSSIGWAVLQSVGQATAQATNPFDINILGCGVVTFGADDCLASKRRDFRRQRRHARSTRQRIARMEKLLAHFKALTPEQIASKHKQAGGHPAPWLLAARILASNGEFLLGWPELWDVLRWYAHNRGYDGNARWANVSDDALAPAEQEEKRSDLEKEQNAIKLMNDYGKQTMAETVFADLFAEFGIAEPTKVKALPYLQKRFKGNQCAFPRKTVEAEVLRILQVHNFCDAKLIHLLVARKLSDEDRAFLTSIDIHLPKRFQGGLLFGQLVPRFENRIIAQCPITGAKVPGRHCHEFLEFRWAMTLANIRIGFGDEKYEEDANLRSLTAAERHKVDARVRRLGFLKIEPDKAGKDGVVRPGKNELRAIVIEETKCERHNLDTLLLHPDAKDGLKLLPIKGDTTAFRVAWSCFDDPQHDANGRYVDDQLRRRYTTQLLRGTKERPRKLTIQRILEDLERIKRSEIAARLRQTATREAQGKKAKPDSGKLYALFNAEFYCDKLNGRARYSRDMLNSAIQQVFDKIKPAHPLEKGGCLEQTEKIRREALEKPLDRQTNNHLVRHRLLILKRLHEHIVQDFAMGDKARISRVTVEVARDLQTMSGMNNKEKAKELTGKLKHHHKIAAHLAEELKDERDENGRPFVISPGLIRKARVADDLKWQCPYTGRIFGPPSLVHRLFDKDHVIPRSKRLSDALEALVITTREVNAEKKARTALQFVKEMNQSENLAKRDQLGIRTEAQFREFVDSLWPKSDPFRRARAGGARATDDEARCWRRKQLLLTETWEENEFTPADLTKTRQIVKLAAQQLEATFKDSPEMQKPAIISIPGAVTAAFRDKSWKLLPLLGNANPKVNNLHQQKIESEKCGRDFNFKKAVREVTHLHHALDAVSLGMITALLVPAGDAGHAGLNGDLARFIHKTKLTAEERSQFEVIRHKLGLPKFYRWAPSGYDSEKKQQSTASEGFTLRISELPDSVKRQISERLIEKRVVQHIPADMSGLKVEENTRGIVRIENGRVHLRQQKRDDKTGKLIHNPSDEVQNKLVGLPSDQASSKLKAVKGVRVINDNFGVAYLNQSDDPGSPFVIIPHHKVWHRLKELKIRNHGKRPIILRKGDIIEFKKGDQLLRYRIFGAGQRARGLYLDAAFLDELDRSVELYPATLLRGSFRLVQTSLTGAERKSCPTTSSA

SEQ ID NO: 9106 - protein, 916 aa, unidentified
  REGION 1..916: note = Description of Unknown: Cas Enzyme sequence
MGTRFAFDLGTNSLGFAVWRTGPDPGGTFGADAPRELLWSGVRLFKDGRNPKDQQSLATMRRIPKQARKRRDRFVLRRADLVAALVATGLMPSDASERKALEALDPYALRAAALDRALNPCEIGRAIFHLNQRRGFKSNRKTDKGDKDKGKIALASAKLRDALRERNCRTFGEFLWMRHRGYQHDPHRVRDPGRQSTRIRLEGAGAKALYEFYPTRDMIRDEFDAIWRAQSAHHPALLTPEAHDALAKVLFRQRDLKPPKIGKCTFVPGEERLPKALPSVEARETYERLAHLRISEGARSERGLTPGERDALASVLLSEGKMTYAKMRKALKLGGGARINFEQAGETEMKGSLTGKLLLKANHFGPRWLTLDWPQRDAFVAKLLDEQDPETLVARLVREDGLSEEAARECATIPLADGYSRLGATANAAIFDALKNEREADGGLVTYAEAVRRAGQDREPPWHHSDERDGEIFARLPYYGQVLQRHVLPGSMDDKDRGDAAAFWGRIMNPTVHIGLNQLRRVVNALIARFDAPDQIVVELARELKLNAEQKEREQKQNRENRDANEKRIAKLAELGVPDTGENRARLKLYEEQQRAGDGVALCPFSGRAIGIAQVFTSDIEVEHILPRSRTLDDSAANKVLCFREMNRLKRGKSPFEAFGDKPEWGDIVARADKLPNNKRWRFKPDAMKRFEEEGGFLARQLNETKYLSRIAKAYLGKVCDPDQIYVTPGTLTGLLRGKWGLNSLLGDANRKNRTDHRHHAIDAIVIGAMTRALLQSLARDAGRAEQSEFDAVLGKISWPFEDFRDAVRASLGKLVVSNKPEHGKGGALHKDNPFGLITDQKEAEEIGNLVRRRPLIDLTCGEIDVVRDPILRANLQAVVAPFRDGKGAVSKPNEKSYAAALAAFAVCRACSRAWR

SEQ ID NO: 9107 - protein, 1084 aa, unidentified
  REGION 1..1084: note = Description of Unknown: Cas Enzyme sequence
VKTRKTRPYRLGLDLGTNSLGWFTVRLDQDGDHWRPTGLGAGGVRVYPDGRDPQSETSNAVSRRVARSARRRRDRFADQYFGRRTELMKALVHHGLMPEDVKERKALEALDPYELRANALDGPLLAHHIGRAIFHLNQRRGFLSNRKAEKKEDDKGAIKQAAGKLKEAMEAKKARTLGEFLWHRHQKREGVRARNTASGPKATYDFYPTRDLLKSEFDAIWSAQAPHHPSMTDAAREEIDKVIFYQRPLKQPPVGKCSLDPATEPFEKDPEGYRCPWAHPLAQRFRIYQEVRNLEVGETGRTMTRLTKQQGDLVALALLQNKEMKFDKLRSLLKLSPEAKFNLESERRVTLDGDETAARLSHKSLFGKTWRGLDVQRQIAIVEKLLNEPDDAELVQWLEDKCELAASTAEKVADASLPDGHCRLGLRTIKKLLPLMESGLRYDEAAANAIGGHAKLPTGEVRDKLPYYGEWLSDAVVGSGDRRDKSEKRFGRLPNPTVHIGLGQLRRLVNHLINEFGPPTEVAIEFTRALKLSPKEKAEYQREQRRNQEKNEARKKELAEHGLSANPRNLLKMRLWEELNPRDLLDRKCPFTGEQIGLARLMSDEVEIEHLAPFKESLDDSAANKTVCMRYANRAKRKQWPYNAFGSNPTIDGFTYRWDEIAARAAMLPRNKRWRFDADAREQFEKKGGFLNRQLNETGWLARLAKQYLGAVTNPYNIWVVPGRLTSMIRGKWGLNSLLPDHNYAGVQDKAEDFLAATDDMEFSGVKNRADHRHHAIDGLVAALTDRSLLWKMANAYDDEREKIEIPTPWDKEKLRDDLKAALDRMVVSHKPDHGVQGKLHEDTAYGFVKEPEREGANLVYRKPIEALNENEVERIRDRRLRDMVRAHVVAEKANGVTLADALRKLHAKTDDPHIKHGLRRVRLLKPEKPEYLVPVNDRRTGAPYKAYSAGENFCVEIFETADGKWIGEAVRRFDANQECHGPRWRQEHPDAKLVMRVHKGDLIRLENNGKSEIMVVHRLDAAARRFKLAQHNETGNLDRRHATSNEIDPFRWLMASYGTLKDKGAVPVRVDELGQVWRIQTSH

SEQ ID NO: 9108 - protein, 938 aa, unidentified
  REGION 1..938: note = Description of Unknown: Cas Enzyme sequence
DAAAKQYKKLEGQANYLLYGPAKKPFASYNTNPKKAPFLKEGAATDWQGVLGQKIPRFDNRIINDCALLPRLQVCAVNFQFDGKGRPKPEGLLPAEVSFLWKLKNQRFSRGGKEDWLTPGELKEIFEFPDPACFRVEAKSWGKFAKEFKWDTSCLPEPIKLPKGKRQNRETLVAWFADQLARVKILRADGKGDGLNQHEKASILTEILHRSYELTESKWAAWLDEDKFNGKLLPAHKSVEPPKPKGRSRFSRPALRLLREFVLSGLSPDEFRREQEAKIPVDADQKKGIVRDDLKSFCAERMGVSWEKAYIPNERLAMQVMRAGTTREERAKAIRDLIGEQNDPIVRHRLSEFATRLNKLQYGDFKEKLPGFGVPAYVALEFVRDKLPESFLGEQARTDYGTWARQRQKDAKEALEIVKELDCKSRDAVLKYLLLRSQGFQCVYFPNGSLNVDATKQQVSDAPCIYTEQKIGLSSLDDLVIEHIVPQQGGYNGPDAFVNKVVTTRHVNEQMKKCRTPFEWFQQDMPEKWPAYVRRVSSLQGTLGKKKVRLLTQADAPELVQKYTALAETAWVSKLAQAILCIHFGWPFALDEERRRKITVISGGLTGRIRRMYHLNRVLNPDAKTREEAEKKNRDDDRHHALDAMVISFIPNWARDAKKENFFRFPEPIHQNAKGFFEKEIASVIPKSLCFEKAALAATIYGARGEGEKQVIVQRVEILKLAYRSVKQKQVFDLDYLASQIKAVRDVHIQKLLVEFHAKSPDESAWKHFCENLHLQCKDGSAGSRVFRVLMDVGEPKEYKDLSKDCTGAFRKRAGEHKGQIVYVETGMDKKGNPKEIFQVRPIYVFESPAQVREGLTKKLGDNCRVIGFFQSGCLVAVEREVEHSKKPLPPGIYKLRTIQKKEKGGYVQIEDQNGKTYPDWPLYGLEKIVAGGFKRID

SEQ ID NO: 9109 - protein, 1193 aa, unidentified
  REGION 1..1193: note = Description of Unknown: Cas Enzyme sequence
GLRAGRRCRQAEQRREVALQKFCADFGLPWVEITDKGHDGGPFRFRWIATREDADGLRDIRAFSACLRHIIKHRGYDWHAPEDGGEYPWGDEAKAKDAIEWAKTAFCRKEHADQLLYVLTDCGWNDKERKSFEPELNEAVVKYNTKGIDAVLAEHFSQPKNNLRFPARRHNFPREMVWAHLSAIVKRHPQFLGGADRVESALRQLHDIINEHRKEPGALALRKVNRCPLAGILFEGPAPKCESSKDRHIRRFKLLEFLATRTFVTKDGKRELANMEMFRWLLDDLLETDIRALASNGQIQRSRLAKDDFKKAFLAKHDPTGETKLARDNQSHNGEYFTQLIDLLWPKLSELGGRASLSGRSAEALFDYATKEGFDAAHMAALLKDKRFERGGKRMSFYEIRQTAAAGFGIYEQVEFLLGRWTKDAKPGDKPAVPGKLRQIFAQLIKDGILPPDKAAPDYVIVETIGDIPRNKEQAKEIQKEQTARREFKERLRERFKDFETGDMSREETNKRLLLYDQQRGMCPYTSAPLGDNPLAHDLEIDHVFPRSRGGISEMVNLVLTHRKTNGNKGERTPYEAFGGESNSLQWREIRDRVLKMQWNGQKREFFLRVESSPPDWANMTRMAQLARQLRFEVARWLEITDNDAELRRRVGTPTGYQTSVCRGAWSDKLPEDFSPKKNRNNLRHHLWDAAILSHIPPGNGLNHVRCHGIFWNETDHSGDIKMLALPGLGPDLKKFEEETRGQSLVEKIKPDHSKKSRFDQWVYSPPDQNGVMWARHPIDKLADDTNLLEQLRAAGIDEKQLPTSRFHEWQEKRQAQFFTREEALSAVESLALPPQHQIPSPIFEEWWSDRLKGDKRRITEKSLRALLAKARVPKALVTDQQLGGVLINRGNPGPLTRKDGTIIRGVRGPSKKKMTPMAVVPHRNRKGETIGFKLATESFIRAEIWTTEKRDKKGVIVKAKDGRPEREYHRRLIPHPRGLKNLSLRILKCTGKRLTWERPLTDAEIIELGLKENAEVNRLHRAYEKAVKQHEKQAAMSKLAEGELTLPKPDTTAKPTPPVISLRKIYTGLPPHAKRLTNANGADISRVSKGDLLYVALGKVPGAEKGHGKFCKRGQAASGGSYWFRVSAIKASGEIELHLAEFKLPRIEDDKKATDQQEWLIKIWEQRPSSEDDVAWLLEQSRAHDQPSHSVK

SEQ ID NO: 9110 - protein, 1095 aa, unidentified
  REGION 1..1095: note = Description of Unknown: Cas Enzyme sequence
MNDKEKIREKNAAAKKGFCDLELAFDVGHSSIGWAVLKSGDAVDLLGCGAVIFRADDCLASARRGYRRQRRHIRSTRQRIARMKVLLAHVGVLTMAQLDQPGCAWPWQLAARVLRGGELLTWPELWDVLRWYAHNRGYDGNRRWSAAESEAASEDTEKEENAKSLMNQHGVHTMAETFCAMCGIDPLGKKRSTNLPGDKRPKGQNAAFPRASVENEVRRILQRHFGKLPEVDANLERALLGQNNQDKTAWQAIPCPDLKLPKRYEGALLFGQLVPRFDNRIISKCPISGDKVPSRNCPEFLNFRWAMQLANVRVCRLGEKELSPLIAAERKQMDAMMRAEGGMGVEEFKKKVRHVSGAIRDNLETMFMHPDAKEALLLDQVTKLIQSNELKSFWALLPERLQKRTRGRLRRGKIISLSNLRQQLSEIGGDAAKFDAEVKRQLDSANTRGRKKDKPATDAEFLSHAFGIKKLDQRAAFSRPLLKKAFEEVMAGKHPKEEGGCLFITEKMREARLTREIAEQTNNHLVRHRLLILERLLADIVKDYAVGDKTRVGKITIEVNRDLREMSGMTAKAKAQDLGLRIANHHHVVRKLEEDESLMNILKNRRGKITAGLIRKARVADDLDWTCPYTGQRFQPVDLVTKRVDKDHIVPRADRATDSLDSLVMTFSAINKWKGKRTAWQFVQQEQGKTVPDLPNLCVMSLSRYKGLVESLETFKGHDDDKRRKKKRKELMLLPTYEEKEFTPGDLTATSQLVRLGAMALKKAFLGCERHPVVVSLPGSVTGAVRKAWRVIGCLSLANPQVLDENGEVKKKEEIRDITHLHHALDACVLGFSSHFIPNDGRTWELITKRKWTPAEENELKALGIFAKDSEGRFQMRDLDPELKEQIRQRLAEKRVVQHVPARMDGLRVEQNMWRVVAVKGGEAFLQQRIRQPDGTRPVKPPKSEKVGKLLGLEPSGGIGKLKAQKAVLVIPENFGVALDPQPTIIPFHKVWTRLKHIKAANGGKFPRVLRNGQLIQVPKGIYQGTWRVFATKATLTLDLGAPDKVRLENKGDGQKREVRLKSLLKEGAIPIRTPLTGISVCPTISSVLTPPTVP

SEQ ID NO: 9111 - protein, 1070 aa, unidentified
  REGION 1..1070: note = Description of Unknown: Cas Enzyme sequence
MSATPKVADLSLAYDVGHSSIGWAVLQTNPDVEIKGCGAVIFRADDCLASSRRGYRRQRRHIRSTRQRIKRMKALLLHLGVLTQTQLDKSGCAWPWKLAARVLVGGKTLTWPELWDVLRWYAHNRGYDANRRWSAAEAEVEKEDAEKVLNAHTLMDESGKKTMAETFCAVCEIDPLGAKCSSNPEPAKRFKAKSAAFPRAVVEAEVARILQAHFGKLKGVDEGFAVALFSDWRAIPCPKIKLPQRYQGGLLFGQLVPRFDNRIISICPITGQKVPSRNTPEFLNFRWGMLLANVRVARLADRELKPLTVEERKELDRLMRAEGAMTAKQFTDAVEKVTGAIRHNLATMLMHPDAKDALVLDPVQECLTAERPISVKILFTALPTRIQKRARGQVRRGKSLTFAALYEASRQAKESVAAFDAAIQQLLDKASGKGRKKDKPLTRDELLAKALSVRKLSGRASYARPVLARAFAEVMAGKHPKEEGGCLFVTEQMRQAQLNRSLVQQTNNHLVRHRLLILSRLLNDIVKEYAGGDKTRIGKMTIEVNRDLREMSGKTAKEVAQDLGLRLANFKNVVKKLEGDESFMRELNRRGLRHIPPGIIRKARVAEDLGWRCPYTGMEYEPVHLLTRRVDKDHIVPHADRASDSLDSLVITFSAINAMKGKRTALQFVSEEQGKTVKDLPNLSIVSVNRYREFVEGLEVFRGHDDDKRRKKRRKDLLLLPSYEGKEFTPRDLTVTSQLVRLGALTLKREFADVKEPPVVVSLPGAVTGEVRKAWDVLGCLGLACSQVLDAEGKPKTKTEIRDITHLHHALDACVLGLASHFIPNNGRVWELITKRNLTSAEQKELIALNVFAAGPQGRVQLRDLRPERKEQIRQRLAEKRVVQHIPKRTTGLRVEQNTWGVRASKDGEVTLEQRIRQPDGKRPLKQAVERAGKLIGLEAGKLHRLSGALVVGENFGVALDPQPTIIPFHKVWPRLQELKKANGGKLPRVLRNGQIIYIPKGTYSGVWKVFSAKNNKSGMALDVGRPDVVRLRNKTEGHKINVLLSSLIKDGMTIVDAPLTGVSSALKQS

SEQ ID NO: 9112 - protein, 1092 aa, unidentified
  REGION 1..1092: note = Description of Unknown: Cas Enzyme sequence
EEIFFKKITRGNRKGMVNDRASFDFFEIVDAFSESHKYEFNYAQYKNEKFELKRNPSVAACPVIAGLINTFEGEWTEVFISDTKKVGFNWDNLKLSYTPVYEGEVQTHKERNYSYKDIWHLLFDFLQTKDDEDGLREFCKKVLKWNNDRTDMFCDISISQGYGSLSYSAINKITPFLREGYIYSEAVSFANLKSVLGEKYETNRKEAELLIARTIKEVSKQKELLNITNGLIQQYFKDNPTTRAKGIDGTVEQITALENDVKKKMSSYFGNNVWASKPETEQKAYFEPVRDLYFKFIDGEQKQEEKAASKHGKNPEIDYYKLPRLDEAIKDTLKKSFRVTDKDLKKLFHPSDIDIYPKSATGRLEDPNPPSKGWKNPMAMRTMYELRKLINYLLDEDRIDKNTKVVVEMARELNDSNKRWAYGKWQKDRERENIEFAKAIIGIAEEKYPNLDEKNAENINKVRLWWEQLDNGAGILKQIASLKEDVKKYRLWKEQSSICLYTGKTINIVDLFDGTKTQFEHTLPVSQSFDNSLANLTVCDAYFNMKIKKIRIPTQLNNYSEEWNGYSPIEPRIKDWVEKVKSLKNRIKENKKKTKGAVLASNIESKNHYIKQRHLLQFELDYWDKKVKTFTLTELPNWWKNSQLVDTQIISKYARAYLKTVFNRVDVQKGSVTNTFKKIYGIKGDEHKDRSKHTHHAIDAMTLTLIPGSAKREAILEKYNKREEFRYKGMAKDVYHTSPPQYEKFSYSDVETVINEILINHISKDQTLVEAKKKLRQRGKIQKTIDGKIIWQQGDGIRGQLHKESYFGAIKVNERNEQGFVIKENGNYILKKDGYEDEVWAVMRKSIEDVDFGKDEIIDKILEKHLKQQLDNGVPQIELKDFNQKIIRRLRCRVKAGRGYLSVQKAIPIKKHITPFVSKYAHKRHVLAQNEENYLFLLYEGSNAKGKVMRGHRILNLLDVVHLEIDDINELKQLSEFQTLTKGKDTLSLKAILRVGDRVIPYLEHRDELENKLLVNRLFMIIKFNEPASSTAYIYIQNHLEARPDSEVKKNEEKDFDPSKYQPRLYLSTAKFNCLIEHLDFVIKPDGKIVLL

SEQ ID NO: 9113 - protein, 1036 aa, unidentified
  REGION 1..1036: note = Description of Unknown: Cas Enzyme sequence
MPARRLGLDLGTNSIGWCLLDLDSHGDPVSIFRTGVRIFSDGRDPKSLGSLKATRREARSARRRRDRFIQRQKFLINELVRLGLMPEDDDQRHALAFKDPYSIRKKALDEKVHPHEMGRAIFHINQRRGFKSNRKSGDNEAGVVKQSIAELEVKLMEKKARTIGEFLADRHASQDTVRARRLGSKTADLYEFYPDRAMLEAEFDKLWQAQAAFDASLYNEEAKERIKGVVFFQRKLKPQEVGRCTFLPEEKRISKALPSFQRFRIYQELSNLAWIDRDGAAHLITASLKLRDRLFGELETKKKLTFKSMRAILRKEGVTDYPVQFNLESDLRDHLIGNTTSCIMRDPKKMMGEAWDKLNEEEQDQFILMLQDDGMGDDEVMSLLRTKYGLSGSVAEACLDVRLPDGHGSLSKEAIDRILPVIRDQGLIYYDAVREAGFGEANLYDPNAPLSDKLEYYGKALAGHVMGASGKPEDTDEQRYGAISNPTVHIALNQVRAVVNELIRLHGKPEEIVLEIARDLPMGADGKRELQKFQKEGLEKNQRARDELTRLGHIDSRESRQKFQLWEQLSSDPTDRRCPFTGKMIAIADLFSDKIEIEHLLPFSQTLDDSMANKTVCYREANREKGNRSPFEAFGSSPDGYDWQEILERSNSLPYSKRWRFLPDAMKRFDADGGFLERQLNDTRYISRYTSEYLSTVVPKNKIWVATGRLTSLLRGFWGLNSILRGHNSDDDKPAKKSRDDHRHHTVDAIVIAMTSRGLLQKVSKAARRSEDLDLVHLFEDRIDPWDGFRDEVKKHVDEIIVSHRPRKKSQGPLHNDTAYGIVEHNENGASTVVHRVPITSITKESDIEKVRDPIIRSSLLNETAGKTGKPFEEAAQNWCGSQGIKSLRILETVSIIPVTDQSGKAYKGYKGDGNAYMEIYEEPGSGKWKSEIVSRFDANQKGFVPNWRRESPTAKLQMRLRINDLVRFSDNKSIFRLQKISGKELTLAQHNEANVAERHNEPNDPFKYLRTSVTSFQKRGAIKLNISPTGLTLEG

SEQ ID NO: 9114 - protein, 1061 aa, unidentified
  REGION 1..1061: note = Description of Unknown: Cas Enzyme sequence
MGERKRILGIDLGIASCGWAVIEAGENEGDTIATGVRCFDAPLVDKTGDPKSAQRRAARGARRVIRRRQQRMNKVRKLLHGNGLLPDSTTEALHEALRRVSPKGTHPPITPWTLRAVAYDRLLTNDELAVVLGHIARHRGFRSNSKREAGANAADETSKMKKAMEATRDLLMGRTFGQMMATDERFVDRKRNRDKDYSHTAKRSDLEDEVRKIVSAQRRFGNAAATDDLAKTFSETAFSQRPLQDSEKLVGKCLFEPDQLRTARRAPSFELFRFLQRLAHLQISVGRVERPLTQEEIALASKGFGETKKTITFGSLRETLDLDPNARFAGIPKDKESKLDVAARTGGAAYGTKTLKDALGDAPWQSLIKTPDKLDRIAEVLSFREDMDSIRKGLDEIGLDAVIVQCLLDAAAKGEFKDFTRAAHISALACRNIVPGLREGLVYSDACARVGYDHATRPSVQLTEIGSPVTRKAFGEAIKQIRAVAREYGPIDLVHIELARDVGKSAEERREIQDGIEKRTAEKEKRRGEAAEHLGRAPSDDELLRYELAKEQNFKCIYSGDAIDPKGVAANDTRYQVDHILPWSRFGDDSYINKTLCTTKANQDKGGRTPFEWFKADKSEEDWLEYQARVDGLKEVKRRKRKFFLIGKISSEIEDKFKRRNLTDTQWATSLLAEELKKDCLKWIFTERSGRQVRTRPGAITSKLRRAWGLEGLKKENGERVPDDRHHAVDALVLAATTESLLQLLTKEVQQREKEGRQDDIFHCNQPWPGFRIDVERAVRGENGTGGVFVSRAERHRARGKAHDATVRQVRGADGKKLVNKTPSEINGEKIVYERKLITDKGFKESDLDKIPIPAPYGNIADPKRLRDEMVESLRAWIGKGKPKDDLPRSPKGDIIRKVRVATDKKVAIELSGGAVDRGDMARVDVFRKKNKKGKWEFYVIPIYPHQIATMEEPPDHAVKGGGEESEWAPLDANSEFLWSLYSMSFLEIVKSDGEAIEGYFRSLDRNTGAVTVSPQVTNDEIRKGIGVKTLSSLKKFTIDRLGRRFEVSREVRTWRGKACT

SEQ ID NO: 9115 - protein, 1055 aa, unidentified
  REGION 1..1055: note = Description of Unknown: Cas Enzyme sequence
MAELTLGLDVGVNSVGWTLVDIAGERILASGSRIFPEGVDRDQQGSEKSKTQARRTARGTRRQIARRSQRRKTLRQALTAVGLLPDDPTRFQKLLNANPYELRRRALDERLAPHELGRALLHLGQHRGYLSNRKTDKATDKDTKGILAEMGELDTAIRQADCPTLGSYLAKLDGAFDRCEQADGPHIRRRHTQRKMYLDEFERIWAAQQPYYPDLLTDALKYGTRGPQRFPKKPNVLGTHSSALAEYGIYGLMFFQRKMYWPKSVVGRCELEPREKRCPRAARAAQRFRILQEVNNLRILDRAIRAERPLNATERATIVRRLMDSKEAKFDQIRKWLKLPETVQFNFEQGGRKKLDGHLSDSILSGKKHLGKRWKELSEEVKNKTVDILIEEDQEEDVVRRLTSECGLTEDEAKLAATVNFPDGYMSFSRRAIEKLLPHLEKGLALMGNDATDSAIHAAGYLRPDERVVHQCQFLPPSPNVTNPIVRQALVEVRKTVNAILRELVYRQGHSLVDIHVELARDAKKSFAERKQIRFDNAKRAKEREDAAAWIENFNASIKPTRATINRYLLWRGQEEFCPYCGERISPEQLFNGDADIDHILPHWQSLDDSMGNKVVAHRRCNHDKGDRTPREWLEGGDPERYERVMQFAERYLSYGKQRKFAQKTVELDDFVNRQLTDTAYISRCVSQYLQCLGTRVMCPRGNMTADVRHWWGLNSILQPDGSNRKNRGDHRHHAIDALVIAMIDSKRLFALANDRGENVRPPWEGFRQEAERLIQGINVSHRAQRRLHGALHEETFYGATQKLPRDEAVSQEKRPWSKGWIEDATTFVRRKPLAALTKTQDLEKIRDEAIRDILRVHLRARDIDPDKKGKIPTGTFVGANTPRMRSGVPIKKVRMIEQGLTFRRVSPRRNYQFVKPGNNHHIAYRAVTKKNGRKQWTAEVVTMWDAARRAKAGLPLIDQSDRDGQRFVMSLSIGEMFEIDDGNGKRLLCVVRKLNQRSKAVFYKFHTDARKASEIDVDNLYLSPSHMQTKNAQKVTVDPTGRLRRADATSLTPP

SEQ ID NO: 9116 - protein, 905 aa, unidentified
  REGION 1..905: note = Description of Unknown: Cas Enzyme sequence
MSKYILGLDLGSNSIGWAMLGLDGDSESSTQATGFFDTSGSGHPPMGVRIFEEGLENFDSSKEKSLCQSRRIARSMRRNHSRKNARRKALRRTLTKAGLLPKDLEQLEKTYRTNPYEIRCRALDQKVTEHELGRAIYHLCQRRGFQSNRKSGESKEDKGMLLSIGELAKEIKTSGSRTLGEYLYTLSLDEPDKKSHLKTGNIRIRKRHTRRNMHKEELHEILEVQKHFYSEILTEDLIHQIQKIAFFQHPFELTEERRKRAPSRANLHRAPSVKPCPLEPDNKCCARGEWKAQQFRILKEVNNLRIAENFGLERELDPKERDTVINLLSVSKEVKFDNMRKELAKLGVDPDAKFNLERGDRGKLIGNTVEHKIRSAFGKKAWANLPEGDKTVCRTSLLAIEDPEELKNLFIEKGMAEAKAEKLSKFAPPDGYIGYSFKAINKLLPHLQEGRSEYEAIALTYPDRPESHQFDKLPALSEKSLPHDLQNITNPIVRRALVECRKVVNAIVREHGKPSLIIVELARNMKANQDERKKIIALRNKNEKRRIEAKEFVSELGGNPNSRSDINRRLMWSEQGGICVYTGKTIPPSDLFSGEWEVEHILPRWRSLDDSYLNKVLVQRSANADKGDRTVIQWLGKDSQEFRHIIQRAEGMVQKGFPNGKLNRLKQESISTDGFAQRQLNDTRYISRSVVEYLNLLYSPEKRKGEQAVLSCRGGLTAELRRQWGLNNVLDVLIGSDGKPVLSIETDENGQPKKSRSDHRHHAIDAVVIALSSRSYLKRYQDFRKKHARAQATPRFNDPWPEFRNDVISCAQEINVSHRPVRKISGELHKETFYGPSRNNEGQLVSDTYSTRKNIEDLTGKSVEQIKDNQIRKRIKAELLKQGWNGETKLPDNWWGNGIYINSRN

SEQ ID NO: 9117 - protein, 1314 aa, unidentified
  REGION 1..1314: note = Description of Unknown: Cas Enzyme sequence
MAKILGLDLGTNSIGWAVVEKNRNEEFKLLKKGVRIFQEGVKIEKGNEKSRAAERTDYRSARRIKYRRKLRKIETLKVLSDFGYCPKLSIEELDNWRYKKIYPENKHFRDWWLTDEKTKKTPYYYRYLGVTKKLDLTQEGNKFILGRAFYHIAQRRGFLSNRLENTKESDGAVNKSIDGINKVKGKKTIGQYFYEKYQKGEKIRDTYTHREKHYLDEVNRICEFQKLPNKFVEKLENAIFYQRPLKSQKGLVAKCVFETNKPRCPVSRPEFEEYRMLCFVNNIKIKTPDDDKLRFLNKTEKEKILPLFFRKSKPHFDFEEIAKQLAPKKQYTFYKNKEKLNDYWLFNYKMNTTVSGCPVSARLKDLFGEEYINIKFDYIRIKDTKSSFIDINDIWHVLFTFDRDEKIIEFSKKRLGLNDDQIKELLKIKLKKEYASLSLKAIKKILPYLREGLIYSHAVFLANMEEVIPKEIWNDEKNKQIISNEIFNIIQIQNEKKLVANVINGMIKICREEQSSWSLEAEDIYKNEIHAKLLSVFGENRFASFSSEKKEKLEKNTFEKFKQQIQKNQGKGEFIQMQTIIDRVKEFISDNFNPDESKLDKIYHPSAVEVYKLPVKKDDGKYYLNSPVVSSIRNPMAMRALHQLRKVINELIRNDIIDPSTKVHIEMARDLMNANERKAYQAWQREKENLRKEYVIRIKEYFGNNYEPSETEILKYQFWEEQNHHCIYTGKEIGLCDFLNPNPKFDIEHTIPRSISFNNSQENKTLCDNFFNRSVKKNKIPFQLGESKWHEILNVIEPWKEKYEELEKQIQVVIRQSKVAVDKDSKDRAIQKKHKLSYEKKYWRNKYNYFAMKDVPEGFKNSQLVDTGIITKYSRLYLNTLFDNVYTVKGNTVSDFRKMWGLQDEFEKKERVNHIHHCIDAITIACITKENYEILAKFYHDWEELYAKGVNQLPPVEKPWKTFTEDIKGIENEILVSHHTPDVLPKQSKYKFKKHKKIQRDKNGNIIYQKGDTVRGSLHQDGIYGAIVKNDSIVYVKRKPLQFDAQGSNGFKDLKQLDNIVDIGIRNVILNQISEKIKEGKSFKEAISEDLWMNEEKGIKINKVRCITNVKNPLEWEKKNRDLSETKNYKHKVHVINDGNYSMAIYEGKDSNGKLKRDFEIKNNQKAGQFFKLSVKNNLKPQNLFPTFKINGKIELPFKALIKIGTMVILCENNPEEVWVSSLLERKKRLYKIVGISTNRVKSGNKYYEFGNIVLRHHQEARPASELKVQDGEYKIDEDYIAQRKLSHNQFNALIEGVDFKLSPLGEIAPINNI

SEQ ID NO: 9118 - protein, 1132 aa, unidentified
  REGION 1..1132: note = Description of Unknown: Cas Enzyme sequence
MYSIGFDIGIASVGWSVIDSKTGRIIDLGVRLFSARNSDNNSERRGARGGRRLLQRKITRLKDSEKALNSIGIFEDASLKHVCPYSLRVKGLTEELSKGEIYRVVQHIIKKRGISYLDEDASESAAEGQTYKDAVARNERLLKDKTPGEIQLARLNDGGRVRTGYNALNDYQLNVFTVRAYANELKRILEQQQQFHPEITNEFIELFISKGTADKAGLVYRKRPYYHGPGNAANNSPYGRWVNYKEDGYPKNNIFDQLIGSDLRGDLRASNLSLSAQKFNLLNDLNNLSLNREIDKITTQEKNEILQYLMVERPARFTPSDLAKRLGLTIHDIRGWRVEKNDKPQIHSMASFRKWSKIFEEYGIEINNIPDSILDDLAKIVTLNTEKDAIIDTLELELAHLDSTIKEAVIDRFKDLRAGSSSKSWHSFSPKLLQLLIPELLNTSEEQNTILERLKIKKELRNSYSDYSRIPINAIIEEIYNPTVAKSVRQALRIFNNLLDVYPKEQIEYVTVEMPRDKNEKDQKDIITKIQKQNETRKSQSTQYFMAKSGWNLERFDSEMSRRRGFAAKLHYYYEQDGICAYSGKPIAPDELLTNATEIDHIIPLSISLDDSINNKVLVKAHVNQEKGQRSPYQAFHENAPLGQSWDDYVAWVNSRPYKKHKKKMLLEDRDIFDPEIRNQFVARNLNDTRYSSRVILNTLDSFFYETTTKVKVVNGSYTHTLRKRWGEALEKNRETHHHHAVDATLCAVSPFVKVDRFKYHEDEDGKRSMVDTETGELIPYNKYKKMSYYEKRNFTPKWDNFIDQLLPTKLYPKIKFSHQVDRKSNRKVSDATLYSTRERVLQGKKKETIDTYTIDKIKDIYTADGWKKFNEKKDALLMKELDEKTYQILLDIAAQYPSEIEVEQANGTIKKVAQSPFKLYCEDNGIPFIQKYSKKGNGPIIKSVKYYDKKVGLHLNITKDTNGIPIEETSNRKKVILRTLNPWRTDVYFDPTKDSFILVGIKYSDCKYKDGNYGIPLKQYEIIKKSESVTDNCTFCFSLHRNDGIQIKFEDKVLEGLYHSRTTSNRNYFEMKPDDRQKYNAKETLPIFGKVSPSGQFVKGIKPGMKISKFHTDYLGNKYFITSEELKGILN

SEQ ID NO: 9119 - protein, 1107 aa, unidentified
  REGION 1..1107: note = Description of Unknown: Cas Enzyme sequence
MGIKIGLDVGITSVGYAVLRTDDEGVPYKIEILNSVIFPAAENPKSGESLAAPRRGNRGSRRRTRRTKFRKYRTKRLFIRHGLLTAEEIEDIFNHKLGHKTIYELRTEALDRRLTNEELFRILYFFAGHRGFKSNRKAEIENADAETGMVLSAISEIKTALEEGTYRTLGEYMHAHPKYEEHKRNKDGKDRYLGTALRDFIIDEIKQILNAQRGFGNEALTDEFEQEFIGNGEGEAAGIFTAQRDFDEGPGKGSPYGGDQIEKMIGWCTFEKEEHRAAKGTVTFQYFELLSKLNNLKIQEFAGDDWKELNPDQRQLIIDKAFSKDKLQYAEIKKMLKLEPEAKFNLLSYGSKTEQDKTEKTNFVALRSYDKVRKALGKEVYEAMPSSLKDEIGTILTTYSSDKSRRRVFADRLSLTTDQIELLLPLTMTQYGHLSLKAMRNIIPYLEMGLTYDKAAESAGYDFKHNAIDRAFIHENVSNPVVKRAVSQCIKVVNQLTREYGKPDAINIEFSRELGKNFDERRKIEKGQKENMARNESIANELRENGIAVNGENITRLKLWREQGNMDPYTGQYIPYEEVFYGHYDVDHIIPYSISFDDSFGNKVLVSSAANREKGNRIPIEYLANDPVGIQNLEKIAGTIRNYNKREKLLKKKLSPEDVDGWKSRNINDTRYIARLLRNYFRQNIEFSEKENIKEKVAVNNGTVTARMRARWGLGPKHRDNDRHHAMDAVVVACMTPAFVRRVTVYSKRQEVRFNKSLWNEGTLESDLAHMSLEKREEYEKMFSKAFPQPWEGFRDELNARLSDSPKELIKNIRNTLGTYADEEIEKLKPMFVVRRPNKKITGPAHLETIRSGKLLNEGKSLSRVSISKLKLNKNGEIGTGNAEFYKSEDNGWMPVYNALKAEMEQNGGSGEKAFPDGVLTYTQENGQTHTVRKVKVVQKSTLQAVLNDGKAMADNGSMVRIDVFRTPKKYVFVPVYVKDTVAKELPNKACVPLKPHDEWYELTDVDEFLFSLYQNDVVRVEHKSGMPLTYHGGNVGIEKTESLVGYYSGANIALGCVTVRSNDSSFSAVNLGIATLRSLEKMQVDYLGNLSKVNEKSRQTFSNMKR

SEQ ID NO: 9120 - protein, 1106 aa, unidentified
  REGION 1..1106: note = Description of Unknown: Cas Enzyme sequence
MIEITLYLNSHLSVLLNKWRNCMSNIIVGLDIGITSVGWAVTNEETGEILDSGVRLFIEGDASENAKRRSFRSGRRLKRRRVQRMKDFVELCLKEGVISEDYIILNNPLECREKGLTQQLSGQELFTALYHIVKKRGSSLEVVEDNDIKDEESAKKSLSENDKLIASGLYVCQIQLQRLKESGAFKGHQNIFRTKHYLIEAEIILKNQSVSEDFKESVLELIKRRRKFTDGPGSMKSPSVYGRFIMQEDGSIEVVDLIEKMRGRCSIYPEEFRAPKHAPSAELFNLLNDLNNLVVNDEPLSSHEKREIIRLLVHEDKHHSVTMTKLCKILNVTQEEIKGYRIDKNEKPIFTDFKGLKAFLVNIDEVNKSFFLDNFFLIDQIMEALTSSKVLEDRVIFLRTIQEKIPVLTDNEIKQLSQIPGISGYHSLSLKAIYQINNEVFDTNDNQMQVIHRLHLGSYSTEHLIGLKEIPYDRNAILSPVAKRSQQEAIKVVNQIRKQYGEVKKIFVELAREKNSDEQKSIINKTQKNFENLNKSLKSDFGVEELSSKTRLKLRLYKEQDGKCVYTGECLDPKLIISDPNAYDIDHIIPLSVSLDDSMANKVLVFNDANRAKGNLTPIQAFRMGKFNGWSETQYRTFVSNLAAYKYGFNKKKLEYLLDEREITSYSNMKDFIARNLVDTRYASRVVLNTLQDYFSANQIPTKVVPINGQITSMLRGKIGIKKSRDENYFHHAIDAATLTLLSQQSHFSKVFDNIQIDNKDVSIDTDGIPVYDYKDFLTETFMQKLVPLRKLAEEHEFKDDVPFDFLESKIKISHKVDKKPNRAVSDQTIYSTRQTEDGERVVKKYKNIYDPKFMNLAKDINEGNVNHYLMKRHDPQSFTKLEEIVEQYMKEYKQLNDNPLYLYKEKHGTVRKFSKNGNGPEIISLKYLENKLNSHVEITQNYKTIDNTEKQKNVVLLQIKPYRTDFYVNEKGQYKFVTIRMNDVRYSGEKKLFVIEKEWYENEKTRKGVDKTFNFVFSMHRDELMYLEKIERNRDKSETVFKDVWRFVATNDDDKNVIQYNFTHYNANKQERITIGGKIKKIAKVHTDILGKLYESTQIFRLNSD

SEQ ID NO: 9121 - protein, 1353 aa, unidentified
  REGION 1..1353: note = Description of Unknown: Cas Enzyme sequence
MQKIEKYCVGLDIGTNSVGWAITDLDNQLLKHKGKNTWGVRLFDQGETAEGRRLHRSMRRRIARRKARIQRLQRIFITEIQKVDPLFFMRLKETFLQQEDKNEKIKASGNLTGLFTKGDWNDRKYFEKFPTIYHLRSHLMNIEGKEDIRLVYLALHHIMKYRGNFLNQEENFSSDIDFNKMEEDILNLLSGITAKESLYKNVQKIGLNLIKILNQKNISRGQLKDQLNEALTPIEIDPKVKKEICNGILGYKTNFITLFGLEVEKDEESKLKFSLSEDYDEEEKLKYMGIEKEDIFYLLKKIFSMVKLKDILGNKNTLSEAMIEKYGKHHDDLQLLKKVFIDYLPREEYNKIFKKPGKTGNTYSNYVKVYNGGEKISYNKCTQEDLCKEIEKILLKHEEQIMDKKAYDYLLREAMNRSLLPKQRTIENGSIPYQIHMAEMDKIIEKQGSHYPFLKENHKKLQELIAFRIPYYVGPLNENSPFAFIKKNYQGDINPWNFEEIVDRSASAECFMSKMMNKCSYLLDEDVLPKDSLLYSEYNVLNELNNLRIEKMSSANNRLSDLSRSKVLFTDENEKRIVIDELFKKTKKLKVTEKDLIDFMHNHQMIPTREISLRGFQKENEFASNLNSYRTFEKILGGNLGKHETMIEEIIRWIALFEDKEILIKKLKEKYSQALTTKQIEKISRLNYKGWGRLSNKLLDGIMAKDQDGRKLTIIDVMRERPMNFMQVITDKKLNFSEIIEKESGIESKGNTINYEEIDQLQGSPKIKRGIWQTVKIVEEIRKIMGKDPERISFEMAREDQTSKRTISRYKQLDELFKGMKSENEAYSKSIHDELKGFKDQDKKLREQRLFLYFIQNGKCMYSGEPLDINALSTYELDHIIPRSYIKDNSIDNLVLVKRIENQDKNNQLLLSRKVVSRMQKFWEKLYKSNLITSKKLYNLTRVEFSEKELEGFINRQLVETRQISKHLVSIFNQYYTNTEIYTIKAKLVDDLRKALEVYKVREVNDCHHAHDAYMVSVLSNFVSKTFPYLKDEITYGEYYKFKKNPLKDPNFLRGKKDGVIISSFKTTQEGNFGLWDAEDEILKIKKAVNYKDYFITKKLEENTGEFFKQTVFSPGTMKNLIPLKKDLDPNKYGGYSSMNKAYSVVFSGKDLSKKRAKSGKHITYIPIPVAKEIKDGKMTTKEYIETLGFEEVKITRDKIMKYQLALEDNNPIFIVSDVEKQNAKQLFLDRDSMKTLNDIKINDLVDNKENDERLTALFKTMFNKISDQFPVVGNVSEGLQNNESNFEELTIEEKVKTLLEIMKITRATGERASLKNIGLSGEAGRLGRTIKLENFVIVNQSVTGMFETREEL

SEQ ID NO: 9122 - protein, 1042 aa, unidentified
  REGION 1..1042: note = Description of Unknown: Cas Enzyme sequence
MIKYRLGLDIGIGSIGWAIISGDSKAARIENFGVRIFESGELDQLGKDRKSQQRRGFRGTRRLVRRKKHRKDRIKGHLQNIGLVKIEALNQYFETNNQDIYEIRVKALDGKITPEEIGACLIHFANNRGYKDFYAQESEKNNLDAEEEADYEALNNFDRIYKSSNFRTPAECILAKFKKDGQGYPDFRNNNFKEVHYLINREYLKNEMHQILIEQSKYYGSLSPASIEMLDAIIFKQRDFEDGPGDENEKFRRYSGFLDSIGKCMYYKDWNRGFRSTVISDVYAVTNTLSQYQFLDSVTGEYHLKPEVAKELVDYLLKTGNLTMTEVKKILKDNNLILKKSDLSDDGALSKAIKYLKAAKNAIETCGLDWNSFIGEDQFDVENYSKLHQMGELISKYQTPKRRKDELKKLPWMTEPLLKELCSKKISGTSNVSYKYMCEAIQAFMNGETYGNFQANKLKERQENISPEHRCMLLKTLNDPEIKDNPVVFRAINETRKLINAIVRKYGSPECINLEVASELNRSFSERVEIQKYQKENEKSNDKVKKAIADFLQIEVGDVSGAQIDKYKLYYEQDCKCLYSGKPLGDIGLVLLDKTHRYEIDHIVPYSLILDNTLNNKALVLGNENQVKKQRTPLMYMGSQQKEDFFARINEMHNKKQKQISDKKYKYLMVENLYDEKTLSMLRDWKSRNINDTRYITKYLISYLKSNLQFNSNRREPVYGIKGGITSRFRKIWLRDTDWGKDIKDRESYLNHAVDAVVIANLTPAYVEISSDNIKLNQIKRRYRNTTNDEYQDYLKRCINKMDEHYHFSPEYTERLLTKTNRVPSFVNQLEKEVTIRFDEENPEVFEERVQEFYGDLSDFVIKPHLPIVSQKQERKYRGKISDAKPIKVCEIDGVLMKINRANISDLKPKDMVRLRTADTDLIQSLEEVFETFPTVDAYLKTHNLKQFKTKKGQTVNRVSVIEGSISNYYKKEISEQNYSILGKMKYYCVEVYQNKKGETAIWGIKYPDLVNKDKKLWVKKMALPEDYGKHVMYLFKNDYIE

SEQ ID NO: 9123 - protein, 1245 aa, unidentified
  REGION 1..1245: note = Description of Unknown: Cas Enzyme sequence
AIDGMAIAKKLYDENLTPGQLAYLLLKEGKKHLPDFYRSDLQAEFDKVWTSQEQFYPEILTAELKMELSGKGQRATSDIFWKTYGFNIAENKGTREEKRLRAYEWRSTAISKKLQKEEIAHVITEINNNLTNSSGYLGAISDRSKELYFNRQTVGQYLYKQIQDNPHTKLRKQVFYRQDYFDEFETIWETQAKFHSNLTEELKKEIRDIIVFYQRKLKSQKGLISFCEFERKEIEIERGGHQIKKIIGLKVAPKSSPLFQEFKIWQVLNNVLVRKKGSKKRTLKEANQVSLSEQEQEVIVFDMETKQILFDELNVKGNLKANRIIELLGHDVNDWEINYSEIEGNRTNQVLYSAYLKILDLEGYDTKELLDVKTNKDEIELNDISIPGPEVKDLVGRVFESLEIDTQILEFNAELEGEAFEKQSSYLLWHLLYSYEGDDSPSGNERLYTLLNQKFGFKKEHAQVLAGITLSDDYVSLSAKAMRRIYPYIKEQSFDKAAALAGYRHSASSLTREEIANRPLKDKLELIKKNSLRNPVVEKILNQVVNVVNSLIEVNSEKDADGNIISYFKFDEIRIELARDLKKNAKERAEMTMNINAAKIVHEKIFKLLQVEFGVKNPTRNDIIRYKLYEELKNNGYKDFYTNTYIPREVLFSKQIDIEHIIPQSKLFDDSFSNKTIVFRKDNQDKGNRTAFDYIDSRFGKEKLTAFEQRIEFLFEQGKKNKDEGISKAKYQKLLKKDADIGDGFIERDLRDTQYIVKKAKNMLYEICRVVTSTTGSITDRLREDWDLINIMQELNFDKFKKLGLTEMVEKKDGSFKERIVDWSKRNDHRHHAMDALTIAFTKHNHIQYLNYLNARKNQNHQQHNNIIGIEEKETKVVMDDLGNKKRKFNLPLSNFREEAKKHLENVLVSFKAKNKVVTKNKNKTKSAKGEKIKVELTPRGKLHKETVYGKYQFYVSKEEKIGLKFDKKTIAKVANTTYRRLLLQRLLENEDDAKKAFTGKNLLAKNPIYLDDAKTLTIPEIVKLTWLEDDYSIRKDITPENFRNVKIIDKILDEGVKRILKERLAQYNNNPKEAFSDLEKKPIWLNEEKGIAIKKVKVSGINNAEPLHYKKDHLGNEILDDDKKLIPVDFVSTGNNHHVAIYRDEKGNLQERVVSFYEAVARVNQNLPIIDKTLKAYLGWTFLFTMKQNEYFIFPNEQTGFNPSEIDLLDPMNNKLISPNLFRVQKFTIKDYFFRHHLETNVED

SEQ ID NO: 9124 - protein, 1078 aa, unidentified
  REGION 1..1078: note = Description of Unknown: Cas Enzyme sequence
MSSLASDNLEQLDLFQPQEYTLGLDLGIKSIGWAVLHGERITRAGVYLFETAEERSNGKLVSKAAERGRKRRIRRMLDRKARRGRHIRYLLQREGLPVEALEKVMVHQSNRTLWDVRAEAIERKLSKQELAAVLFHLVRHRGYFPNTKQPLPDDLEDDEVDEEQGKINRAISNLRRELQSSDCKTVGQFLARHRERQRNRIEDYSNLMPRKLVAEEAQQIISYQRQQGHQLSQEFENKYLDVLMNQRSGRSPKLGNCSLIPSELRAPACAPSTEWFKFLQNLGNLQITNVYKDEWELTEERRSQIIDACSQRSASSYWQIRRDLQIPEEYRFNMVRYEPRNPDEDLRVFLERQESKKLANFQHWKQLERLLGTAYPMETMDEAARLITVVKDNEKLSDQLADLLPEASDEAIAQLCGLDFTTVAKISLAAIYRILPHMKQGKGYYDACQQEGLPEAVATPAEDRVPPFDEMYNPVVNRALSQARKLINAVIDQYGMPTMIRVELARDLGRGREERGKIESEQRRLGRENERRAEEFRSEFGIEQRADQGLRYRLWQEQGCICPYSGRVISSSSVLSEDTQIDHILPISRSFDNSLNNKVLCFIAENAQKGNQTPYEYLDPERFQRLEVISARWPEARRTRLLHKSFGKVSEDWKSRALNDTRYLTSALANHVRQHLPDAKVQTVNGRITSYLRKQWGLEKHRQKRIPLAALKLADLERLSKKDSSNRKLYAHLKQCLEAADDRPDVAFPQPFYFPTDQDTKPLTSVELVEKHTHHAVDAIVVACTTPAIVQQVTLYHQDIYRHRKLGEKRPTPWPQTFRQDVLEAESKVFITRHPQRVSGGLHPDTLQKHQQNSQPDRERVALMDVDLDDLERLVEKDASNAKLYAYLKESLEASGNEPKAAFKQPFYMPTGPDAKQRPTLSKVTLFRKKPESNKQLSELGDGRLYDSMSQGRLDVYRYRAGGKRKDQYRVVLQRMLNLMRGEENVRVFKNGTPLDQGDELDSRYQFLFSLYPDDLVEYRKQEADQPVFGYYRTFNIANGGLSISRYENGVLINPIINIVSAAHFTKVQVNLLGEVSR

SEQ ID NO: 9125 - protein, 933 aa, unidentified
  REGION 1..933: note = Description of Unknown: Cas Enzyme sequence
LLNYRLALDLGSTSLGWAVIQLNGQTPQQPCAIIRAGVRIFPDGRNPKDGSSLAVTRREARAMRRRRDRLLKRKARMQRLLIEHGFFPADAAERKALELLNPYELRALGLDAALSPAEFARALFHINQRRGFKSNRKTDKKDSDSGALKTAISALRSQLHPSGADGRARTVGELLWRRMNDPAVAPQQRTVRARYREQRVLKDDGKTRIAKSYDLYIDRTMITDEFDALWAKQAALNPAQFNPVAHEALKDCLLHQRPLKPVKPGRCSLLPDEPRAPLALPSQQRFRILQELNHLRILGGRLLEEPLTLEQRNILAAALEQGSKSFKTAIPKMLGLPGSVQFNLADAKRLELKGHATSMLLSKKDFFGAAWHSFSEARQDEIVMRVLEEESEAALVRWLMDDTGVDEAHAERIANAPLPEGYGSLSAKALARIVPALRAEVISYDKAVLAAGFYHHSQLSHAASTGEILPELPYYGEYLQRHVGFGTGELSDPPEKRFGRIANPTVHIGLNQVRVVVNALIKRYGHPREVIVEVARELKQSQEQRRDTQEQQAKNQNRNERLRKLAAELLQIAEERVRQADVQKLVLWEELSFDVTDRRCPYSGVQLSATMVLGEQVEIEHILPFSKTLDDSLNNKTVAMRLANRVKGNRTPWDAREDFAMQGWDYDSILLRAERMPRAKRSRFAPDGYEKWLRDDKDFLARALNDTRHLSRVAREYLSLVCPAGTRVIPGQMTAMLRAKFGLNNILGLDGEKNRDDHRHHAVDACVIAVTDQGMLQRFAQASADARGKGLDKLVETMPDPWPSYRAHVKRAVDAIWVSHKPDHGHEGAMHNDTAYALLGDGRVAVTKVVDGHRQREESTLKVIEFSSRSALDRHGQLADGSPRPYKGYKGDSNYCMEIVRDDSGKWSAEIVSTFDAYQAVRMHGLRRLQTRV

SEQ ID NO: 9126 - protein, 1357 aa, unidentified
  REGION 1..1357: note = Description of Unknown: Cas Enzyme sequence
MENSKSNELKKWYLGLDVGTNSVGWAVTDPDYNILKCKGNATWGINLFDEASTAAERRTNRTSRRRLQRKKQRIAYLQEFLAPEIAKVDDKFYIRLKESALWAEDRTTDNHLFVGELNDKEYNRRYPTIHHLICELMEDDSYHDPRLVYMACSYILSHRGHFLIEVDENNVDNVTDFNSIYEDFVHWFDSCEVSRPWECNQIDFGNILKRKTSINTKKKAFYDLLFQGSKPTSSEEDIVSKETLIGFLCGGKIKLSALFNNEEYSELEKDSITASSDSFDDDLESLSTSINPEEFDLLTIMKKMYDWSVLIDILNGEKNISLAKVKTYEQHKEDLKCLKALIRKYAPDRYDLVFRKIGKEKNYASYSYNCKDLGKNKEIPSDYCMSKQDEFWKFLKGIVEPLREQIEEQDKEKYDEMMLRIEMNTFLPKQMTGSNRVIPYQLYYAELKKILENASKYLSSLNISDEYGSAKDKILSIMKFRIPYYVGPLNNHSEFAWIARKEEGKITPWNFKDKVDDDQSEENFIRRMTCKCSYLAGEDVLPKNSLLYSKFNVLNEINNINIDGQKISVEIKQDIFENLFMKKRRVTYKAIVDHLVSRGEMTNNQSLKGVDDTIKSSLTSYHDFLPFIRDKKLNERQVEEIINRITLTTDRERLERWLVSTFNLSKDDARRISRFHYAEFGRLSRKLLTETRDLDIETGEVRREENIIQMLWTTNENLMVLLSSKYGFTAHIDRENSEYNAQHPLSLDQQLKEMYISNSVKRPILRTIAIVDELRKLMGCDPQKVFIEMARGAREEQKNKRTKSRKDTIRELYAGYDKNEVAEILSKLEGYSDDQLRSEKLYLYFIQQGKCMYSGEPIDIEELGTKRYDVDHIWPQSKIKDDSLDNKVLVLSDLNGKKSDNYPINEEWRSRMYSTWKSLHDKSLMSDKKFERLIRNTRFTDEELADFINRQLVETRQSTKAIASVLSGKMPKTDIVYVKAGLASEFRQDNDIKKCRDVNDLHHAKDAYLNIVVGNAYDVKFTKSPMNFIKSGQQYNMKLEKMLSHDIERGGVMAWDSKNDVTLNRVLNTLQKNNIRFVRYSYCQKGALFDLMPVRKGNGQVPRKENLDINKYGGYNKQTFTGFYLVRYDDKKTSEVALVPVPLIIAPLLRTNEDIKAYCIENGYMNAEVLLNGRLIKTNSLWEIDGYRVTLSGKSSGDIWFRGAQQMVVDNKKEAYIKKLVKYKDKSVGKKELPKSTEHDGISLEENASLYDFFADKLTNTTYRTLMPTASDVLQKGRDTFLSLSIEQQVLALLNVMALFGCGDSHGKDLTLIGGVKSSGIQRMTMKLNRKRFKDIRLIDQSPTGLVERRTDNLLML

SEQ ID NO: 9127 - protein, 1017 aa, unidentified
  REGION 1..1017: note = Description of Unknown: Cas Enzyme sequence
MPTVLGLDIGSTSIGWALVDDSTGQFKACGVRVFPEGVDRDQKGGEQSKSAARRTARGMRRQVARRARRKRRLYRLLTSAGLLPAAPDHVDRLVNSDPYVLRQRALSERLEPHEFGRLLVHLNQRRGFLSNRKSDRDETQQKGLLKEISELESAMNEVQSRTLGDFLANRISTGTNARGTPLVRVRTLHTRRSMFEEEFDAVWGAQAAHHPSILTPALRDRVREEIFFQRDLKPPPRWLVGKCELDPKQKRCPRAERPAQRFRILQEANNLALIDRATGEVRTLSQGERAIVVDLLSRKDKVKFDDIRKKLGFLESVRFNLEGPDRDKLKGHETDHKLAGKTAFGKEWWTLDAPKKDLIVRILIQETDVEKTVSRLTSEASLDDETARRIAPLNFPEGYSSYCRAVIERLLPHLERGLKVMANDPSDSAVHAAGFLRPDQREIKTHDALPPPPPLTNPIVRQAMYEVRKVVNAIIHEYGRPDIFRVELAREARMSFDQRKRLRFDNADRQRARAAAREEIERLGSKPTGEAIDRWILWKEQREQCIYSGRTISPAQLLGGEVHIDHILPRHRSLDNSKMNKVVCFRESNADKGDRTPREWLEGSDPSRYEEVLQRADRLPFGKARRFGEKSIVLDDFVNRQLTDTAYISRATSQYLRCLGAKVETQRGQMTADLRRLWGLNRILGASENRKSRDDHRHHAVDAAVVALTDKKRLHALANGNMKYINPPFDGFREHVAEAITSIIVSHRVRRKVCGALHEETFYGATQKRPLARRMPPGGQTRQWAKGWTEDIRAFVRRKPLSALTKVADLDKVRDPTIRALLQAHLKALTPSIGPADKLPKGVFDGPNTPKMPSGVPIRKVRMIEESETIEPVSDRRAFQNVKSGSNHHIAYYEVVDKGKKRWEARVTTMLKAARRACATPRQAIIDRDVVEGGRFVMALAIGEAFTIEDAHGPPRVCIVRQADQRSMRVYYKEHHDARESSDLKKENLYFSPPRMRDAKASKVTIDPLGRIRRATD

SEQ ID NO: 9128 - protein, 1423 aa, unidentified
  REGION 1..1423: note = Description of Unknown: Cas Enzyme sequence
MSNKNILALDLGTTSIGFAHVIEGDTPEQSSIIRIGVRVLPLSTDEQTDFEKGKPISVNADRTLKRSMRRNLNRYQDRRKNLIDELIKANIITKDSILAEDGKNTTHKTWGLRAKSVTEKIEREELARVFLAINKKRGYKSSRKAKNKDEGQAIDGMAIAKQLHEENVTPGQLAYRLIKEGKKYVPDFYRSDLQSEFDKVWVCQQLYYPEIFTNEFYKELQGKGQRATAASFWGKYKFNTAENKGSREDKKLRAYEWRSKAISEKLEKVEAAYVITEINNNLTNSSGYLGAISDRSKELYFNKETVGQYLYRQLHKNQHTRLKNQVFYRQDYLYEFEAIWIEQCKHHTELTNELKIEIRDIIIFYQRKLKSQKNLISFCEFENREMEIERNGNKIKKTIGLRVAPKSSLLFQEFKIWQVLNNVLIRKKGSRKRTASTNEKDKEVFEFDLHAKQQLFDELNIKGNLKSDKALKLLGYKPEEWELNYSELEGNSTSKALQEAYLKILDFEGYDVRDLLKVKSNKDEIALDDLDVPAVEIKQMIKSVFETLNVNIEILDFNAELDGKSFEQQASYQLWHLLYSYEGDDSASGNEKLYESLEKKFGFKKEHGQILANISLSDDYGNLSTKAMRKIYPYVKELQYDKACAEAGYKHSASSLTREEIANRSLNDKLELLKKNSLRNPVVEKILNQMVNVVNTLIETNSKRDHDGNISEYFKFDEVRIELARELKKSAKERAEMTTNINAAKINHEKIIKLLQGDFGIKNPSRNDIVRYKLYEELKNNGYKDLYTDQYIAREILFSKQIDIDHIIPQARLFDDSFSNKTIVFRNDNLKKGSRTAFDYIESEYGEEQSAAFLKRIENLSEVGKKNKEEGISRAKFQKLQKKETDIGDGFIERDLRDTQYIAKKAKNMLYDISRSVVSTTGSITDRLREDWDLVNIMQELNFDKFKKLGLTEKVEKKDGTFKERIVDWSKRNDHRHHAMDALTVAFTKHNHIQYLNHLNARFNETHKEYRIIKAIEEKETHIIKDDNGNSKRVFNLPIPNFRIVAKEHLENILVSHKAKNKVVTKNKNKTKTAKGEKVKTELTPRGQLHDQTIYGSNWWSRIELNKKTSRNEIDKIIDENIRTFLQDYIKEKGSISKAFSDGELSKLKYNGNELKEVEVSIPCYTQRIDIVKIFTDPQKTNSAKEKNIKNILDLEVRRILQSRITEFGGDYKKAFSDLDKNPIWLNRDKGISIKRVTISGVSNAEALHYKKDHFGNEIVDKDGKPIPVDFVSTGNNHHVAIYKDEEGNLQERVVSLFDAIQLVNVGLPVIEKEFNKGLGWEFMFTMKQNEYFVFPNEQARFNPKEINLLNPKNNKLISPNLFRVQKIATKNYMFRHHLETNVEEKKGLVNIAYVNIRSTNPLQNIVKIRINHIGQIVKVGEY

SEQ ID NO: 9129 - protein, 1542 aa, unidentified
  REGION 1..1542: note = Description of Unknown: Cas Enzyme sequence
IPTDGEYLKKFEEGNTAGTETKAAARRSKRGARRLKHRYKLRRTRLIKVFKALNWLPHDFPLDDSKGFKKNIRENHDLKFSISDYLPFSEKTILEFEKELGIEGKKSKKKGSRKGGKSIAPEDWVIYYLRKKALTQKIEVPELVRIIYMMNQRRGFKSSRKDLKETVVLPYEEFISKKEKKEFGENGIETQFVSITKIKSVIFKEEKEVKKGTKTNVYTINAEDPRMESWEENRNKQPEWEGKEVTFLVVQKIDKNGKFTQNKPQIPKEDDWGLCTTALDEKINEQVYPGKYFFDELQKAYKENRDFKIRQYPVYRWRYKNELEDIWKKQCELNPELKRINSNPDLLLRLAHILYPTQAKYNMPKLSEFKTHDLLHIISNDIIYYQRELKSQKNSISECRYEKRKGIDGEMYGLKCIPRSSPLFQEFRIWQDIHNIRLLEREIKEDGKTRLDVDVTDTFINEQIKEKLFGLFNSKAAITEKNILELIKENKPDNNINLDIDKKEKIHSHRINLYANRDELKGNETLNRYRSLFKKSEFDGEDILTDNEKLQKLWHIDYSITSSDEDRSKNGITTALNNLLEDKPDKGKLIELFCKLPELKKEYGSYSAMSIKKMLPVMRCGKYWEEKDIIQTVKDRAGQILERLNDINHNIRRLSEIADDDVQKQVLKSFIGKEDLTKELGTYQAGYLIYDRHSEKIKSSIDSAEEFSKYIQKEIPNNSLRNPIVEKVVREAMFLVRDIWRKYGTIHEIHIEIGRDLKNNSEERKKIADVQKNNFDEKQRIRLLLKELLNDGFDQYIDTEDSKPFEWKTEKESGKQFEVKPNPESPVDIDKFRIWRSLSKYTDADWDKKVKDEKIPTEQQLKKYALWLSQNCRSPYTGKIIPLSKLFDGNQYNIEHIIPRKRLKNDSFNNLVISELGVNKAKDNQLAANFITSSNGKCSYGGIEYKLFTYDEYDAYCKETFRFQKSKRKNLLATEVPEDFVQRQLNDTRYIGRKLSELLSPIAKNEDGSLNENGILFTIGSITSELKKKWGLNAIWKDIVRPRFERLEKITGKQFIIPDENDPNKYHFDLRENPKIELKRIDHRHHALDALIIAATTREHIRYLNTLNAADTDEEFKRFRLTLVKGKIRDFKEPWSNFSKDVKDKLEETIVTFKANNSIISKPQNKYISGYTEKGKPIKFEQKENTRWIAVRRPMFKEPQGVVYLKETYEEKNILKAIQIQIDRMCVQDTPAMRLAPYVYDKEARKIIKDLIGRIGISINEKDDLLNEIKKYLKKNKIKDFAGNEYKSIKIAEFQEYAAKRVKLDKSFDHKKIDKIPYARIGKSVLGTLLHSHLNSLEYEGKPELAFSGEGLEVLAKQARRPITKVTIVEKKDSSSKFGSQYVEVDAGANAYFIMYENNKSKKREEFLSIAVHKAIERMNDKAKQGIADERDGYHLLTLSPGELVYIPTKEESEKIKTGREVEKAIPWEDKKYLKERIYKIVSFSKKDLLCIKANISDPIIPTSIKEKIKGEIDWHNKSTTTMEADVTIKDVCIKLKIDRLG

SEQ ID NO: 9130 - protein, 1196 aa, unidentified
  REGION 1..1196: note = Description of Unknown: Cas Enzyme sequence
TPLISRTVEHVDFKTRKVKKNIHGKARWRKKKVGGRWVLKSNADSRLEKEFGKLDDQTCYTSCALRIKLLNGEKLEAWQIYKALFSAIQKRGYGDVPWKEQRKTSDEKTKDAQEEAENAVAGKRWTDFSQHPEIAKLGEDYKRACYFDAWHMKLWHPASSKHVELHPVERSESTQKVVFPSRIITEELLLLGQKAAQQETKLNEAFLKVMETWKVRVKERFARVNVHRAQLGNRLLPVPDFSRGAKDFAELLAYGPGGAPSEGKEGVRHIPSHDSAIRRATGLRPGGPDDAMGALNQEVARFDNRLRSPCAMIPRLTVCRNLAPDELAAVKEDASEKLLPAQVTFLKKLKDMSVEERTDAREQRGLKAEELREMFADLNAKRKYHLTKREWRDWCSHFRLLPVTDPEDKAAAKKADAGLASAERKKSDDFAVDRPRTAGRAGFSRPALRLLKELLLSGLSPLEFHAKLTAREPELLNKVGIDILSEAPVVMKVSDKGNNYATYQKRPRPWLLVSDLEFLKRMGKDGKPADSWGNLYIPSQQLDRLAQETEASPAERQAAIRALIGQQNNPIVRHRLETFWKRLQKLQGRFGVPHRIVLEFVRDDSETSWLGAEAAGEITKAQKEQRGRRERARKMLAEMGQPNGDVLKFLLWEAQGGQCLYGTDGKVQGEKLDPATGESFARCPYLNTGLPFTSLHKFRIDHIVPRAKGGPNSFSNLILTTDEANASKGDRTPWRWFKDDRSLADWDAYKSRVWSRVNQLGFKKVRLLLSADAEKLVERYTPLAETAWIARLAQTVASLHFGWVNGNDRDGNKRVITVSGGLTGRTRRKYFLNSLLGRDRELDRKISEKLDALAELRTSSLPREERKAKARALRSELDELSAESEKDRADKRHHALDAMVLSFLEGWVNDPNREEEFRFALLGDNPAFPPEREAEVRQLRQKIIALGSVTEKAKSAEERTRINEQIIACRDALAAMRMERDVRVVRAAFRREIEGDNAARIAPVLPLPLHYPKPELEATFHRGVWLRVESESRAARATIDDFDKAFEQERVGLADLPRLEHHVTEQLEYSVAHGLRRIAEIVPHKDYDSKAVRAAVEQFLKTQPTEEQWNAWCAGDAAPAGIKPKKGQPDKREFVFYKIEEKRTKRVSLFDLGVGSNEVPEFDRTHFELQAARLVCRPERGKDQPEISLQPDTELQ

SEQ ID NO: 9131 - protein, 911 aa, unidentified
  REGION 1..911: note = Description of Unknown: Cas Enzyme sequence
MKKTISYRLGLDLGTNSIGWCITDLGKPDEGGRKHPVRIRRMGVRIFPDGRDPQSGASLAAARRVPRSARRRRDRFLDRRADLMKLLISHGLMPADPAARKTLEDLDPWKLRGDGLDRPLTPNEFGRVLFHLNQRRGFKSNRKTDKKSDDKEAQGMKAGAVALAAKLDGQTPGHRTLGDYFFTAYRKGRTPRGAPDGSTQAMAPVRFRAHAGKGNKLEWSLYPTREMIEAEFDKLWAVQAAHLPALTDEVRDAIRDSIFYQRPLRPVEPGPCTLDPDLDPPQRERRAPLALPLQQEFRILQELANLELRHRRMGEIRRLSRQERDKILFELKRRDKYSFTQIRKLLGIDNVWSFNLQSDRREGLKGDIVACRLAKDGFGKSWHDLPIEQQDEIVSFLLDEEREEEVARIATTSWGLSQEVAAKIASTSLPDGYGRLGRTALAKIVYQLRHGASLKEGGLLHYDEAVQAAGYRHHSDFRTGEVFTEAPYYGEILERYMVPVSSTSGSPEERQHGRIANPTVHVSLNQLRRLLDALIKAYGHPDEVVVELARELKQTQEQKRETQTRQLENQKKNERRKELLEAAGIPLRGDALLRMRLWEELGENVADRACVYTGEPIGIKTLFSAKVEIEHILPFTLTLDDSPSNLTISMRRANRDKGNRTPCDAFGTSPTIGDLTYDWDGIALRASALPKAKQWRFRADALQLIKDKLLREEERAKGSLPRDVMEDIASTGGFLARQLVDTAYLARVARQYLASVVPSEKVDSVMRSNVWVVPGGMTGMLRRLWGLNRYLWGNRPDAADEGPDDWRGKLRTDHRHHAVDAFVLTLIDRPLLNSIQFQSGQSGRRMIDDMPDPIQWPTFREDLKARFDRIVVSYKPEHSASGRLHEETAYGIVRDPEREEGATLVYRKSVS

SEQ ID NO: 9132 - protein, 1143 aa, unidentified
  REGION 1..1143: note = Description of Unknown: Cas Enzyme sequence
VGVSYRLGIDVGTNSIGWWALILGPEGRPIGTLDCGVRIFSDGRDPQSGASLAQARREARAARRRRDRFLLRKSDLMEALVGLGLMPADVAERKKLEALDPYRLRAEGLDGALPLHHFGRALFHLTQRRGFKSNRKTDKGKDEKAAKETADMKGAIRETSKLFSEKGYRTLGEYLWKERREDRSVRGAAGADFADRMLRVRARPTIGKGGRNEYEMYFSRDMYRREFDALWDEQAKHHEILRDRAAREAIEGIIFRQRPLRDVEPGPCTFVEGDKRAPLALPIAQDFRILQELANLEIADNRGQNPRRLNHAERDKLFVKLKRRDKLTFKGIRQELKLPSDSQFNLEDAKRDELKGDRVSAALAGEECFGPSWHEKPEAEQTAIVDFLLKEAEEAAVIAKATAEWGLSAEAAEYLSAVRLPDGYGRIGLTGLRAILPHLRDGVSPKDGGLMRYDDAVAASGLGHHSDSRTGEIMDQLPYYGRLLQRYMAPVQSPTAPADERTFGRIANPTVHIGLNQIKKLINDLIAVHGHPAEIVVELARDLKLNAEERERVKKEQAENKKKNDARREKLREQGQEDRGDGLLRMRLWEELNADNVADRKCVYTGKQIGIEQLLSDEVEIEHILPFKLSLDDSPANLTVSCRWANRLKGNRTPCEAFKDSPPAGTTWDDILLRMAELPKNKQWRFRPDAMELVRDRAKRALEKARGALSKEELDEIERAGGFLARQLVDTAYLARVARQYLWHVCDPNKVRIVPGKLTALLRRHWGLNRLLLGNKPDPEEQGEVATKSRDDHRHHAIDAFVVACTDLSMLQRVSAAADQERTRLIDDMPPPWDGFHRDDLKKYLDPMVVSLKPDHGTPKPPHVTSGRLHEETAYGIIYAANRQDSDGDATLVYRKPLTSLNANEIDRIRDPKLRRDIRAFASTLLFDDDALEIAKGALKAARKTKARSAIAKAEAEIERLKAAKKSQKKSAGKDLRARLQEFADKHNVRRVRLLKTEANPVEITGANGTRYKAYSPGDNHRVEIFRKFDGTLGAEIVTVFDANRRSFVPAWRADNGNKHLMTVRKNDYVKLQANGKERVMRVVSVWERYLQLAEHFETNLAERYRGGDFKWTFANYDKLHEMRARPVTVDVLGRVRDPGPPN

SEQ ID NO: 9133 - protein, 1129 aa, unidentified
  REGION 1..1129: note = Description of Unknown: Cas Enzyme sequence
MRGFCAATGGMPEADAVKYRLGLDLGTNSIGWAAIKLDDGGEPCGILDMGARVFPDGRNPKDESSLAVQRRVPRGMRRRRDRYLRRREDLMEDLVSFGLMPPDEEAQKEVEKLNTYVLRANALDAQLKPYELGRVLFHLNQRRGFKSNRKENAKADKEKKTNLEKISALRRQMSETKARTLGEFLAHRYAQGEAVRARAETGLYADRFMYEAEFEKIRLAQAERQHLRPEQWDHLHETIFHQRPLKPVEAGLCLLEEGEKRAARALPIAQEFRMTQEVANLRLRDGFEPERALNATEHENALKRLRAGKDIDLQKPTRDLGLPDEAEFNLSRGGRKKIKRDEATTVLSKDDCFGKRWFEMSPGQRDTVVQTLLANDDPAAVKKIARESWGLDEKAAENVAAVDLPPGYVKLSVKAIEKILPFMADEGLVYSDAVERAGYTHHSDFRSGAAHDRLPYYGEALPLEVIGGGATDPKADDPARFGRIPNPTVHIGMGQLRRVLNRLIEVYGKPETITVELARQLKMNREEKVELERRQREGEARNEAFKKNLEAAGRQWTPETLRKLRLWKEQGPEQGLFCPYSGKVIRFEMVVSEQTEIDHILPFSKTWDDSPSNQVVCLRQANRDKGDRSPFEAFSSNPPGYDYEAIKERAKQLPQNKRWRFMPDAMERFKDQAEFQDRQLNETQWLSRLARKYLAYLYDEKGEGRLRVRASNGRLTALLRRGWGLNGILDNHSLSGERTPAHGGGAPQNSPLPAGEGEGEGEDSRTDNTQGKRRDDHRHHAVDAFVIALTSRGLVQKISKAAEHLPEEELRALANKDQLKPWPGYRREELLPFVNRIVVSHKPDHGTPGVKGKTTGQLHEETAFGVIKVQDQNGKNAGATLVQAEVVTSKKLDKFKKKEDLGAVRDPKMREVLMALWDSAAGKPAEFQQKAWTAGVKLGARTFKVRSVRVTEDARVVPVRDSAGNVYKAYKPGGNEFADIWEMPDATQLAPAPGKRRRRLKPGEREWRMEVVSTFEANQPGFNAANRRPHPGAKHIARLHINDMCAFGAGFDRKIVRVVKTGIEGGREFVYFVGHREANADTRVRSNELKYLKKSAEALRKEGFRKVGVDEIGRVRDPGPRSGGSFAAH

SEQ ID NO: 9134 - protein, 991 aa, unidentified
  REGION 1..991: note = Description of Unknown: Cas Enzyme sequence
INGKKNVIYSYEDIWHVLFTFDNKEKLKEFALNKLKLEEELAEKFSKIKLEQGYATLSLSAIKKILTYLQKGFIYSEAIYLANLHKVLGIKQLSTEISDHFAEEFPGITELHKKKKIALSVANGLIARHISNEYRYAIEDNRLLDEPERKEVQNALIDTFGDKTWNNFSETESQWYIQQVESYFLDFLKKSLRSSRDKLFYKIPRLHDAVFEWLQQTYQAPDEQKKYLWHPSEQESYPNAKEYRKYVKDNREYYVEADKCEGFEKKYPDAVWEGIALRLLGDPQPISRGFKNPMALKTLHKLKHLINYLLKSGKIDEHIRVVIEIARELNDANRRKAIESRQRFREKENEDFAKAIIGTAKIKYPNLNENDPAVINKFRLWFEHVENGQELLKQVRALKDDIAKFRLWSEQKGQCIYTGKMISVTELFDGSKFDFEHSVPASESFDNELKNLSIADTYYNRHIKSDKLPTQCPNYEREVTIDGVTYSPIKPRLQWMEEKVKSLEKLYLEWQKKKSDDKAAQDAIIQKRHLLKFDLDYWRYKLKTFTCTEYKAGWRNSQLRDTQIITKYALPYLKTIFKKTEVQKGEVTAAFREIYRIAPRLEKKDRSKHSHHAIDAATLTLIPPAAIRDQILLRYNEEKDKDINAVYHEAVRGWKNYQSSHILSIQDDVLINNLPEHRTVVQAKKMVRKRGKIQYVKHKNEKGKWVYKLDDYGNKIALVTQGDTIRGQLHLESLLGKIKNNGEFIMVERYPVSAFTSMKDCKNIVDNKVREIVEITLKERMDRGQNFDEAKLTPIPFPSGKAIIKKVRCRVAAGRGYLTPEKAMDLRRLNFASQHEHKQYTYAQNSDNVLCIFYEGNVNGKIEGAFKIVGLLDLAKLKYKKSEEIINEPYYQNAEVGRGKNKAEIPYSYILKSGTKCIFYKETIEELKTLDKNKLLNRIFRVYKFNEMGTPNIHLQNHIEAKPDLDDGDTFFDPDKYQYRLKLKADKFTCA

SEQ ID NO: 9135 - protein, 1792 aa, unidentified
  REGION 1..1792: note = Description of Unknown: Cas Enzyme sequence
MKNILGLDIGTNSIGWALIQRAENENEKDEIIGIGSRIIPLGDDKGNFESGKKLTRAADRRITRQSRRGNHRYKLRRNKLIYVLYELDMLPDFFKIGYEKKNENGYKEKILNFLPAPEKLQSLFIRNLEGRKDEEKYKNENGKLKYKKDEAEYLLELRTRALEQPVTLKELGRILYLFNQRRGYNGGGDEEKQNVKVKGEDTFVKKYETVIIEKELEPIQETDKKNKIWSVELVNTETGEQLKGKCYAELKTDDEIEVEMIKKSQEDTFGFFELVGFSKKYDKAKSTLVSEKFKAKIIRCKISQETSHKKYAYDIALKDDERKGKFYLKDIKKIKDIKIGEEIELEITTYYNEDESIKKIDFALPYKTNWKKNLEAIEKLISERKKIKEDAAELDSTGKGNYHVCHYFLDKIKEEKNTYYRLKDNVILRKRYQQEFEAIWKKQSECNEQFKQLLSNQELLKRLVWYIFPGTGKNKLNFISEQEKYRIATLTHEEGLHNLIAKQIIYYQRQLKPQPDLIGKCQYEKSKPVIPKSHPLYQEFRLWKQINQIFLEEKQPEGITPKYKKVLLTQEQKLKLYNTLFEQKQIIFDGIIKATGLKQQGKNEEKKYFVKGYNKKYVIGNETYYTIQSIFKKEIGKEKGMEVFKQIFSEDFYNIYQNTDFIFLHDKMFERIGNEMDEDDDRVKSIREFLERKISDNLINIKSLSLKLAQHKFSRQYGSLSKEAINNLLPLMKPVEDKMLLSETYKNEITKLENYYQQFKDDKEFKAVEIKNTNGENIKEWEKGLVIKFLKEYYELDESLYKGGWQEYAAAQLIYGRHTAKEPDKLIEKYHDVKPIGKEETLRNPVVEQIVNETLQLVKSVWKQYFGNNKTPFNEIRVELARELKNNAEEREKIFKAAKEGEKMNKEAAYEIMLLEYEKGGKKVKPKNDCVSDGCNSSCREFTQIPTAGQILKYKLWKEQGMVSPYTGQPIPLCKLFDGSQYNKEHIIPKQRFFDNSNTNLVIAEKWVNDKKDNLTALEFIEQCKGLNGILPLVNYERFIRKQFSGRKKNNLLLKEIPEDFVERQKKDTQYITIKVREKLAEIVGLQRVTTTTGSITDYLREHWHLNDAFKKISRERFELMGELTTEGKENWAYCKEVENKNGGYRKVFIIKEWSKRLDHRHHAIDALVIACTSQGQITQLNNLNQLLQKTVEEKKDSLKIDEGETPMQAFLKLTKEEKEKILGEMESNRVFDLPWPGFVKEAKENIETIIVSHKPKQRILIQNKDDKKTKSKLDELILKIRSKLHQETLYGLKEDKNAAIKTINIKSAFDFADFIIDAEIKKQVQQRINDSGENNEDAKETLSDEPIIDIKGKKISKTDIQVTEKNIYRFPLEKLGQKKSIKSFIEDNIIGEDSRAFLFDHLHRYCFLEIIEDKESNLFNNKEEKKMLAETFLSDKTLITAERVKQFYEELNDNGIEKKLNESLNGKTAFSDEGIDALTTFRKEFPTKKGKGLPKINAVKVLYATGNSAGGLQPIERINGQIDYVKTGDNYCFAILQKGNERIYKCITFFDAVKWVTNKFGMNKQTAFNFPKNYFDRLKYVEDIIRNKLKSEDTELLYLLQQDELVYLPVDENDAHEFHSVPSDSGKEEYKKYWFDKERKRTKRIYRVVKFTGDYCFFTPHNFSTPIWYRPIDLEEKDGIKIHREREIPKKGLKEYDTKDNCSQFVFNKAYIDFLLIDKKAKEMNKEAKKLTGSQAKEKKEEAKKLFDSNRNFEPILIQATCIKIEIDRLGNISFPSTKINEYDTEPEKNK

SEQ ID NO: 9136 - protein, 1510 aa, unidentified
  REGION 1..1510: note = Description of Unknown: Cas Enzyme sequence
MKILGLDLGTNSIGWALIEQAFDERIGKILGLGSRIIPMSQDILGEFDKGNSISQTAERTRYRSVRRLRERYLLRRERLHRVMNILGFLPEHYASQIDFEDRLGKFINEKEPKIAYKPIWNEPKGKNEFDFIFKRSFEEMLDDFRLHQPQLLVNEKGEDLLIPYDWTIYYLRKKALTQKIEKVELAWILLNFNQKRGYYQLRGEEDEASDKKEYVVSLKVIRVEKGEKDKKNDKKYWYTIILENGWTYSATFSSEPLWLNTVREFLVIEEVDENGNIKIVKEKKTDKNGKEKRRITPLPSFEEIDLMSKADQDKIYKKIKAKTEITIADSGKTVGSYIYDTLLQKPNQKIRGKLVRTIERKFYKDELRQILQTQKEFHPELQSNDLYNDCVRELYRNNEAHQLLLSSKDFLHLFLDDIIFYQRPLRSQKSSIGNCTLEYRRYNDKDGNEHTQYLKAIPKSNPYYQEFRTWQWMHNLSIYKKEDDTNATHDFLNSKEDWEKLFDFLNSRKEIEQKPLIKFLLEQKGLKGKLLNAEVEKFRWNYVEDKKYPCNETKTLISTRLEKVENIRDNFLTREIEQKLWHIIYSVTDKVDYEKALKSFAKKNQLDIDSFFEAFRKFPPFKSEYGSYSEKAIKKLLPLIRLGKYWRWATIDEASRSRIEKILTGEYDENIKDRVREKALHLTQEDQFQGLQLWLAQYIVYGRHSEAATSGKWNSAEDLEQYLKEFRQHSLRNPIVEQVITETLRVVKDIWVKYGNGAKDFFDEIHVELGREMKNPAEDRKKMTNQITENENTNLRIKALLAELKNDVNVENVRPYSPMQQEILKVYEDGVLNSNIEIEEDILKISKTAQPSTADLRRYKLWLEQKYRSPYTGEIIPLNKLFTPEYEIEHIIPQSRYFDDSFSNKIICETAVNKLKDNQLGYEFIKNHHGEKVQIGNKTVQIFEVTAYEDFVKQHYSKNRSKRNKLLLEEIPDKMIERQMNDTRYISKFISSVLSNIVREEANDDGVNSKNVIPGNGKITSELKQDWGLNDVWNELILSRFERLNKLTNSTHFTAWNENHQKFLPTVPLELSKGFSKKRIDHRHHALDALVIACATRDHVNLLNNKHAKSKERFDMNRKLRIFEKVAYNHPQTGQRIEKEVPKDFMKPWENFTVDAREALENVIVSFKQNLRVINKATNHYEKWMEKDGKKIKESQEQKVVNWAIRKPMHKDTVSGKVELKRIKVPKGKNLTATRKSINTSFDLKTIESITDTGIQKILKNYLLNKGGNPELAFSPEGIEEMNKNIEKYNDGKLHQPIYKARIFELGSKFPLGQSGNKKAKYVEAAKGTNLFFAIYQDPEGNRSYETIPLNIVIERQKQGLNAVPLENEKGDKLLFQLSPNDLVYVPTEDEIEGKHLTNMQTVSKNQIANIYKVVSFTGNQIFFIRHEIATSIVNKAEFSALNKMERAIDGKMIKDICIKLTIDRLGNIHAFESAPTKFDVAATKILKSKRELGTENDKESEIRLQQPPI

SEQ ID NO: 9137 - protein, 1715 aa, unidentified
  REGION 1..1715: note = Description of Unknown: Cas Enzyme sequence
MKKILGLDIGTTSIGWAIVEAIDTKIASEKTGKTAVSDINNERIGIHNNAIGVRIISQDSKNADSFNKGEKLNTGRTLTPSAKRRQARGSRRMKSRYKLRRGKLCAILKVLNMLPDGSYKQVLNKQGKLIWKPIDNENTKWFTKIREFEKDGNGKKRRKKRESDIGEALYKLRNDAINTQIDLQEWGRILLHLNQWRGYSSDRFKASDKEETQAGITATVIKIENGEEYTVVQKQKNQSKEVTYNTFIIHFDNGDTAIEIRSKENTESDFVVDELYTYTFKNDYEINGYKQINKKKTDTNSWAYRRKELNTGLKTWCQSGGTAGSYFYKKYYADKTIDRIRNNVVDRDWYEDEFDKIWNFQFEKHKTHFQNLNIEDIVKVAFKDFNTILNDVQKQNGIKEQLRYLIKEKIIYFQRPWQQAKNKGECPFEFVPDVKKEKNGSFAPDMKGKKVIDKNGKEIFVKGRTVIPRSHPLFQEYKIWQQINNVRLFLNTKDERIDLFSDNELFKQYTEKTIQEVKQLLFEALQKSKTLSWRVFVKDVLGIKSLFDELENKQGRRTNKGVDTETGEIVNTYFSVNFRKKKKDGSYDDIKLKGNTTKATLQNILNDKTDEWFYQIHSDKQAISNLQLLWEIIYDITNSKAEEVARIIKKHFDFEDVVCNQLAAVKFDDTGMGNLSAKAIRQLLPLMSNGNNLTEKAKKRMESLITLNNNEQKDDDDRLASIKNFVSDKKSRLRLSEFSKAEDFRYLSYWEAAAVVYGSHSSKKTITQPEIQKVKQHSMNNPVVEKIVNETISVVNQIRKTYGFDEVRIELSRELKASMDERQQMWEAMQAGNDKNEWAKKMLRELKKALIEDKRSVDNINDETSTKSNLDKMRILEDVVKYQQKEEYKKKEKEYKLDEPSKAEITKYLLWLEQNFKCPYTNQPIPLTYIFARGKVVEIEHIIPRERFYSNAYSNKVITWREINQAKGNKTAYEFVVKDRFQNPLKIGNKEYSLVPADQWQEHIESMFPKGAKRNNLLRKEIPEEPIERTLKETQYINKKLKEKLAELVGESKVWITSGTVTDILREKWHLNDVMKDLLRERFENFNIGESKERFNLVHWTKEFNKKTSKYEDVEKFTGFSKRIDHRHHALDALIIACTKQNHIQYINNLNKIYTADREDEDAKKEKYIELKKEICIGNSSTTFKTPWDKDKFIVDVKNSLNEVIVSHKNTRLLISPSKHRVDKEIKSGKAASIRGELHKETNYAKRNYFNYINPNRIDISKLIPLLFKKKKENQFQTMVFPKSFQDIIKETVLIETYQNILIPLFAEYDNEKLNDTLVKKHSEAVLKKIKDEKLLTDSKKQQSLQWLSVFDDKNKSSRPLGLSMDLNSAKEIKDIADPRIKRLAEYRLSYVNSRITEIDKQDLDKKEKDKQKAEVKALKLYSNAIYEVRIKKGENQFRWVELKDLQSSDLEKISYAKEKTTKLIKEKLTKYDLGELKKTYFEKPAFLSERPIEVKKVRQKSWFQDLYEVTKGRYVYSLDTFMVYFFQRKDKNSSSLVGKIIPKFLKFIDAVAIVNNEKPTSVDYQKLIEKERTNEEFQSDVRYDLLFTLAGNDLVYLPEKELTEGEIKEINWNDFKSIQPFLFVVKDMNPSQNKIVFQQLYKSDSITISSDDAKELFDIESKNGLSEEIKYGTVDMLQRCIKVFTDKLGKKVVPYWEFSNGCGNRESSKASELV

SEQ ID NO: 9138 - protein, 1847 aa, unidentified
  REGION 1..1847: note = Description of Unknown: Cas Enzyme sequence
MKKFLGLDLGTNSIGWALIAIDHENGIVKIIALGSRILPMDAGEIGDFETSGKIKSAAAARTEKRGQRRLNERCLLRRDRLHLALNLLEALPQHYKLEIDFTNEKGEKCGQFKTNKEPKFAYSTKNLGQKVEFLFMDSYEEMLNDINYEGVRNEKGKRIPYDWTLYYLRQKALSKEISLEELAWVLLSYNQKRGYEKLDVEDKSTEENEIVEELDLAVKEVTPTADKEGNNIFKIQLEGNDSFTYSEDSYKQISFKGDMKEVLKVSQTDETGKTDEKKTKFTITDIYELEIEDVKYERTDKGNPHKYSLHFTNGWVHSTEKKKYTSQFNKLKGKSFDYIVTSSFDYKGNFKERSFRAPDYNSETSKDWTLLKKKTEKDALKFNIDKGYKNEDGSAKNYISPKIYSILNNDAKTGERTKIIGGMFQVVEREFYREELKQIIATQREFHNSLKDSALFEKCVKTLYPKNESQAKNLLSNKDTFEHLLVEDILLYQRPLKTKKSEIADCKYEIRHWKELRDKKTGKPIEVVDKETGQSAIIKEAVYRKAVSASHPYFQEFRIWDKLHNLRLIQLERETDGKLSTNVDVTREYFDREVYQALFSIMDNQKSLNQKQFLSFCKFRFKIKDIESYAWNFPEDEELKGNETRVSFATRFKRCGFTEYADFLTQEKEIELWHYLYSVNYKERKENDSKSIQTFFNRFLNGSGISDEIKVKTIDDFTNYPKFASRYCAYSEKALKKLLPFLRMGENRFTGKFDLSVYKADLESISYDKFRISSFIADSNKVGKEAEEKRQSLYEALWKHSINERIDDILNRLSKIDFEADEIDYTVGITNEENSKGGRLPYPKGLFNAFREFKEAVNFTSLDLTKTSYLVYGRHSELAQAIQWKSPDEIRKQLHQELKQHSLNNPVAEKVILEMMQIVAKLWEYYGEKDEGTENYKRLFDEIHVEVGRELKKSLKEKETETTRQKGNRAQNKRIRQVLEEFLASIPYNANSKNSDHFERLKIAEDGAEHRNNLDKNFFEENEELNKSNITKKHIEEILKKSSISKVDFEKYKLWIEQGYRSPYTNLPIKLTDLFDGDKYNIDHVFPQASITNDSLSNKVVCEREVNKLKSDQTGREFVNQPKEREQYCVAHGKNVKIVDDDTYVSIVTSQFSGSKRYILLSKEIPKGFTSSQLNNARHIARKAMELLSHIVREEGEVEFLSKNVLPVSGAVTGKLKEAWRLDQVWKELVAPRFIRMNELTKSSLFGQERVSKSGHKYFDCNLDNIIREKDGSFDIKRIDHRHHALDALIVALCTRDHVNYINNINASAKSPDFGKQRQIEKYRQTLKRKLMFSKPTKENPKEKDWYFMFPGEARQKGAEEATRDTITTMSYFYKDHEANENYKEMVLNALQYTVVTFKQNQRVINNRVNYYQAEPNTKRLKAQEPKTQKDSINSKNKYSWGIRRSLGKDTFYGKRTIDGEEKIVIRKSLDTSFDGNKIKTISDSEGHTKAILTNHLKRFDTIELPFDEAISHYDALFEKAEFESITKSKDNDIKDVNGLIEYLKANKYKFDKADYSKLNVFVEQVSEVIFREEKTVEGKNKYEIDEHPEIAFSPEMIEEMNKPETLKKLAGGKNHTPIRKVRISRGFGSQRALNDEDKDSVKSKQYVVNDAGSNLYLGFYERIYSDDDGNEVRERRFKDIGLIDLIRVLKEDKNNRHNPIDERIFDDDKNVFERIFTLSPLDFVYVPTEEEIEKPSLVQFNNLSMEQMQRVYKYVDGGGGIANFIPYAVSKPIWKFHKDKDKKAIYKSLSRAEKINIGESELIKDEFGLGSQQTKSQNMIDGVTQIKKICWKLQVNRLGIFQKLER

SEQ ID NO: 9139 - protein, 1429 aa, unidentified
  REGION 1..1429: note = Description of Unknown: Cas Enzyme sequence
MKTLNPANLELAFDVGHSSLGWAVLQNTPGQSPSVNLLGCGVVTFPADDCLASARRQKRQMRRHVRATRKRIERIAKLLLLLLADLKSDGARKLVERLQAYLNNSAEKRATLQGTGHVAPWLLAARILASDGKREHLLDWPELFDVLRWYAHNRGYDSRPPWISGFNMEEDTQIALSNEGDETMSDEDGTGEENEEAETARKLKEGIARMKAEPETRTMAETVSKILYDDLFPVKDGRTLSQLHAILFDPQQSEMFHKLRRYKGQDAVAFPRRNVFDEVRRILEYHRDTKKLPGCDDVFIKALLEDWTVIPDAWKAKRGDEDKTKLWLPRRFGFEREVRDANNRLIRTDRHYAGLLFGQAIPRFHNRIVSTCPIKYAQVLREQLKAGKPFPDAEHRARLLAKVPAKKSREFLQFRWVANFLANIKVGHAKGKLDRPLNPAERAKINKAMQDKGFLTSAELEKLVKDQSKCEFSNVPDMFDLTPEARDALCIDPVRRYIATDERVQAIWPTARPLHQRIVGQLRRGKRIKLAWVRRWLADPRYQAAKDGPAFRTSPEEFDKALDDYAEALKLAAMRKTKEKGDRRKQRESTPDRKELLQHWIGVSYPSGRAPYHRNILDKAVSEVFAGFDPRKKRQVPTMTEDQQKNAEVKDADGVLVETEDMMRLRLGLQLADVSEDQAFEAWKQEWLKRRDKNGAFRNRELYAEKGDAYARDVWAESLSHRWLANQTNNHLVRHRLLILQRLTQDIIEAQELCDGNPKRIRRVAVEVARDILAFSGMDSVAKGEALKSMSNQHRDVEKYLKKMLEGREYLINGSLLWKAKVADDLKWKCPYTGALITPDALVRGDMDVDHIIPKSVKLTDAMGAVVITFKQINRMKGAFTAWEFVEKCGGQDVPGTGEKIRHLHGQNGYASFVESLKEWGVEAESKSKFWPMYLEDKAKGKLHPDYRRRRMRKKLLQKETTPKEKDGFAARDLTVTSHINRLTQHSLRKVLIHLGPEDFLAIPGVVTAAFRDAKGWQLLGCLGEPEICGDAVMRAVPVLDRETKEPVIDSKTNKPKMKRIAKPKAAIRDCTHLHHAVDACALGLIAHFLPKDGRLWEYVALGELTESEKENYESLRAQFQRGRLSNGVSVKSVNFDDFLCLSKLRPDDKKRFPDPDRIWRLVPRRDEQALAQMNRIKKGIKRELAKKRVVQHIPADRSGFAAKETTWRVFNANDTHPSTQRLARWFKKAGVKIPGAGDSTALLVCRKRRDAAEEGEAKGKTLHDSNKVWRWVYDEVEKSKIAGLGQGNGKLFTLKAGLIIDENFGLALLPSAPKKSPKHAIVRWFNVSRKRERDRLRILNGGTAPELLRKGQLIRLRQGQHSGRIWKVLSVEETGRVRFGAVDIPRRIDKPKENYEKSQVSSLLRDGLEILKPSLIGIAVTPPVQGAC

SEQ ID NO: 9140 - protein, 935 aa, unidentified
  REGION 1..935: note = Description of Unknown: Cas Enzyme sequence
MGVRIFPDGRNPKSLASLAQDRRVARQARRRRDRVLKRRRRIMDGLVRFGLMPAAAPERKALQLHDPYRLRVRGLDQPLTPHEFGRAIYHLARKRGFKSSRKERGGAEREKESGKINDAIARLREQVAAAGCRTVGEYLARQHAERVPVRARQRTDGQYVLYMQRAMVAEEFDALWEAQSRYHPTLLTGDARAYLRDALLFQRKLRPVEPGRCQFEPDEPRARLSSPLQQTFRILQELNNLRLLEHGTERLLTLDERNILFHELSRTDRLTFAALRKLIGITHRSNARFNLEKDSKRKHLKGDVVATQLGCDDAVGPEWFDWPRERREHLAELVACADGDEELGKALGEPPWSFSNGQIAAICKCRLPDEFGNLSLKALRKLIPALECSVLPFSEAVVKAGYSHHSWFYTGEVYPRLPYYGEMLPVYVSPAPTASDADERKHGKISNPTVHIGLNQLRQLVNALVARYGHPAEVVIELTRDFGASAERRREIMQSQAENQERNARYDQLLAQLGQRQNRENRLKLQLWEELGKDDALDRPCIYSGQQLSQSKLFSDEVEIDHILPFSRSLHDGIGNKVLCTRQANRAKGHREPHEAFGHSPTGYDWEAIVARASRFPGQKPLFFQEGALEKFLAGRDFLDRHLTDTGYLGRAAKQYLTAICPPTRIWVSTGRLTGLLRGRWNLAPLLGGDSRKNRNDHRHHALDAAVIGLCSRSLIQRLATAAHRAELQGEQRLIESLEPPWVGYHDDLRQALSNIVVSHKPDHGHEGQLHNETNYGLRGGADKNGRLLVGRRVPIESVTKASDCNAIADAGIRQALVELVSSSKTATELRAAIATYSTKTGVRRVQILERLAATPIHNRQSKKPYRFVKGDSNYCYDIFRSDDGSWDGIIVSTFQANQQGNWRLNFGWQAKALNGKPLMIRIHKGDLLALEQDG

SEQ ID NO: 9141 - protein, 976 aa, unidentified
  REGION 1..976: note = Description of Unknown: Cas Enzyme sequence
CVLEPAERCAPQADRHASYYRVVETVNNILIEEGGRIPRPLTPEERQKVIRKLRGPLFKKSKGKLLPKSSASFTDIKEALGIKPRDKSVSLNIEADEDRDINADWFHREIVHGAFTEERWRTMGERQRESVNRAVLKFNPEHEEDAKKLRNGAMSWWGLTDAAADRLIEAWIARPKLERRLNLSRKAIMNLLPRMEEFDRESGRWPTQQEARKNYAKLLDALYQKTGVVADRIASERYATGALGLTAADRYYMRLKKHQIAEGVPELPPAPTLSNPVVRKAIHEVRRHLLAYLRKFRCKPHRVVIELARITKQSERQRNAALARNSRRDKLRKIIIAKILPTAFEDARRLTLNQQRAAVDRVVLAQQQGRICPYCGNAGITDKIAAKGDDLEIDHIVPYSRCGDDGLNNKVLVHRTCNRGKGSLTPREWWGDGFEARIRFAEKLFKNAEPGKGEYFEKRDYNRKWENFNREVRGGDEFKNSQLTDTAYAARQVANYLADALYDGRGLPERGDGEGNQRIFFTMGRLTSMLRKDWQLFETVKPEGEARERTGGMTAEEELELAEKNRGDHRQHAIDAVTIALTDPRIKNKLARWAGDAAEYKEKHGQWPRRKKEDPPWGTVGNFRLQVLEKVYAELGSKPSAGASTREDGSGLIVVSHRPVKRRLTGAFHEDTHYGPVIGPLPPHRSESVDTLFTNRISADRLTPNHLRVPDGWDNLSVKLDDGGISVADKKATRRTLAAMEDPSPGKSGIVRDRALRDRIRKCLRENGLDPENFTTAGIKKLIADKKLTMASRVPIKGVVLLRTNTDPVSIPRKRWDPFSDRMIADQDPRTARVYIGGNNHHVPIREHRKSGKWSGEVVSTFVAAKRVRVEKRDAVDRSDDKDSFVMSLAEGEMVYARRKDRPEDSPNYFVVCKLDKAGNSCRIHFAPHWDARKASEQDRWDVTPGDLKDCGPTLGHPPYKVRVSPLGKPAPLHND

SEQ ID NO: 9142 - protein, 1555 aa, unidentified
  REGION 1..1555: note = Description of Unknown: Cas Enzyme sequence
MAKILGLDLGTNSIGWAVVDDEQQKIYSSGIRIFPEGVVKDTIGKGDKEVSKNATRRESRQTRRGFYRNRLRRIKLLETLIEFNICPLTIEELKQWKQYDKKKGQEGKTFPSSEEFIEWLKLNPYQLRAKALNDNITLFEFGRILYHIIQRRGFLSNRKGNEDGKIFLGKDNITGIDKTNEQIKNSTLGAFLNTILPKENEPYKNITDEKGNQLRARARYTLRDMYVEEFEKIWQQQAKQLGLEYKQKEIRKESIISGSIYNKRNKERIEKLQKTKGKENVIISANKLIIKESIPLKEYIAGKIYYTEKGELKHKSQESVLFYQRPLRSQKGLLAKCSLEGRKFFDKKNNRWRTVGPTPCPLSHPEFEEFRALQFINNIEYGTKQRLDPHQREMLLELFNRKDANFNFEIITKELKLTYEIFNYKNDLKAPGNYTNAKLSKLFKPNVWEANKEDIWHCFYFYSDNDKLLKKLNEYGLQENEENLKKIQNIKLKDDYSNVSLKAIRNITPFLKKGYKFSDAVLLGGVRNAFKNTDAFNQPYDRWENFKEDHEKIEKDIIRINRDKNNKEGEAIERIKTYLTKNCGFEENSKYFKKLYHHSQEIEQKEIQNKLDKIENLRNPIVQQGLNELRRVVNTLIDEYGKFDQIKVELGRNLKMGKKQRQETEYKIRDNNKKNDEARQKLSEYGLAHSRENVQRYLLWKEIEDKRGGGVVLCPYTGKTISISDLLGGDNKFQIEHIFPRSTSLDDSFGNKTLCDAKFNALKGNKTPYNFHKENSDPKLWGGAKSWEDIKQRAFKLLPYNKAKRFTAEKIDEKANGFIERQLNDTRYMSKKAKEILSQICHKDSISVMPGSVTSELRHLWGLNNILNPVEILDYKNAKINITKPEKHWVVFNENNEAVSFHPIHNDKPVLLENETTISGFLNDKGEFYSKYVSGKTIHDNLIGKNFKGEYWKKLQLSPKPIEITEKFTEKPEISDNEIILRGVVSKKYFTNDTLGQKIKVEIEDGYYWAKFKVKNIKFELPVPKKQPKKNKGQITLYGNITNDIFKSYIYQCKTEDENDGNYWAIIDLDLDSNNIEFSNTKNPKPETDDNTILISGTVNENGLFSSDIDSKHRFNTMMPQGKYWAVFEIINEDQNLYPQINIEPELQEKQKIVEGNVWVDKYTGEIKFDPKKNRDDHRHHAIDAITIALTKQSYLQKLSTYNAQLDNKRRSKADKPTFEKPWENFYNDVKKAASEILISHRASHKVLTKIKKNTRKNGQNYSSVGYSVAGQLHKDTVYGERQAPHSEKPYYHIRKSVESLTTDKQINKIVDPAIRRIIIKAKEQEQIIKKQIEILNKKLKKTKTDFEDQEIQQQIEQKQQEIKQLYTLPNKNGEPVPIKKVRIKENLGNMQQLKDNKIFAQNKNEFVELNQYVNPRNNHHVAIYEDKEGELFEKIVTFWEAVERKKQGIPVIDKIPQDGSKFITSLQKNDMFLLGINEEDINWAKPNHAYLTKHVFRVQKFSKKQKSFEFNFRHHLASTLNNPKQEVSIASFKKWNIYNPIKIKIDILGRISKY

SEQ ID NO: 9143 - protein, 1332 aa, unidentified
  REGION 1..1332: note = Description of Unknown: Cas Enzyme sequence
MNKLTISIDMGAKNNGVFIVKTQNKKVLDKKATCIIVNKGSINFSKKSRRENRHKDRNYKRRKLSKRLISELIDLSKYDNKQTEQIFGLLNNRGYTFISTSTEFEKLNDITSEFINMYFEDLKGLSSREDFENKISEFEDLENLEDFIENINEKVDFECKKKKAEFYKNYQDSFSNFIKKDLQNIKKLFSSILNEIQIGSKPRKKYFDEIKDEIEKDFDFIENFSKVEFFNIISNISNLQLRVLRKYFNNKYDDVLDTKKLDIKIRAYFKAFHYKSEKERTQRVELFEVLNKEKDILNFLKNTNPMLTIPPYEDMNNRNTYKCNSMLIKPSLITKDLENTIDLLLKSDYFSTLLISNDGEFKKESLIKIKPATNNTYIDTDFTYSKYLQRILDTKIDDDNKIYHPRVVFKNKNPKAIELFKKLFGTKTYDNLLDIATSYYEEETKIHNGIYKENTSIFEKCNTNTSYKNNVKELLLKPLYSHNFTHDETKEFISEIENYEEKINRTTLLGFLKFVEEEYKKYQNSFYHIITHNFELENIKDVKDKDIKKLILGLDSCVDSLKNILNKLNIKTYLNDIKKVEKENLSKVLNILKQTYNILFYDLSGFSKTCKSCTKENALRSDENFSIGKRLLSDVAKPIDGMLDMMIDRLAYEITQQINKKDIENCESLEILLEQNRFEFEENLNEIKRANDSSIKRYKNDTKNICPYLDTTFEKGEYDHILPQSKEVYNSKANMIYCSSKGNREKSNKIYKLEDLNIKHLKEIFGLEELEKIKEFISKYIKTINEKDFKNFDNLKLNQQKAFRYALFMPTNSEEYKKALNLVKIDKLKTFSNGTQKRLARFIYEKLVNKYPREFKNKQINIDSKTVDSMLVSATRKSLSSSNKELEKEKYQESHSHCIDAMIVFYLANSKIEGRADRKKDNLTTLIPRYNFEDIYLKESGINNLSKNVTFINSPKKEVGSYKLFDDTIYAENYKHITKESLKKDEFECLIYHSILFKNQKSKKVFINNIEELKDESIYKIDVQKVSNLIYTLFNQRDKSTLLKLKFLDKLQYFTSRKEIESIFFDEKRTKLRKFNEIKNIPYFSVNLYKAVYKKLENKRDLFIVENDKSVLNSKVLNDLLIEMFESKQKDENKEKRKRAKKRHKYTLPILGSPKFKIKRANTWQVLGNNDIATKNYIINGDIKPIAFFGKNTYPVKVKDLLDCLLVNEDTKSVYHVPINISEISKYVSKLEYLVTEAKRCTLLVTFNKNSFKDINFNEIKVFDGTKDEIFKLLINNYIDNKDLNISNYIGSIRDGLKAKAMLIDSNSTTITLQYKAAINVSKKNIILENLK

SEQ ID NO: 9144 - protein, 1259 aa, unidentified
  REGION 1..1259: note = Description of Unknown: Cas Enzyme sequence
MNKLSISVDMGAKNNGVFIIKSDEHRILEKKANCIIINKGMINFSKKSRRENRHKDRNYKRRKLTKRLLKEFVDFSKYTEKQQELILGLLKNRGYTFISTSTEFEKLNDITVEFISEHFEELEGLAIKEDFENKISSFEELEELKEYIVKVNDKITLETKKKKDEFYKKYQNDFSSFIKKDLTEIKKLFLSILNEIETGSKPRVKYFDDIQSEINQGFDFLQDYTKEEFFNLVANISNLQLRVLRKYFNQKFDDKLDTLKLDTKIRGYFKAFHYKSDKEKKQRKELFDILNNESDMKTFLITTNPSFTIPPYEDMNNRDTYKCNSMLIKPELLNDDLKNSIDSLLCSDYFSNLLIGSDGEFIKEELIKTKPATNNTYIKTDFTYSKYLQRILDIKIEDDNKTYHPRVVFKNKNVKAIDLFKKLFGVKLYDSLKPIAQNYYEEEAKIHNGIYESSTSLFEKCNTNTSYKNNVKELLLKPLYSYNFKDTQTTELINKIENYKEKINRTTLLGFLKFTEEEYKKYQNSFYHIIGHNFELENKKDIKDNDIKKLIDGLNPCVIALKNILNELNIKTYFDDVKAINKDNLSRILNILKQTYNILFYDLSGFSKTCKNCTKENAIRSDENFPIGKRLLSDVAKPIDGMLDMMLDRLAFEITEQISEDDIKNIDTLEILLEQNRFEFEENLNDIKRANDPTIKKYKNDKKYICPYLGVPFEKGEYDHILPQSKEVYNSKANMIYCSSQGNREKSNKIYKLENLNTKHLKEVFGFDDISKIKEFISTHIKTINEKEFNNFDNLKLNQQKAFRYALFTENNSEEYKKAFNLVKLDKLKTFSNGTQKRLARFIYEKLVKKYPDSFKEHKIKVDSKTVDNMLVSATRKSLAMKNEVLAKEKYQESHSHCIDAMIVFYLANAKISGRANKKKENLTTMIPTYNFDDIYLEESTEINIKKSTLKDRFEKDKKINSIASTEVLFRENGVSVHYLNIFRVDEKFYYAEIIKQKLEFKGFNTKILEYFQSNNILNEFKPNCFNVNIKNLNQILFTNKNEVLTNFSKFKKIDELRYTTQKKAIMNLINSFLTPSSNDEKKFMESLINTKKPEKLEDFNKNNLTLFFQKGSKTSHKKIPLRIDKTWKLLAQYLDENKELFLKQSIVKDKNILSLDNIKLREVLQNSILFKKTHSTKRKITNEYSLPLKDVTDRMFILRRKDINKRYIYQYVLANRENSTRSFFKDTFIHQHKSGEFHHNIIPADIGFYKKAFDSIIK

SEQ ID NO: 9145 - protein, 1486 aa, unidentified
  REGION 1..1486: note = Description of Unknown: Cas Enzyme sequence
MKKILGLDLGTNSIGWSLIENNFDSKEGKIIGAGSRIIPMDQGILGDFDKGNSISQTAERTGYRGTRRIRQRFLLRRERLHRVLNLIGFLPEHYSALIDFENKKGQFIDETEVKIPYNNNNKFIFTESFNEMLNDFSVHQPELVSNGKKIPLDWTIYYLRKKALSEKISKQELAWIILNFNQKRGYYQLRGEDETETEGKKIEYHQLTITEAIDTREKNKKGQLLYKIKLENGLEFIKPTNTPLDWQGKIKEFIITTDINEDGSNKLDKEGNPKISFRVPKEDDWTLVKKKTEHDITTSTKTVGSYIYDTILTNPSQKIRGKLVRTIERKFYKQELIAILDKQKLFHKEFQDSNLYSACLKELYKYNDSHISNVSNKDLAWFIVNDIIFYQRPLKSKKSLIGGCQYESRTFINNDIWVNEKVKCIAKSHPLFQEFRLWQFISNIKIYERIRMVNGKECTDVDVTNQFIPTDNETITIYESLNDRKEIDQKGFLRLFKLNQEKYRWNYVEDKKYPCNETRYNFINALKKTDGVDYNKFLTTENEEKLWHILYSIESKEDIIKALSTFALKNSLPNSFIEVFLKYPPFKKDYGSYSAKAIKKLLPLMRVGKYWNIENIHTQTKDRIDKIITGEYDDKIKNRVREKAITLNNIEQFKGLPLWLACYIVYDRHSEEKEITKWETPSNIQFIDQHSLRNPIVEQVINETLRVVKDIWEQYGNGQQNFFDEIHVELGREMKNPADKRKRMSEQNISNENTNSRIIKLLTELKNEGVKDVRPYSPSQQTILKIYEEGFYLNEDKIPDDIEKIRKSSTPTQSEIKRYKLWLEQGYTSPYTGQTIPLSKLFTTDYEIEHIIPQARYFDDSLSNKVICETEVNKDKGSKTAYEYLIKNSGKIVDLGHGKKVTLLTKDAYQEHVKQYFRKNKTKLNNLLSEDIPEGFINRQLNDSRYISKVVKGLLSNIVRENNELEPTSKHVITMPGSITSRLKNDWGLNDVWNSIVTPRFVRLNEITSTNNFGEWKNGGQYFQTSVPEELARGFNKKRIDHRHHALDAIVIACTTRDHVHYLNSINSERTNYALVDKLRKREEVNGKMVAKDFHKPWNSFTQDTRNALEKIVVSFKQNTRVINKTSNSYEKWATNKDGILKKTKVKQTKGDNWAIRKPMHKETVYGCVNLQLVKSVSLNVAIDNWKSIKNKPLRNKIKSLINSGFDIKKVKKYFKDNNNEHNGQTINKVDIYYYDDQNVASRSKIDESFTSKKIESVTDRNIQQILLNHLTKYNTTDKKGDVKEQPELAFCQDGLEEMNNSLTNRKPIYKVRTYEPVGKKFNVGLKGNRATKFVEAAKGTNLFFAIYNDEMGNRSYDTIPLNIVIERQKQGLSSVPETNEKGDKLIFHLSPNDLVYVPTEDEINNPNLVNFNNLSTEQVQSVYKMVSCTEGECHFVPNVYSYPIQKNEMGTNNKSQNTTDNLIQIKKVCWKLKVDKLGNIKGVQR

SEQ ID NO: 9146 - protein, 1355 aa, unidentified
  REGION 1..1355: note = Description of Unknown: Cas Enzyme sequence
MRKILGLDLGTNSLGWAVVETEDNITFKPIDKGVRIFQEGVKIEKGVEGSKAAERTGYRSARRLKYRRKLRKIETLRVLIQYKLCPHLNSTELNNWRYKKNYPTNEAFKHWWMTDNEGDGNERKAQTKNPYYFRHLVATKKLDLTLEENRFALGRALYHMAQRRGFLSNRLETTKENENGAVITGIKEISQAKGKQTLGQYFYDLYTKGDKIRDHYTHREAHYLEEFKHICQLQELSTEQTAAVKKAIFYQRPLKSQKGLIGKCPFETNKPRCAVSHPLFEEYRMLCFINNIKIKTPEDEKLRPLNTDERLTVENRFFLQRDHFDFEDIAKALAPKKQYKYYKSKEKNPEDWLFNYSMNTTVSGCPVSARFQSIFGDEWKTYSIKHTRASDGKTSTIDMDDVWHVLMTFDSTDKLNAFATDKLQLDETQTKAFVNIHLKQDFAALSLKAIKKILPYLREGLIYSHAVFLANMESVIPSEIWQNEANRSLIRDEIHLLITTQNEEKQLVEIVNGLIKSNKDNDAVWSQEAISLYRADLMKQVKAYYGENKFKAFADHKKQRIEQHTFELFASQMQKHNGCGEFAKVQRIDDRIKTFLDTNFNIAEGTEKLYHPAALESYKPPQKGKDGNYYLGSPITSSVRNPMAMRALHQLRKLVNALIKNGTINETTTIHIEMARDLMNANERKALQNWQRKRENDRKNYAAQIKKHFEAQGIKAEPNESELLKYQLWEEQKHVCVYTGQTIGLSDFLGANPKFDIEHTIPQSLSFDNAQHNLTLCDSKYNRAIKRNKIPYELNDLDTILERIGHWKQDYKNLEKQIEKMVKGARGAATKESKDNFIRKRHEYTLERNYWRNKHQRFTMKDVPSGFKNSQLVDIGIITKYSRLYLNTLFNRVYTVKGTTVADFRKFWGLQDVYEKKARVNHVHHCIDAMTIACMTKPQYDKLANFYRQEEGLRQEAHDKKPHFEKPWPTFTEDVKNIENELFVSHYTPDNLPKNNKKALRKRGVIQRNSKGQPIIQTGDSVRGSLHKDTFYGAIKRQVENKKGEIEEVVKYVVRKKVTDLTDADLKNVVDEKVREILQTARANEKPLLKTIENLKKQLQKAEEQEEPALKTQIIDIEQQITALYTMPNNNGQPVPIKKVRLIQPTVTNPLHIKPQRDKNSKHPKPHKEHYHAANDGNYLMAIYEGKDAKGKVKRDFELINNLKAAEYFKRSVQNELKPQGFDQLEGLIPAYKLNGKQELPHKANINTGTMVILWENDPDEIWDLEVGDIKKRIYKVVGLSTNRIKSGKKFYEFGMCILRHHQEANSASELKTNDGLFKKDENYTAQRKLSHNQFNALVEGLDFTLSPLGKIEKL

SEQ ID NO: 9147 - protein, 1352 aa, unidentified
  REGION 1..1352: note = Description of Unknown: Cas Enzyme sequence
MSQKILGLDLGTNSIGWAAVETEDQKQFKLIDKGVRIFQEGVKIEKGVEGSKAAERTAYRSARRIKYRRKLRKINTLKVLSNNGYCPQLSAHELDEWRYKRVYPKNNAFRDWWLTDHEGAADQRKAQTKNPYYFRHLAASEKLDLTQEKNRHLIGRAFYHMAQRRGFLSNRLETTKESEGAVTKNIAEISQAKGDLTLGQYFYGLYQKGEKIRDQYTHREAHYLAEFNSICHKQDLPADMVTALKKAIFYQRPLKSQKGAVGKCPFETNKPRCAVSHPLFEEYRMRCFINNIKIKTPTDERLRFLTEAEKAKIIPQFFRKKDHFDFEDLAKQLAPKKQYQFYKSRTIKPEDWLFNYDLKTTVSGCPVSARFKSLFGDDWAHFNKAYIREKDGQHAHIDIHDVWHVLFTYDSADKLKEFAHHQLALDDKQMDEFMKMHLKQDYASLSLKAINKILPYLREGLIYSHAVFLANMGQVIPADVWADAENQHLIRQEIQQLIHSQNEAKQVTEVVNTLIKHNREAEATWSKEAIDLYRTDLVKTLKNYYGAKKYQGFEANKKQRLEAVAFDLFQTHMQKNMGRGEFAKAQRIDDRIRQFLADHFNVNGSFEKLYHPSALDVYQAPTKGKDGNYYLGSPMVSSVRNPMAMRALHQLRHVINELIRTETIDTNTTIHIEMARDLMNANERKALQSWQRDRENKRKGYAQLIKKHFEENNITRDPSDEEILKYQLWEEQNHICLYTGQQIGLTEFLGADPVYDLEHTIPQSLSFDNSQVNKTLCQSRFNRATKRNKIPAELNNHAAILERIEHWQEESEKLNKQIKGAVRTANGASTKEEKDRAIQKRHRLTLERDYLRDKHRRFILKDVPTGFKNSQLVDTGIITKYARLYLKTLFNRTFTVKGSTVADFRKFWGLQDIYAKKQRVNHIHHCIDAITIACMTPAQYAQLAQFYQAWEGSRQQGIDKKPTFAKPWPTFTEEVKAIEQELLVSHYTPDNLPKKNQKKLRKRGQIQCTKNGQAIIQTGDSVRGSLHKDTFYGAIEREVKNKKGETEKVTKYVVRKKLDMLTDGDLKNIVDDRIKAIVINARQEEKALRKKLEALTKQLQKAEEHEEPAIREGMSQLEQAIVELYALPTKKGGYVPIKKVRLYQPTVTNPLRIKDQRDKAAKSPKPHKEHYYAANDGNYLMAIYEGKDAKGKIKRDFELVNRMKAGKFFKESAQSTLRPQGFNKQEDLIPQSKQNGSLDLPLKATLKIGTMIILWENNPEEVWDLELPATKKRLYKIVGLSEQVIQKKYFYGTIVLRHQNEARPTTELKVQDGEFKTDEEYMAFRKMNHNQFNALIEGIDFKLTSLGKIERL

SEQ ID NO: 9148 - protein, 1285 aa, unidentified
  REGION 1..1285: note = Description of Unknown: Cas Enzyme sequence
MKKILGLDLGTTSIGWAYVKEAENSSEQSEIVRLGVRVNPLSTDEQTDFEKGKSITVNADRTSKRGARRGIQRFKQRRANLINTLKSIGFIDDNTVLTETGENSTHNTLLLRAKAAKEKIEKDEFARVLLSINKKRGYKSSRKAKNEEEGTLIDGMEIAKQLYQTKCTPGQLVFNLLKDGGKFIPDFYRSDLKNEFDAIWNNHANHYPEVLNTKTYNQLQDVGKMATSKILLKEHNIYTADIKGSRDEKKLKTFELRSKAITEKLSLDSLAYVLAEVNNNLNSSSGYLGAISDRSKELYFNKQTVGEFMHAKLSENPNYSFKNQVFYRQDYMDEFEVIWETQAKYYPELTNNIKHEIRDITIFYQRPLKSQKHLISNCEFEKYHKAIPKSSPLFQEFKVWQVINNIEVTQKSTKTKYNLDIEQKKQLFAELNIRGKLKDTQVLELLFKKPKEWSINYKEVEGNNTNKALFDIYKTILHQEGYDIDFEKISVEEIIETTTTIFKEIGINADILNFNTNLSGNEFDKQPSYQLWHILYSIESDKEVIKALQKHFGFKENYARLLSNIRLQSDYGSLSARAISKIIPFLKEGNQYDVACDYAKYNHSSYLTKEEIETRILSDKLNILKKNSLRNPVVEKILNQMVNVVNAIIDDPDLGKPDEVRVELARELKKSAKERENDTLNINKAKINHEKIRDLLSKEFGIKNPTRNDIIRYKLYCELESNGFKTLYSNTYIPREKLFSKEIDIEHIIPKAKLFDDSFSNKTLEYRNINLEKGDKTAIDFISEKYDKEFVEEYKGRIERLYKAKTDGLSKGKYLKLLMAEKDIPSDFIDRDLRNSQYIAKMATQMLNEVIRKVYTTTGSVTSRLREDWGLVDTMKELNFGKYKELGLIETIEGKNGESKERIKDWSKRNDHRHHAMDALTIAFTKHSFIQYLNNLNARSIKTSDASGIEQKELYRNDKGKLLFKKPFDNFRGSAKTHLESILISFKAKNKVVTKNINKTKQGGNKLSLTKVQLTPRGQLHKETIYGSMKQAVVKEEKIGLQFTAEYINNVTKPIYKEALLKRLNEFGGDPKKAFTAKNSLAKNPIYLDADKTLTLPEKVKVKLYEVNYTIRKEISPELKIEKVIDLGIQKLLYNRLKEFNGNSKLAFSNLDKNPIWINKEKGVSLKRVRISGVKNTVALHDKRNNRGELLLDSNGKSQPVDFVSTGNNHHIAIYEDEKGKLQEKVVSFFEAVSRVNAGLPIIDKEHNSNLGWKFMFTLKSNEMFLFPSDGFDPKEYDLLSTDNM

SEQ ID NO: 9149 - protein, 1337 aa, unidentified
  REGION 1..1337: note = Description of Unknown: Cas Enzyme sequence
MTKLSICIDMGAKNNGVFIIKNDSKNILDKKATNIIVDNINFSKKSRRENRHKDRNYKRRKLVKRLLNELLDFSTYDLKQQEQIFGLLNNRGYTFISTSTEFEKLNDETIKFIDEYFDELKGLITKEDFENKVSSFEDLDELKEYIKIVNEKIYLETKKKKAEFYKEYQAFFANFIKKDLVEIRKLFSDILKELDTGSKPRAKYFEEIKLEIEKDFDFIQSFSKEQFYNLIGNISNFQLRVLRKYFNNKFDDTLDLEKLDLKVRRYFKAFHYKSDKEKAQKTELFEILDSQSSILEFLKTTNPNLTIPPYEDMNNRDTYKCNSILIKPNEINDEIKEAVDFLLSKPEFSNLLITNNEGIFEKENLEKTKITTGNKQIKEDFTYSKYLQRILDAIPEITSKELNPRNVFKHKAKFDKGLIDSIECFKRVFGKKTYNSLKDIAQKYYQEEEKILSGIYEETTSILVKCNTNTPYKNNAKHILLKPIYSYNFTSEESDALIESIKNTKGLQTALQRVSDEAKKYQNSFYHIIDACYKNEKCVDDKDIKLIIKNIDKNFLELKTILKDKNTYFQDIVKVDEKNLSRVVNIFKQTHEILFKELGGFNKTCKCCTIENAIRSDEKLTIAKRLLSDVAKPIDGMLDMMLDRLAFEISENITQDDIKDCENFEILLEQNKFEFEENLNTIKRANNPQIKKFDKDKFKDKLNVKVCPYSGKEFEKGDFDHILPQSKGVYNSKANMIYSSVEGNQKIKGNRDFTLEMLDKKHLEAVFGKDKSIEDIKEIIKSGIESIDTNSFTNFNNLKLQQQIALRYALFMRNTDVFKKAFEIVKKDKIKTFSNGTQKRLARFIYEKLALKFPNEFKTITINSKVVDNQLVSSTRKSLAVNPTTGEINQLFKEEIQNSHSHCIDAMVVFYLANSKIKNTNSTKDTIIEPIYNFEDIYLDESGINNLSKNKTFINSPTKELGSYKLFDETIYSEHYKHIIKENMKKVDLETFIRYELIFINEKGKKVFIDDTEKMQEKTIYKLDVQRVSNTVYKLFKEQKELELKSLKVLDSLIYFTSRKEIQIIFFDDKATKLLKFEEIKNIPYFSKNLYKSVYKKLQNEEKLFNISEDGKSTLNSEVLNNLLIDMFASKQKEQNKEQRKRDRKRHKYTLPILGSPKFRIKRPNNTWQVLGNKDIATKNYIIDGNIKPIAFFTKNTIPVKVADLIDCLLIDENIPSVYDVKIDTEDIKTFVCELKYLVSEAKRCTVQVSFNKASFEDIDFSSIKLFDGAKDQIFNLFLDKYVENKISVLNRYIGSIRDGLKGKAILLDNNSQTITLQYKVAITSDKKKLIIENLKD

SEQ ID NO: 9150 - protein, 1010 aa, unidentified
  REGION 1..1010: note = Description of Unknown: Cas Enzyme sequence
MKTVLGLDLGTNSIGWALVKEAENENEVSEIIKLGVRVNPLTVDEKTNFEKGRPLSTNADRTLKRGARRNLQRYKLRREHLISILQDHGFIDENSALTEIGKHTTYETLGLRAKASKEQISLSDLAKVLLAINKKRGYKSSRKSVSEEDGQSIDGMAIAKTLYETNLTPGQYVLGLLKANKKYLPDFYRSDLTNEFKAVWNAQKAFYPNILTDDLLKSLEGKNKNQTWAICQNPFAIEGIKQKGTAAEKRMERYQWRTEALTQKLDLEHLAIVLQDINNNLNTSSGYLGAISDRSKALYFNKETVGEYLYKQILNNPHTSLKNQVFYRQDYLDEFEQIWETQSQFYPNLTDALKEEIRDVVIFYQRKLKSQKGLISFCQFESWEQKYVEKETGKAKTRTVGRRVIPKSSPLFQEFKIWQNLNNLVFQNTETNKVIVFKNLDEDIKTAVFEELNLRGDLKPNDLLKILNKYLLDVKKLSEWKCNFEKIEGNRTNEKLYNIYQAIAENEGYGFDWAKKSAKEIKTELKTVFPEIGIDATILDFDADKDQFDKQSSYQLWHLLYSAEDDDKITEDDKLLYGNSSVALKKKLHLKYGFKPQYTGLLANITLQPDYGNLSSKAIRKILPYLKAGDEFSKACDLAGYNHSNSLTAEEQANRLLKPSLELLKKNSLRNPVVEKILNQMVNVVNQVIKTYGKPDEVRIELARELKKSAKERANMTKSIADATRRNDDIRKTITKTFGIPNPTKNDVVRYRLWKELESMGYRDVFTNTQIKHEDLFSKKIDIEHIIPKAMLFDDSYSNKTLAFKKDNLKKADRTAYDFISQDYQQDLEAFELRVEGLFSGNHISKAKRNKLLMPKSKLPDGFIERDLRNSQYIAKKAKQLLYEVFRTVVSTSGSITDKLREDWDLINVMKELNLPKYRALGLTDKEERKNGKIVEVIKDWTKRNDHRHHAMDALTVAFTTHNHIQYLNNLNSYYSLRSGEGDLEKSRLYALKNTITKVYKDKNGNGKRK

SEQ ID NO: 9151 - protein, 1033 aa, unidentified
  REGION 1..1033: note = Description of Unknown: Cas Enzyme sequence
LSHFKETPTDNAINIVLLRNQGLKEQLTHKELFNVLKYYMKHRGISYLEDSIDEDSGSSYAASISANEKLLENKFPCQIQEDRLKKYGQYRAEIIDSNEESTKHLSNIFTISAYVKEVTALLKTQSQFYKNINTTFIDKYIEILSNKRKYYDGPGNEQSRSDYGRYTTDINNETGEFITLPNLFDKLIGKCTIFPTERRASSASFTAQLFNALNDLNNLTVNGRKLNQAEKEVIIDNMILKKTVNVRKIIKNAIGEDIRNLKGARVDTKDKELFHKFDLYNKMARAMEKDELDITHFSHEQFDELANMLTLNTDMESIVNSSKELSFEIDQKTLLFLTQFRKSNGSYFNKWHSLSLKAMKELNPILLEQAKNQMQILSELGYLKTGDDLFKNYAKIPTKLITNELYNPVVKRSVAQSIKVVNALIETYGPPNDIIVEMARDKNEDDQKKRIRNNQGKYEKELEKIISEIKRDYNIEITDSNFHNNKMLKTKLRLWKEQEGRCLYSGKIVAINDLLYSKELFEIDHIIPISISFDDSRSNKVLVYREENQLKGNRTPFMYLHGINRDWNYLKYEATVKQLYKNKTISLKKMQLLLFMENITKQEVVQGFINRNLNDTRYASRVVLNSLQSYMRANEKDTKIKVIRGSFTSQLRNKLHLPKEREEDYSHHAIDAAIMCYSQMGLSDYKFETSAAIDYETGEILNEALLKTFSANKLYEDKLFYENIKLVKSNLELAKSYVKYSYRTDKKVNRQIANETIRGTRIKNDGKTYKIGKIKDIYSKDGWEQFKKRITEKNGKSKLKEFLMYHHDPQTFEILLKIVDQFSDQENPFAAYKIEYGEAIRKYSKKNNGPFIKSLKYYDGEVGAHIDISNKYGHNKGTKKVILDSLKPYRADVYYNVLSQNYHIAGIKYANYKYVNGHYMIDKEQYDSILKQEKILTDEETYTDLEAKGIEFLFSLYKNDIISYEKNGDFFTERFLSRTMPKNLNYIETKPLEKNNFPKRNLIGLSKSKQITKINTDILGNMHFTNKEKFKLY

SEQ ID NO: 9152 - protein, 999 aa, unidentified
  REGION 1..999: note = Description of Unknown: Cas Enzyme sequence
YAVRKGAEFLDVGVLICDSEGSDLSKRRDLRRQRRTLRSKKYRRQWFARELLKMGLRKPEKPPNNPISLRLRALNGEGLKPEELYAALTHLFKRRGYSKVPWANTEKASKDPTKPKKDDEEGKIKEAVREIRAKLGEKHPCQFLAERCAEVGKSPTEKWARKIYWPRAVLQREFEAIAKAQKKHFPELATKVDWLLYGESQAKERNGETFHVFFKTTEAQNPGVMGLRWPRFDNRGPALDSFQPVDDEGRPLHVVRKNKAAFAKAQWELALMNFRVLDSATRQKVDPRFAFPIFIENLRNEWNKKGKVTETRLKKLAEPFKERFLLVANQKPLTPDGGAGRARYSSPTLELIHKDISSGRRVDPPQPILRRKGENSEEALNRYLAEIKHPLVRHRLVLFRRLLSQLIGRYGKPDLIVLEAVRSLALGQKAKNELNQRNEKFRKEREVAREQLSSNNESFSRKAIQRYRLWQEAKGRCPFCLQMIERTDLGHGADVEHLVPRAIVDCNDFYNLTVAHIKCNRELKGDRTPLTAFGGTSQWEGIKANAENCFTGRKLEIFLSPNAEGLIEQRSDLQHTAYIARVIRHISLIQLGWLNGDGRDPTPEKQNPALSFQVTNGQLTSRLRKSWGLNQILHPLPAGKRWDELTSEEQNQFTEKNRGDHRHHALDAIVIACTLPWLAHRTHGAKDQFGRHGWWTQDEKGRSKAANPLFPNEGQMYEVAKKEIEKAVVKHHVSRSNHQQAYATTLYAKKADNTYVARETFTSLTPKNLGSIWPKEFAYYCEAAWKKYADESADIEAELKRTKTCVPESFTRKLCFSHFQKWRQDDCPEFCWPKKIKIPIRNVRLISVKDDTAVVPFSPGTHAYVKRTTYKEVRIHISSTGTKFVPALVPYWKHDKPVCNEAINADLGIVTTIKKGQIVLLKKALAAGYKPGRYLVTDFGQVQVIILPEYVADNGDARTGFGLPKTGIKPRWHEFVSCLGYELPHPASIKPQAASAAQA

SEQ ID NO: 9153 - protein, 1030 aa, unidentified
  REGION 1..1030: note = Description of Unknown: Cas Enzyme sequence
MKNILGLDLGTNSIGWALIKEDNTERKGQIIASGSRIIPMSQDILGKFDSGQSLSQTAERTGYRSIRRLRERHLLRRERLHRTLNILGFLPEHYVSQIDFDKHPGQFIPGAEPKLAYFFNKQQNKNDFFFKESFSEMLKDFKQHHSGLAEGNKKIPYDWTIYYLRKKALTTRIEREELAWLLLNFNQKRGYYQLRDEGEEENKNKLVDFYSLRVVDVTATEEKKNKDEIWYNVHLENGWIYRRTSKTPLEWQGKIKEFIVTTDLNDDGSVKKDKEGKEKRSFRAPDENDWTLVKKKTERDIEKSHKTVGTYIYENLLQNPKLKINGKLVRVVERKYYKSELETILKKQKEFHDELNDEKLYRLCLEELYEHNEDHRNSIQTKDLTHLFLNDIIFYQRPLKSKKSLISNCKYESRAFIKAGKKEIEALKCIAKSHPLFQEFRLWQFIHNLKIYQKEKEVNGKLETDVDVTPELIKSEEDWVNLFEWLNERKEIDQKAFIKYSGFKLKKNTESYRWNYVEDKSYPCNETKAQISIRLNKLEYLPHGFLTKEIEESLWHILYSVEDKIDIRKALKTFATKNGLKDDFVENFVKFPSFKKDYGSYSAKAIKKLLPLMRMGKYWSEDNISEPTKERIHKIINGEYDETIRDRVRDKAVLLNSFNDFKGLPIWLSSYIVYDRHSEDGEILKWKTADEITLLSHHSLRNPIVEQVINETLQLVKDIWKQFGKGEEGFLQEVHIELGREMKNPADKRKQMTDHINENESTNLRIKALLSELLNDRNIENVRPYSPMQQEILKIYEEGALNNEDNIPEDILKIAKQAQPSTSELIRYKLWLQQKYRSPYTGEIIPLNKLFTRAYDIEHIIPQSRYFDDSFSNKVICESVVNGEYYKSNRTGYEFIKEFRGKTVDEISTANKVVKIFTVEQYEDFVKNNFSKSRSKLKRLLMEDIPESFIQRQLNDSRYISKVVKNLMSNIVREEAEQEVISKNVIVTNGSITSTLKHDWGLNDIWNEIITPRFEELNRKTNSQKFGHIN

SEQ ID NO: 9154 - protein, 1388 aa, unidentified
  REGION 1..1388: note = Description of Unknown: Cas Enzyme sequence
MSKILGIDLGTNSIGWAIRDTNSHDNQIIDKGVLTFEKGVGEGKSGEFPLVQKRTESRSKRRNYQAEKYRKWALLQTLIESNMVPLSETELDEWRKYTKGTIRKYPQSQRFLNWLRFDFDGDGKPDFERIGYSRHENYYLFRILAISEEQQNIKIFQSNPYILGRIFYHLVQRRGFRGRDEEEAKTIIQGSKDTGTIGVGEIQPYIEQYNTLGAALYHFQHDKGGRIRKRYNLRTDYEAELKEICRVQNIDYNLYKKLYKAIIWQRPLRSQKGLVGYCTFESPVKNQQNNYIKAGKKRCPLSHPFYEEYRTWVFINNLKIELPINIDREQYLQEAIYPLFYNKSRDFKLSAISKELKKTGGRITAKFPDDTKVISSTLLNSFNNILGDNWKEQYSWKDLLNNKPKSNAYSIEDIWHVLFTFDSGEKLKEFAIQKLKLDENLSEDFSKIKLQQGYATLSLSAIKKLLPYLRKGIIYSEAIYLANMHKVLGQENLSLSDIQHFTEIFREINNEQKDFLFTGTVANSLISDQLNADQRWGMDENYQLDNVDHKDIIKKIEEIGGTESWNKRSDQERSSLIMEISAMYLDFLKKPINARKDKAFIRIPRLHDRIFDRLQQDYSIPDENIKDLWHPSEQETYENAKELNGIRLLGSPQPISNGFKNPMALKTLYKLKGLINFLLLTEKIDDDTRIVVEIARELNDANKRKAIEKWQRDREKQNQEYRHLIHEGCGIPMSSINQDMLDKYKLWIEQDRRCLYTGHPINCTELLSSNNKFDFEHTIPASISFDDELKNLTIAEVIYNRQIKGNKIPTELPNYYNDGGGYTAVKPRIEFMFEKVDHLEALLAEWKNKSKFASTKDIKDACIQRKHIIKFDLDYWRYKLNTFTCTEYKAGWRNNQLRDTQIITKYALPYLKTVFNKVEVQKGAVTDKFKEIYNVKLRNEKKDRTKHSHHAIDAAILTLIPPSAIRDKILKRYEETKDIQYSKDYHEKVRYWEDFHPEHLLSIENNILINFQPQSRTLTPTFKKIRKRGKQQYLKYKTEDGKWLYKLNADNNKIPLLARGDTIRGQLHQETFFGAIKQPVYEEKNGKFIPLTDGFGNFIFQENDKRKDNLFIVAKIPISKFIKPEDFDIVIDPNLRSFLIKEIQKRMNTGRTFAEAIENVYAFNKEYDKHGKSISPIRHLRCKVKSGGGGFVTNPAIIRHQAASPPSKKEYKQNVYALNGETIVSAFYQSIVNEETVRIIEPYSILEVAKTNVKTLDEAVVPNIELSIKKEKHLIPLYSVLKIKQKVLFYEEDKEELKTMGTKELSKRLYLITKFEDGRISFKHHLNSMSEDELKNEMKQRGLADVGASYFNFDQPIPKLRLSKMSFNFIIEDKHFNVQSDGNIVWRY

SEQ ID NO: 9155 - protein, 1551 aa, unidentified
  REGION 1..1551: note = Description of Unknown: Cas Enzyme sequence
MKKILGLDLGTNSIGWALVEQDNKENKGHVIATGSRILPMSQDILGKFDSGVSVSQTAERTSFRGIRRLRERHLLRRERLHRVLNILGFLPEHYANQIDFDKRVGQFMPETEPKLPYLHNPDTQKADFIFKKSFEEMMLDFELHQPRLVENSKKIPYDWTIYYLRKKALTEKIEKEELAWLLLHFNQKRGYYQLRGEDEEENKKQLVEFYSLRIIGVHATNDKKDDEIWYNVFLENGWIYKRKSKTPLDWIDKTKEFIVTTELNDDGTIKKDKDGKEKRSFRAPAETDWTLVKKKTEYDIDKSHKTVGAYIYDTLLQKPDQKIKGKLVRVIERKFYKAELEAILLKQCEFHTELKNSTIYQSCLEELYENNDAHRTSIGEKGFAHLFLNDIIYYQRPLKSKKSLISNCKFETRTFIKNGKKEVEPIKCIAKSHPLFQEFRLWQFIQNLKIYQKEKRVKVEVSDAQLALFSAGVHRKPVTDSQLLTDIDVTVEFLKTEEDKVNLFEWLNEKKDIDQKAFLKYPAFNLKKDIDNYRWNYVEDKNYPCNETRYPIATRLKNVANVPAGFLNKETEEALWHILYSVEDKNDIIKALKTFAQKGGLGDDFVEQFKKFPPFKKDYGAYSAKAVKKLLPLMRIGKYWNEGDINDHSHNYQTNIQKVIATLLKDRDKKNEKPDNGFPSSFNSGLLSKLEMLDDDLSEYKGLDHFLASYVVYGRHSEDGEIKKWKTADKIELLEQHSLRNPIVEQVINETLQVVKDIWKQHGNGEEGYFDEIHIELGREMKNPSDKRKSMTESINENENTNLRIKALLTELLNDNDIENVRPYSPMQQEILKIYEEGALNAEGEIPDDILKIAKQAKPSSSELTRYKLWLQQKYRSPYTGDVIPLNRLFTRSYDIDHVIPKSRYFDDSFSNKVICEVEVNKDKDNLTAYEYIKENRGKKVELSNGKVTTLLTIEQYEEFVKNHYSKTRGKMKKLLMDDIPTAFIERQMNDTRYISKVVKNLMSNILREEGEDDTVSKKVIVTNGSITSALKQDWGLHDIWNDLITPRFERMNELTKSSNFGEWTNKEGKKVFQTQVPLELSKGFSKKRIDHRHHALDAIIIACTTRNHINYLNNFSALGKDKKEIKEKRRNDLKNTLCFKKYNDDTKQNYKWIFHKPWDTFTQDSKEKLHTTVIRFKQNLRVINKTVNRSLQWKKDDSGNMDKTMVPQTIGKNWAIRKPMHKDTVSGLVQLKFKKTVTLSAAIDSWDMIVDKALRTQIKKLIAENDDKKKLLTFFKEKENKWNGKDITRVEIYYWDKENVASRVSIDDSFNAAKIESITDSGIQKIMLRHLEKFNEEKNGKIIEHPELAFSPDGIDTLNINIAALNNGKPHHPIYKVRTYEPKGNKFSVGETGNKKDKYVEAAKGTNLFFAIYKDDKGKRNYDTIPLNIVIERQKQLLSPVPELNELGHQLFSFLSPNDLVFIPNEAEQENINAVDFRNMNKEQLERVYKVVSFTGKRLYCIPYSVSVSIVDKVEFSQLNKLEFSIAGKFSIKDVCIKLKTDRLGNIKPA

SEQ ID NO: 9156 - protein, 1387 aa, unidentified
  REGION 1..1387: note = Description of Unknown: Cas Enzyme sequence
MKKVLGIDLGTTSLGYAFVNEAENDSEQSAIIKVGVRVNPLTTDEQTNFEKGKPISINADRTLKRGARRNLQRYKQRRQNLINALKKASIIDADSLLAEDDENTTHTTYAIRAKAAETIVAKDEFARILLMLNKKRGYKSSRKAKNDDEGQLIDGMVVAYRLYQESLTPGQLCYLLLKEGKKSLPDFYRSDLQVEFNEVWDFQARFYPEIFTADFKRELYGKGQRATASAFWTKYKFNTAENKGTREEKKLQAYRWRSAAVNKQLAIDEAAFVITEINNNINNSSGYLGAISDRSKELYFNKHTVGQYLYKQLQDNPHTRMKNQVFYRQDYLNEFEAIWEIQAKHHQELTPELKKEIRDIIIFYQRKLKSQKALVNFCEFESKTVCYEKDNNKITNKIGAKVIPKSSPLFQEFKIWQNLSHLQIQQKKNKEMLSFDLASKQLLFNELNIKGNLKKEQVLKILGYSTKEWELNFEVLEGNRTNQAFYEAFIKIMEYEGHDDIDAELLSGLEICSMIRSFFESEQISTLILDFDPELEGKAFESQPAYQFWHLLYAYEGDNSNTGNEKLYELLNSKFGFKKEYAQILAKVSLQQDYGSLSAKAILKILPFIKESKYSEACKLAGYNHSSFLTKEENDNRPLKGSLELLPKGSLRNPVVEKILNQMVNVVNAIIATPSLGKPDEIRVELARELKKNAKEREEATLQINKAKIEHDAIRVLLVNDFGIKNPTRNDIIRYKLYEELKFNGYKDIYINEYISREELFSPKYDIDHIIPQSRVFDDSFSNKTIVPKNINLRKDNATAYDYINDVYDNDRLGEYKTRVEAFLKFYPERKAKYKKLLIAGIEIGEGFIERDLRDSQYIAKKATAMLHEVCRQVVTTTGSITERLRKDWDLVNVMQELNMEKYRKLGLTEMAEKKDGNLKERIIDWTKRNDHRHHAMDALTIAFTKRSHIQYLNNLNARRKEDKLGREIYGIEQKETYFQIDDNGSKKRLFKSPLNNFRQEAKRHLEDVLVSCKAKNKVVTKNKNKTKSSTGDKIQLTLTPRGQLHKETVYGKIQQYVSKEEKVSGKFDEEMIAKIPKKKYRDALLKRLQENNGDPVKAFTGKNSPAKNPIYVDQQKTILLPEKLKLVWLEDDFTIRKDISPDLKVDKVIDAGVRNILYQRLEEFGGNAKDAFSNLDKNPVWLNKDKGIAIKRVTISGVKSAENLHFKKDHLGKNITDENGRPIPVDFISTGNNHHTAIYRDENGDLQDEVVSLHKVITERVNQGLPVVDKIYNQHLGWQFLFTMKQNEYFVFPSYDFDPADIDLLDPANNKLISPNLFRVQKFSKVTYGNSSIRDYVFRHHLETSVEDKKELKDITYKSIKSLSYLEKIIKVRINHIGQIVKVGEY

SEQ ID NO: 9157 - protein, 1165 aa, unidentified
  REGION 1..1165: note = Description of Unknown: Cas Enzyme sequence
LKTQQLFHTELQDENFYQLCLEELYENNEGHRGSIGAKNFVHLFLNDIIFYQRPLKGKKSLISNCKFESRTYIKDGIKYIEPLKCIAASHPLFQEYRLWQWLQNLKIIEKETDTIVTTRFLNTEEEWTNLFDWLDDKKEVDNKTLITYLVKPLKLKASDYRWNYVYDESNDSKKYPCNETKAQIKSRLAKCANISPNFLTKEKEEALWHILYSIEDKFDIEKALKTFAAKNNLGDDFIDNFKKFPPFKKDYGAYSSKAIKKLLPLLRMGKYWKETDFHPQTKQRIEKLLSGEYDDNIRNRVREKAISLTTINDFSGLPQWLASYIVYDRHSEDRETKKWKTVADIEKLEQHSLRNPIVEQVINETLQVVKAIWLQHGGGKENFLDEIHIELGREMKNPADKRKQMTNQINENENTNLRMKAMLMELMNEGDAENVRPYSPMQQEILKLYEEGVLNGIDIIDDDIFKISKQAQPSSSDLKRYILWLQQKYRSPYTGEVIPLNKLFTREYDIEHIIPQSRYFDDSLSNKVICETAVNKDKDNLLGYEYIKGNYGKTIELSSGRIVKILTVDAYEKFVKDHYSKSRNKMKKLLMDEIPEAFVQRQLNDSRYISKVVKNLMSNIVREHDEQEAISKNVIACTGAITSVLKQDWGLNDIWNELITPRFERLNKMTNSTNFGEWTNKEGKQVFQTQVPIQLQKGFNKKRIDHRHHALDAIIIACASRSHINYLNNESALGRSSREEKDKKRHDLKHKLCTKKFNIGSTENYKWILNKPWNTFTQDAKETLYNIVVSFKQNLRVINKTINYYQAWKKNSDGVLTKEFAKQIKGDNWAVRKPMHKDTVSGLVRLKFKKTVMLSAAIDNWEMIVDKGLRLKIKELNDQYHDKKKIAKFFKDTNNIWQNEDVSKVEIFYWDKENVASRVSIDESFSSPKIKSITDTGIQEIMLNHLSKFNEYKNGKMVEHPELAFSSDGLDEMNKLIQELNSGKRHQPIYKVRTYEPKGNKFNVGYTGNKKDKFVEAAKGTNLFFAIYADDKGRRSYETVPLNIVIERQKQGQLSVPESKEVGNKLIMQLSPNDLVYVPTEEEKEQEVKIDFEKLDVEQRKRIYKIVSFTGNRLYGIPYHIAKSIVDKVEFTQLNKLENSLEKISIKDYCIKLKVDRLGNIKPIV

SEQ ID NO: 9158 - protein, 997 aa, unidentified
  REGION 1..997: note = Description of Unknown: Cas Enzyme sequence
MSIVLGLDIGTNSIGWALVAESENDKSILGMGSRVIPVDGAEIIEFQKGNAQTKNAERRVLKGIRKLNKRYKQRRNKLIYVLQHLGILPDHFQLTESFDNPKKIQKICIKPVINGTPQPTALDLIELRVKALHHKIEEKELGKLLYWFNQLRGYAGGGDEDENKDVKETDEDAEADNIDKIKKIEKIIQSVRITEVTKEQLNPGEKRKPKHLVKVDLGEGEMLSGETELENLVINETLELQIIIRRNVKTGKETSVNFSLPRKTDWRKKMEDLERTLDELKAGQSREVFISEHFLSLLKDHKWTKIRNNVVLRSRYQAEFDAIWKEQSKYHSFLNNLDKTSLGEIAGFLFPGDKSTQLKYRKESVEKGLNHIIRNQIIYYQRELKDQSDLISNCRFEPSEKAIAKSHPIFQEYKIWEQINKLSINTKIEKGRNKKGELKYDYVDKPIPVALKEWLYDELQNKKEIKFSVVFNKLQKEYGLRDKIDFFNGMNAKAALKGNDTRLMLKKQLGELWQNLKLDSEDNLVAFWDILYNGKGNEYDLNSDRTSKLLSFLEKQIPGLFNIEKVAVRLAKIKFVRAYSAMSLKAIKNILPLTRAGKYYDNREFNTTLTEKIIKLSSINVEGLFEKAIQEYLEKNETILEEGGIVNAYATILVYDKHTAKEYTTEELIVDYKKIERLPQGELRNPLAEQVINETLMVVKDIWKSYKIKPTEIRVELARELKNSADERNKIFKANITNQKTNTRIKDRLKDLKAEVSNGVETASTTMFSDPSKNDIEKMKLWEQQGFVSPYTGNPIPLSQLFDKGLYDIDHIIPRSRYFDDSLTNKVICETAVNKDKGNRTAMEYFEAGSVSVQIKTKEHYIDDVNEKFFGRKRKNLLATKIPQDPVARQLKETQYISVRVKEELNKIVGNKNVKTSTGAITDYLRTHWGLTEKFKEITRPRFEELSPKLAAIEYDGYQKEYAVRRKEAEKTDTEFTEELIGKDNYTTAFQENFIRS

SEQ ID NO: 9159 - protein, 1538 aa, unidentified
  REGION 1..1538: note = Description of Unknown: Cas Enzyme sequence
MSKKILGLDLGTNSIGWALIDKNDKETGEVIAAGSRIIPMSQDILGKFDNGVSISQTADRTRLRGNRRLRERYLLRRERLHRVLNILGFLPEHYSEQIDFQKHFGQFFPEAEPKIAYVFNIGVGKADFLFKETFNEMLADFAKRQAHLLDEDKKIPYDWTIYYLRKKALNHKISKAELAWLILHFNQKRGYYQREDSDVIDKSIEIRSLKVLEVIKGEKDKKSERFWYEAKLENSWIYKTTSYFPLENWVDNIKEFIVTKELAPDNTTKKDKEGKDKIRLSILPSFEEIDLMAETEKNKIYGKIKIKTETEIEKTGKTVGTYIYDTLLQNPNQKIKGKLVRTIERKFYKDELRQILETQQRLHAELQDKNKYQTCLKELYEHNEAHRNSIGEKDFVHLFLNDILFYQRPLKSKKSLIANCRFERRIFIKDGEKETEPLKCIAKSHPLFQEFRLIKFVQSLRIYQKEKEINGKLETDVDVTTDFLSTIEDRVNLFDWLNGRKEIDQKTFLRYPVFHLKKSITNFRWNYVEDKTYPCNETRATILSRLSKIENIPGDFLTAQNEEDLWHILYSVEDKIDLEKALRTFSTKRHLNEDLSKDFVDQFKKSPPFKKDYGSYSAKAIKKLLPLMRLGKYWSLNNIHLQTKGRIERIITGEYDEKMREQVRKKAFNLTEIDHFQNLPEWLASYIVYDRHSEDESALKWKRPDDIKILEHHSLRNPIVEQVINETLQVVRDIWRHYGNGEEGFFNEIHIELGREMKNTKADREKITKQVSENQNTNLRIKALLMEMLNDLDIENVRPYSPSQHEILKIYEEGVLNSVNENIPEEILKISKQAHPTQSELTRYKLWLQQKYRSPYTGDIIPLNKLFTRAYDIEHIIPQSRYFDDSFSNKVICESIVNGQDYKANQTGYEFIKAFRGKIVDELSTNGKTVTIFTVEAYENFVKENYSNSRGKMKRLLMDDIPESFILRQLNDSRYISKVVKNLMSNIIREEGEQETTSKNVVTSNGAITSVLKQSWGLNDIWNEIITPRFERLNAFTKSSNFGEWINKEGKQVFQTQMPLELQNGFSKKRIDHRHHAMDAIVIACASKDHINYLNNESALGKRSKEDQEKKRYDLRNKLCFKKYNDAAKQNYKWLFHKPWSNFTKDVKDILHEIVISFKQNQRVINKMVNHYQKWTKDNSGVFIKQTIRQTKGDSWAIRKSMHKDTVSGLVKLKLRKAVSLATALDNWEMITDKSLRKQIKELVSQNYDKKNIIKFFKEIENKWDDNNISKVEIFYWDIDKKGEGNNAASRVKVDESFNTSMIKSITDTGIQKIMLEHLKVYNEEKNGTPIERPELAFSPDGLDKLNKNIKELNGGKSHQPIYKVRTYEPKGNKFNVGTTGNKKDKYVEAAKGTNLFFAIYQDENGNRIYNTIPLNIVIERQKQGFLSVPEINEAGYKLLLYLSPNDLVYVPTEEERQNISYINFEKLTKNKVNRIYKLVSCTGNEGHFVPHYYSKEILKNEMGTNNKNQNALDGTQIKMYCIKLKINRLGNISPADK

SEQ ID NO: 9160 - protein, 1128 aa, unidentified
  REGION 1..1128: note = Description of Unknown: Cas Enzyme sequence
MNDKMKIPPAKVTGSKPDLQLAFDVGHSSLGWAVLQTTPEKASSIDLLGCGVVTFRSDDCLASARRSYRRQRRHIRSTRQRIARMKTLLAHLGVLKKEQLDKPGCAWPWLLAARVLRGGIILTWPELWDVLRWYAHNRGYDGNRRWSAADAQAQDEDTEKEENAKTLMGKHGVKSMAETFCAELQINPLGKKKSSIIRFKGLNAAFPRAVVESEVRQILQAHFGKLPKVDAALERALIGRDNKDATAWQAIPCDGLKLPRRYQGALLFGQLVPRFDNRIISKCPVSGGKVPSRDCVEFMNFRWGMQLANVRVARFGEKELSPLTVPERKQLDALMRKVGSMGAGEFKKQVRQVTGAIRDNLDTMLMHPDAHEALLLDPVQKLTKSNDLENIWPLLPERLQKRTRGQWRRGQSISFAQLREQLEKLGGNVTAFNAELTRQLDSSNTKGKKKDKPTSREGLLKKTFFVKKLGQRAAFARHLLKQAHEQVMAGKHPKEEGGCLFVTDQMREAQLQRDIAQQTNNHLVRHRLLILERLLADIIKEYAGNDRSRIARMTIEVNRDLRQMSGMTAKEKAQDLGKRIANHRSVATKLTEHLAEETLNGKRISITAGLIRKARIADDLGWRCPYTGVQFEPKQLVTRSVDKDHIVPRSDRASDSLDSLVITFGAINKWKGRRTAMKFIEEEQGKPVPDLPNLSIMSLTRYKQFVESLESRGSHDDDKRRKKKRKELMLLATYEEKEFMPRDLTTTSQLVRLGAMALRKAFIESKHQPVVVSLPGSVTGTVRKTWKVLACLGLAAPQVMDESGGVKKKDDIREITHLHHALDACVLGFASHFIPNNGRAWELMVKRRWTPAEEQELKALGIFGKDSEGRFQMTDLNKRHKEAIRQRLAEKRVTQHIPARMDGLRVEQNTWGVVTKDPDGTILIRQQIRQPDGSLKKKEVPEKQVKLLGLRPSNGVGKLAAINGVLVIPDNYGVAILDYAEKGEDRFVIMPWHMVFTRIFKGFKDKDGKVLEKSLMERNGGKRPRVLRNGQLVQVGSGTYKGVWKITSIKNQKTGIKLNLGQPDTLNTEEEVLDSAKNRMTRKVRVNCKHEASLATLVTGGLEILDVPLTGIPIQPSEMKEPKQREAA

SEQ ID NO: 9161 - protein, 1039 aa, unidentified
  REGION 1..1039: note = Description of Unknown: Cas Enzyme sequence
MKKNILGLDLGTNSIGWALVEREEEKAEGNIIAAGSRILPMSQDILGKFDSGVSISQTAERTNFRGIRRLRERHLLRRERLHRVLNILGFLPKHYADQIDFEKRLGQFIPETEPKLPYIYHKENNKSEFLFKNSFAEMVKDFSIHQPQLLENDKKIPYDWTIYYLRKKALTDKIEKEELAWLLLHFNQKRGYYQLRGEDDEETPNKLVEFYSLTVVDVVATDDKKGDEIWYNVHLQNGWIYRRTSKVFLDWVGKVKEFIVTTDINDDGTIKIDKEGKEKRSFRSPAENDWTLVKKKTEFDIDKSHKTVGSYIYDTLLGKPNQKIKGRLVRVIERKFYKAELEIILKTQQLFHTELQDENFYQLCLEELYENNEGHRGSIGAKNFVHLFLNDIIFYQRPLKGKKSLISNCKFESRTYIKDGIKYIEPLKCIAASHPLFQEYRLWQWLQNLKIIEKETDTIVTTRFLNTEEEWTNLFDWLDDKKEVDNKTLITYLVKPLKLKASDYRWNYVYDESNDSKKYPCNETKAQIKSRLAKCANISPNFLTKEKEEALWHILYSIEDKFDIEKALKTFAAKNNLGDDFIDNFKKFPPFKKDYGAYSSKAIKKLLPLLRMGKYWKETDFHPQTKQRIEKLLSGEYDDNIRNRVREKAISLTTINDFSGLPQWLASYIVYDRHSEDRETKKWKTVADIEKLEQHSLRNPIVEQVINETLQVVKAIWLQHGGGKENFLDEIHIELGREMKNPADKRKQMTNQINENENTNLRMKAMLMELMNEGDAENVRPYSPMQQEILKLYEEGVLNGIDIIDDDIFKISKQAQPSSSDLKRYILWLQQKYRSPYTGEVIPLNKLFTREYDIEHIIPQSRYFDDSLSNKVICETAVNKDKDNLLGYEYIKGNYGKTIELSSGRIVKILTVDAYEKFVKDHYSKSRNKMKKLLMDEIPEAFVQRQLNDSRYISKVVKNLMSNIVREHDEQEAISKNVIACTGAITSVLKQDWGLNDIWNELITPRFERLNKMTNSTNFGEWTNKEGKQVFQTQVPIQL

SEQ ID NO: 9162 - protein, 1050 aa, unidentified
  REGION 1..1050: note = Description of Unknown: Cas Enzyme sequence
MSRDMQMPYVLGLDIGVNSVGWVVMPVKEAAPGAEPVALRDMGARVFDAGNDGKVSEGNDQSRNIERREARQRRKQLDRRARRKTRLLHALQCGGLLPSGEVDCAADRQRYFSELDPELFVQSVQRLTEFTQAARLARVLFPYLLRAAAVSGPLPPYAIGRALYHLGQRRGFVSNRKQAAKPDEDFGPVLEDIAALRTAMKDANAPTLGVYLAGLDPHETRIRERWTHRDMYKDEFDKIWATQHAYHPELMNDALKKEIHTALFFQRRLKSQTGLIGRCELEPDARRAPWFRLMAQRFRLLQQLNNLEYVTEHGEVLALDAAQRNRALEHLEFRGDLSFAALKKLLGLSTKGVFNLERGGEKLLRGNRTASKLYKVFGERWLAFTDAEREQLVEDLHCMADGDALARRGRKVWGLSEEEARNFAAITLEPGYCNHSLKALSRLLPMLEQGVRYGEARKKAYHEASETPALETLPPLEAVLPNLRNPNVARALGEMRKIVNAAIKKYGKPVLIRVELARELKRSRKQRQEIFEKNRLNEAARKKAAKQLAEECNIKEPSRQDTLKVLLAEECNWQCPYTGVSFGLNDLFGPEPLVDVEHIIPFRRCFDDSYTNKTLCLAEENRTHKRDRTPFEAYAGDQNVWREIIERVKRFSASDKAIRAAKLRRFLIEDAQTLFDDFTTRQLNDTRYAASLARKYLGVLFGEASLRRVQVGAGQATAYIRNELGLHGVLGVAEKRADHRHHGIDAIAIALTTPGMFKRLSEAAARAPLKGRRRFDAIEAPWEGFLDHVRELANRTLVSVRLRHTLSGPLHKQTIYGLTVSPEDGKSYNTVRKRLASLSANEVEKIFDPHVRAQVASAVREAGGDPKKAFGSLRDGFCYTDQKGRERRVDKVRIKASIEAISVGRAPHERLVASGSNHHLAVYESKDAKGRPCWNGELVSRYEAQQRKRRKQPVVRRGETGHGRFLFSLAGGDVIALTEAGVTACYRVRSISQEKTGAIRVEYVGLSEAGMKDVLKATGKWRSSMLNPLRKLHCEKVLITPLGEKRRAHD

SEQ ID NO: 9163 - protein, 1151 aa, unidentified
  REGION 1..1151: note = Description of Unknown: Cas Enzyme sequence
MTETKVTNNLIIGIDLGVSGSGIAVKDKNEDKFLSSVIIKHDLKTEDGRQTYGNIKRGRRPRRRKILRSKDFANLCSDYGFSEPSKDDEMLLHLKNKALYEKVEESHLIMILRNYITHRGSANIKDYSEKDKKDEKKEKEYQTLVNNNQKYIDSGMLPCEIQLMNYEKVGAYRGNKVVLLENKEKHLVMNTFSRSFILEEIKRILNTQSIHHEKLTEEFITSYIKLFSRMRSFTVGPGNEKSRTDNGIYTTKKDPLTGKYITLKTNVEKMVGKCSLFIEERRASKASFSAQKYNLWNDLMNMRVSGKSLNEDERQLVYDGILKSTDGENINIRSIVSKLLGISDAVITGVGVKKEKKEYKNVYHSMACYRELVKTYTDAGISFDYSENQIDEMMGAVNINSVFDTMKEELLKINEKMTSAEFELLFDFKMNHNDYFGWHAYSLKALRFFNEKMTTEGINPYNIEREYNLSEEQLLPFMNKERIPLSVLNDITNPVVQRNLRHIIKYINRHIKDHGYPETFVIEAARDYNTEKEKERIEDIQAQNRGAVSRICNEIFDKYGVKITSKHFSQHKKLGLKLKLWDEQGGHCPYSLSFIHPGLLILNPDDYEVDHIIPYVLSLDNSRNNIVLVESQSNGVKGIRSPLSYVRSGEAFITEKEFRKNIKDTKFNNVKKANLLTEADFMDKYSREGFLNSHLNNTRYMITLLSDILRKYFKANNIDSKIVTMSSKVVTGVRNSLNIEKDRAISDDHHAVDAMIMLVAYERLKKVDETYSGLVNYTTGKIYSYNRMYELRHNVMDILREYNTEIYKKMVLEASDNILYKDYNKRTDSGKLFDDTSYGTRIINGEHYVVSKFSDIYEHEGLSCAYKSLLNKMEKNKDADVLMYHYDPQTYAFLKKIAEDYDVSKFDTSYKKEHGLNKNPFYNYKVINGHPIYKQNNKSQNIPIYNLKVASKKLGIHQDLSHKIGHKNGDKKLVKLSLTAYRTDIYYNKENKSYHAVGIKLVDLKYHPKGNYISEERYLEFLRNENILNENQGLEDIKETHYEFRFSLYAGDSFKMVNAYEQNESLELIFQSKMQDRKDTIKFKIRDQKYKDLVKNIKYGDEEKIIEEDKRTLKNVTKLVKINKDVKGNSHYAAYERLKNVGMPLKMQKIS

SEQ ID NO: 9164 - protein, 901 aa, unidentified
  REGION 1..901: note = Description of Unknown: Cas Enzyme sequence
MIKSRIEKVENDFLTAIIEENLWHIIYSVNDKIEYEKALKSFAEKNNLHKDSFCENFKKFPPFKNEYGAYSLKAVKKLLPLMRLGKYWNFDNIDSNTVKRINHIITGEVNEQIKDRVREKAINLKSESDFKSLPLWLVSYIVYNRHSENAETSKWNTQHDLEVYLADFRQHSLRNPIVEQVITETLRVVKDIWNHYGKGEKGFFDEIHIELGREMKNPADKRKQMTEKNTENENTNMRIKALLLELMNDPSVENVRPYSPIQQEILKIYEEGVLNSDIEIPEDIEKISKTALPSSSDLERYKLWLEQRYRSPYTGGVIPLNKLFTPDYEIEHIIPQSRYFDDSLSNKVICEAAVNKEKTNQTGLEFIKNHHGQIIETGSGKKIKIFTEDEYQEFVKQHYNKNRGKRNKLLLDDIPEKMIERQLNDTRYISKFVMQLLSNIVRDETSKDDGVNSKNVLASNGQITSMLKNDWGLNDIWNDLILPRFVRLNEITKTNKFTTYNDRFQKFLPAVPFELQKGFQKKRIDHRHHAMDALVIACATSNHINYLNNQNALDKQKSREQKQVAREDLRSILCYKKYNGVSAGNYQWVFKQPWESFPAEARVKLENTVVSFKQNIRVINKTINRHQKYINKDGEWLKELVKQTKGDSWAIRKPMHKDTVAGHVNLRDRKTVTLNAAIEIWETLVDKNLKTKVKQLINEGYDKKKIVKYFADSDFKWMGKEVVKPEVYYFSDEKEMLVASRVNLDVSFNETKIKSITDTGIRKILLNHLAQNQNNPETAFSPEGIEEMNRHITELNNGRPHQPILKVRTFEPKGNKFSIGQTGNKKDKYVEAAKGTNLFFAIYSNEDGKRSYETIPLNIVIERQKQGLPPCPETNDMGNKLLFYLSPNDLVYIPSVDEGIN

SEQ ID NO: 9165 - protein, 497 aa, unidentified
  REGION 1..497: note = Description of Unknown: Cas Enzyme sequence
MKKILGLDLGTNSIGWALINQNFEEKQGEIVGLGSRIIPMSQDILGEFDKGNSVSQTAERTGFRGVRRLRERHLQRRERLHIVLNLLGFLPQHYANHIDFDKKLGKFLPETEPKLAYNENNEFVFMNSFHEMLNDFKQSQPDILSNGQKVPFDWTIYYLRQKALTSKIENEELAWLLLHFNQKRGYYQLRGEEEEDNKNKLIEFHSLRVVDVIADEPQKGKTEIWYSIVLENGWVYRRASKNPMFDWKDKTKEFIVTTDLNDDKTVKTDKDGKEKRSFRAPAEEDWTLRKKKTESEIEQSQKTAGQYIYDTLLINPKQKIKGKLIRTIERKFYKDELIRILNKQLELNPVFNNAHLFKACVEELYPHNDSHKNILAQKGFVHLFVEDILFYQRPLRSQKSLISNCPLESRSYTLEGVKRYEPIKCVPRSHPLFQEFRLWQWIQNLKIYSRDTDADFTKQHLVNDEDIAKLFDFLNERKEIEQKALLKYLKISDKTYR

SEQ ID NO: 9166 - protein, 1247 aa, unidentified
  REGION 1..1247: note = Description of Unknown: Cas Enzyme sequence
MKKILGLDLGSASVGWAMILEDHENGKAQCEILGLGSRIIPYEGTEGKDFAKGTGESRNSERTKKRTARKGYDRYQLRRKFLVDILVKNAMYPGEALKSIPKMQLWELRSKAVNSPISLLEFGRLLLWLNQKRGYKSSRSDANLDKKDTEYVATVKSRHERIREKNLTIGQYFYQELLQDEFFRVKENIFPREAYIEEYNAICKRQQVEFSEILTDKLIDKIRNEIIYFQRPLKSQKGLVSVCEFEGFWRKGKDGKDYFVGPKVAPKSSPLFQLSKMWENINNIKLGSRNGGELVLTVEQKLAIFQHLDNNEKLTQTDLLKILDLKKEDCFVNKQLVKGLYGNITKHAIRQCFGTSLNYAHLFELSLNVLKTENEGYLYDAKTGEVLGSKTSRVIDPLIEKQIFYQLWHTIYSIQDQMECSKVLQSKFEIEKDIADKLAAIDFSKHAFGNKSAKVIRKILPYLMEGDRYSEAMSYAGYNHSNSLTKDENLKRKLSDQLKPIAKNSLRQPIVEKILNQMVNVVNAVIEKYGKPDEIRVELARELKQSKEERNETDRFMSKRQRENEDITKRLAEYGLRATRNNIIKWRLYEEIDNEEKKLNAICVYCGQPISLLEAIRGNDVDIEHIIPKSKLFDDSQSNKTLAHRHCNKDKNDRTAYDFMASKPNYVFNEYVERVNNLYSNHVIKRAKRDKLLMTESKIPDNFIDRQLRESQYIATKARELLQTICHNVWSTSGTITAELRHLWGWDDVTMNLQMPRYREINLTEFVEWESNHGKSKHKKEVITGWTKRDDHRHHAVDALTIACTKQGYIQRFNTLAASKTREDMRFEVDNRSIQFKEKLSLIEKYIIGEQPLLVNEVESAVAGILISYKAGKKVAVLGTRKVGKRGNKKVVQSGIIVPRGQLSEEFVYGKIKSIEEKKSLKYLFENPHLIVKPYIKNLIEDRISKYNGDAKTTLSSLRKEPIYLDSKETILLEYATCFQEEYVLKYNVDINFNKVEKVIDKALKQILQARLDKFGGRAKEAFKDVQREDKTIMKWYQDEGLARPIKSVRCFTGLSAVVPVKKDELGNDIGFVKPGNNQHIAIYSDGDGKKFEHVCTFWHAVERKKYGIPVIIKNVAEVWDRIQMQPESTYPESFLEKLPNVNWNLLLSLQQNEMFVLGMPNEEFEKAILEDDKSLISEFLYNVWSLSESDYWFKHHLETKNSDLKNIDNAKESKRYFRFKSLGAFFKENPIKIRINHLGGITKIGE

SEQ ID NO: 9167 - protein, 976 aa, unidentified
  REGION 1..976: note = Description of Unknown: Cas Enzyme sequence
FALSDFEDENIQNLYRELSIRKKLSNNAVLSFLVKNIKDFELNYKDGISGNETNARFYDAYYKILEFENEVHDFDKLPSSKINDIIVSKFSELGICQELMDFKYFLTGDEYDKQPIMQLWHLLYSFEGDQSKSGVDKLVSKLVEKFGFKVEHAKILAKIDFSNDYGSLSSRAIRKILPGLIDGYKYDLACSNVGYNHSNSMTAQENEVRVLESRLNLLKRNSLRNPVVEKILNQVVNLVNAIIDDADLGRPDEIRIELARELKSSAKQREKMTADIQKANKENEKVRTILEKLHPFNQGIRITKNDIIKYKLYQELAPLGYKTIYTGTYIPLDRLFSNEFDIEHIIPQSLLFDDSFSNKTLSTRDFNNRIKGSQTGIDAILNAWGKDSKEYISYISSIETLFSKGSGTISKTKYNKLLMPFDKIPSDFIERDLRNTQYITKMAKQMLSGIVRDVIVTTGSITDRLREDWQLIQVMQELNIEKFKRLGMVYYETNKQGQQIPKIRDWTKRSDHRHHAMDALTVAFTRHEHIQYLNNLNARQLDDKKAASIIGIEKKYLKWDDDKKLLFEPPMTISDFREEAKKQLESILVSFKAKNKVVTVNRNHIKIKGKDNFLEKKELTPRGQLHNETIYGSRLEYSVTEEKVNSSFDVDKISRVANKKYREALLSRLNESMNDPASAFTGKNALSKKPLLIKGSDNQVPERVKLVELEKVYTVRKEINPTNINSEKVIEKVIDPLVRKKLYERLSEYGNDFKKAFANLEENPIYLKNPIPPDQCKDRANPSHIERGIEIKRVTLYGVNNVEPLNVKRNHFGEVMVNENGKPIDNAFVSTSNNHHVAIYKDSTGKLNENVVSFYEAVSRAKSGLPIVDKKFNENLGWEFQFTLKQNEYFIFPSEDFNPNGIDIFDTQLYPSISKNLYRVQKITYGDYFFRHHLETTVEDIPQLKGISFKRIGTKGLEGARKVRINHLGYIVNMVE

SEQ ID NO: 9168 - protein, 1427 aa, unidentified
  REGION 1..1427: note = Description of Unknown: Cas Enzyme sequence
MEKILGLDLGTNSIGWAIRDTAEHENQIIDKGVLIFKKGVGQDDKGNEQPMVKVRTESRGRRRNYQAEKYRKYELLECLIETKMCPLTIEELNEWRHYKKGTGRKYPQSKVFHNWLKFDFNGDGKPDFEQFGFSKHENCYLFRWLAISDKPEHIKIFGDNPQLLGRVFYQLVQRRGYNSPDTDDPETKLIEDGRKNQITKEIEVVGVKVIENLIKEKYKTLGAALYWGQKNNELESINHNRIRNRFTYRNYFEDELNLIFKNLGFDKESDFCKKIKKCITWQRPLRSQKGLVGFCTLDAPLKSKTGIYYKPGKKRIPLSHPLYEEFRTWQFMNNLKIEPPKGKNRIEFINEVVFPLFNRSTDFYTKNKKDKSGKITEKGLITKIENAGGKVIAKYENDTDDEDEGAKCIANTFIFKIAKIFGKNWKELLQWNETLSGDEKNGKYLRVEDLWHLVYDAQITKKQTDNLGERIIPILKKHFPIIEFDVKDFDKFPLDKGYASLSASSIRKVLPYLKQGMIYSQAVFIANLENVLGGKLDDETLSLLSNDFNKILNQHKEDKTIYGLVNELISDRLYHNERLCMGDKYVLDDIDKRDIGKKIKDTYESKVWKKKTEEERLNINDEVEKHYQTFFRQPFGAEKSKLFCKIYRIEEKLKELLINKYKADPERIKKYLWHPSEQEKYSPAYVKKDSDGNTYKDETEKEIFFLGDPNPISCGFKNPMAMKTLQILKKHLNYLLQVGKVNSQTKIIVEIARELNDQNKRKAIQLFQGDQKRKRDKYRKLIEEYFNENNTSNRTISEVMLDRYELWEEQTKKCLYCAQPISCSDLMNGTAQLEHTIPAKISNCDELYNLTLAHHTCNATKAKRFPTEWKDNFENIKKNVAFIYAKFKTHEEAWKESYNKARSARDKSGKDTIIQNRHYQKMYMDYWRKKYETFTIEEVTNQFRRQQLTDTQIITKYALPYLRTVFARVEVQKGMATAKFRKIFEIEPKFGEKDRTEHSHHALDAAVLTLIPPPSIRENMMKDYNDAVDNNTMNNYVHPKPKNWDNFHESFITSMKNEIIINHISEDKTLTQSFKYKRRRGEIVKDKNGKPIMQQGATTRGKLHDESIFGIIKMPETEFREGKHRLKITEGKLTFKQNEKRKTKKDLFVVKRVKITDISSFEGLENIIDPNLRDYIKNEISKRMQMQDSPFEKIILQPIYAYGITKDKNQNPIQPIRHLRCLTTWNSAVEIKKVESAFKSKREHKQFTYANNGELPICAIYEWTEKDKIIRELKPITILEMSKAFHFEKKKDYAEHEKIITKGAGKNKVEIVKKLSVILHKKQQVIFYNKNLAELKELYISDKTSFAKRVYTTEKFEEGRIVFKYHLCSLSDKEITVLMEARGFKNGASKIDYDNPFLKLRVSQGALDMAIEGKHFELRRDGEIKWI

SEQ ID NO: 9169 - protein, 1745 aa, unidentified
  REGION 1..1745: note = Description of Unknown: Cas Enzyme sequence
MKKILGLDIGTTSIGWAIIEATDEKKVNEITGYTSETDINNNRIGIYKDAVGVRIIAQDTERFDRGLTLNDSKGTTLTPTASRRVKRGVRRMNNRYKLRRDKLTKVLSSIGLEPDKNYYTNEIGKRGENNDIGKAIYQLRYKAIKEEISLAEMGRILMQLNQLRGYSSDRFKKDEGEATKKGDKEIFTSTVLSSEGPITHDQKYHRFKITFEDGNIGWEIRKIENVESIFKVNNELCSYSFKEKNEAIDGSFQIEKEKEVDKNSYAYRKKEVNDSIKDFIDVTNGTVGSFFYQKVYVEKSKDRVRNNHVNRDWYEDEFNKIWDIQFEKHKSHFEKINIEDIVKIAFKDYSAILNEVLKKAGIKEQLKYLIKDKIIYFQRPWQQSKNKGQCEFEKIKIKKEITIKGTGTKELVEEYIGRSVIPRSHPLFQEFKIWQQINNVRIYLNTPDEKVDLFNNNDEFRKHITKSIEEVKELLYKTLQKSKTPSWRTFVKETLDVKFLLDEDKDLKKGYYQFTNEETGEVQNAFFTVNFRKQKKDKTYEDIKLKGNTTKVALQNILTDKSEDWFLTIHSEKQNISNLQLLWEIIYDITNSDANKVAEIINKHFDFDKEICIKLANIKFDDSGMAKLSAKAIKQLIPLMSNGSNLTEKATKKITSLIKLNNSEDEKTKDKDDKLESLKNIISDKKARLKLSGYALKSDYKYLNYWEAAAVIYGTHSSKFTSKKDYISRVKPHSMNNPIVEKIVNETISIVNEIRKVYGFDEVRIELSRELKASMQERQQMWEAMNNGYEKNEWAKQMLREIKSGNPGLDAETSTRSNLDKIKIIEDVVKFQNQDEYKKKQKEYKLDEPSKAEIKKYLMWLEQNFKCPYTNQPIPLSDVFARGKVVEIEHIIPRERYYLNSYVNKVITWAEVNQTKANHGNRTAYEFIVSNRQEETITLKDNRVLYKVTPEAWKEHVEKMFPKGGKRINLLRKEIPEDPINRTLNETQYINKKLKEKLAELVGESKVWITSGAVTDILRERWHLNGVMKELLRNRYENFEMPTGKKVFQLATIEEQELFLNEMKMVLDSEENFVIYKKQIGKKLFEFKTLEEISAICEDLEKVILANKKEGAKKLIPYKYASSEDAYETKSLTYFTTHLNTKTQKEEDVEIFAGYSKRVDHRHHALDAIIIACTKQNHIQYINTLNAINTADVENENSKKLKYKAIKDDVCLENSSKNFITPWSKDRFIVDVKNCLSDVAISHKNTRLLISPSKHRLGKDIKQTQLASIRGELHKETNYAKKNYFEGGKTPITKLIPEILKQKKENQYQTMVHFKDFKEIICENVLKEKYQNILIPIFESYDSEKLNDPLCKEISKKILFEIGSRKLFINSTTNEPLDWLSTYSSKDKSVRPNGHLMNLNDAKEIKSIADPRIKRLANYRLVFVNNKKSEIDKLELGVPDKNKLKREAEAMPLYSNAIYEVRLKRSANKFEWVEIKDLSQNDLENIEYTKPKNTAAIKNKLKSVDFESFKRSYFITPLFVSNIPILVKKVRQISYFQDLYEVTKGRYVYSSDVFMAYLFIENGAEKLTAKRETKFLKFIDAVSIINDEKPNFIDYKNLISKEKSNTEIQSGIDSELLFTLAKNDLVYLPDSLLSKDQIEDINWMDRNSILPKLYIVKDMNPSQDKIVFQQFHKSDSITVSESDAKSLFNNSELQGQKEEVKYGTVPMLQYCIKVFIDNLGKKIVPYWEFENGCWNKEKAKEMGLF

SEQ ID NO: 9170 - protein, 1098 aa, unidentified
  REGION 1..1098: note = Description of Unknown: Cas Enzyme sequence
GRLWATQKAKVGPLSKLLTDEFRKLLDDETGDDLWRQRGLLFGQRRQSWDMGTLGRCVLEPSERCAPHADMHASRFRVVETVNNIRVLERGRPERHLSPEERLAVVTLLQGPLGVHEKGNHKGKPKRSVSVTDIREALGLGKAGKSSPVRLSLENDEDREINTDWFYREIIHGAITEPKWAGMDGRQRESLNRAILGFDPEQDKHATQLLAGAQKWWNCTAEQGEALVAAWKKRPPIEKRLNLSRRAVLNMLRVMDAPPTDAAYGFDRTGRWLTQIEARKLIAEDDGFLDVTTGAPLHPRTRARYATGAKGLTARDRYYIKKHPDTLPPAPMLTNPVVRKAIHEVRRHIVAHMHRHGCKPDAIVIELAREAKMSAKDADRTLLRNRLRDRIRKNLLETFDLHSVKPGQQRIATDRAVLAVQQNQVCALCFNQAVKRAITPRMAANGDGCELAHITPRGIGGGNGLNNLVLAHVECNRNMGRQTPRQWWGDRFDAEMERIELMYAKIERIKLTQAKSADQDMLWACYFNKRDDQAKIANFKRTVDDIKGFSDRDLADTRYATRQVLAYLSDALYDGKGLPERGGERLIFTTDGRWTGDLRREWGLFQDAHQAREKGLSAPDEHARKEKNRGDHRHHALDAVVVALTSRSVQVQFENRAKAADKAGITAEDFDAFCRDNPVRPPAPFKDWKDLRDRAIGAIFGERPVSHRAVKRKLIGALHKATPRGPVVTTRTNKSTGATTQEFTGTYTERKSVLLLDANHLRLPRQETRSKAVERLAALRQNEAGVDRRTARKWARAFVDSTQYVPVLVDPSPGQPGIVRNLGLRRVLRNCLTANSLDPDNFTPNQIRKLAEAGKVTHASGVPIRSVVLLRPMSDPVIISRWEHDYATGTPRKVYDAETGEGDAAAARAYDSNNNHHIEIRVDAKGKWTGEIVSAFEAAQRKLAFFRSLRKAGVPRFKELKLLPKAQRRIWTPQIAAADKAHPVVDRSDNLGTGGKFMMSLCEGEMVYMKHKHRPDEPANYFVVAKLDKPQTVVLVPHWDARAAGERKDAAGKKVPDSAREEFAATPTDLKTLAPPGHPHAKKVHVSPLGEVEYLEND

SEQ ID NO: 9171 - protein, 1058 aa, unidentified
  REGION 1..1058: note = Description of Unknown: Cas Enzyme sequence
MKYTIGLGVGTTSVGWAVINNTAERIESTGVRHFESAENPVKGESLAAPRRLARSLRRRLDRRGYRLSNLKNIFIENKLMKHEDIEAVLALPNNPHLLRVQGLDHALSGMDLFVAIYHLSKRRGYKSNRKKVVEGEPKEGQQVLSNILKNKNLISEKGYRSVAESLVKECYDFELNRFVMPVRNKGGSYSMVVSREMLLNELKLILDCQVRHNVVTQICADNLFKSVEYQRHYASGNQIAKMVGTCTLNPVTGELRASKSTPSFQLFNALQKLNHMRVIDSDSNTETSLSLEQVSRIISESQERKDTTYKAVRKSLGLADSQKFKGVLYRDGKDVESEKCFSFSTMYELKKNIGAVSLGFWDQVKSNRDVLDQIVQVLTLYKTDEDISKNLRAVTSVSVPEIIIGGTEDSSTGLVALSYSKFGHLSLQTLYRILPYLEQGMTYDKACAEAGIDHRGRRSEASTKGLLPALSQDDHTVNNPVVRRSVSQTIKVVNALVRKYGKPTSIHLEFARDMAKSFEDRKTIEKSQKENQEKNTAAVAKIREFILQPSGQDIVKFKLWNEQGGKCLYSGKTIDETRLFEDKYCEVDHIIPFSRSFDDSYTNKVLVFSEENQNKGNRLPHEYFGSNTERWESYEVLVNALNIAPRKKRNLLTKTFKLDSLTARTLNDTRYIAKYLRNYIYDYMEFAEDSEKSQRVVTVGGTVTAYLRKRWGLEKRRDESLRHHAQDAVVVACAGMNFVHQVARFAKTRELQYYLMAQKDIIDPETGLELAPEFKTQAREFIQRHENKTKFSFPVPWQGFRDELLMWLSHELDSVEDLAAHYCEVTGKTDVPRDFKPLFVSKMPVRKTTGQVHDQTLRGPKLLSEGVSYTKKKIELVDLKTLEKMKGRLSDSATYEVIKERLLEYGDNPKKAFAAPIYKPSKLGQGNIIRSITVLDDQKSGILLNNGQTVARNDSMIRVDIFSKPNKRGKKEYYICPIYAYHRAQKELPCKLIVRGLHEKDWIIIDDSYQFKFSLQKNDIVDLIKTESNILGYYIGCNRSNASIHLISHDNSKVLSGN

SEQ ID NO: 9172 - protein, 903 aa, unidentified
  REGION 1..903: note = Description of Unknown: Cas Enzyme sequence
RIDAHTPPLLGAYLASLDPQQEKVRRQWTSRKMYTDEFDALWIKQAGRHNLPDEARTTIREAIFHQRPLRDQSRRVGKCSLIPTQPRAPMRHCMFQRFRVLQTVNNTRVAEAHGLTRPLTTEERSKLMNTLLTGDDLGFREAKGLLGLKPRTKFNFGEDDESKFIGNRTDHKLRCAIGDVFDRLSDQERALLVRDVSGRMSDDALRALALRPRPGIPFALLRELELGQRGWGLTADGAARLSTVALEEGYASLSITAIGRLLPYLERGLTVPDAILTEFPEATSSDRPFTKVPPLSCFAGHRKPTVCCLGDQCGARSKIAHRLAAIRNPIVARALTEARKLVNATVDKHGLPAMIRIELSRDLKNPKWKRVAQTKRGEAQAKIRARAKVKILAECNLGRAPTEADVEKALLFDECGGTCPYTGKQYPFTALFSSDSPLQVEHIWPRSRSLDNGFRNKTLCEANENVHVKRGNTPSEVYSGSRLAQIVQRVRAFKGDPRVVADKTARFEEQNPDFGAFTSQHLNDTRYIARAAADLFGTLYGGRGSKGETLRVQVSTGRLTGWLRTVWGLSVDGSEKGKKDRTDHRHHAIDAIVIALSDGRAVKTLADAARRSEVSHTYQCGAGAAQPWAGFRGQVAERIAAVSVSHMQTRKVSGPLHKETVYRNPVGSRSRVRRELQNLSPEEVQGEKIVDRRALAAIRAKLEGLGIPNASKKEIRQTFSQPENRPLVPGHDGQPVRLRKVLVEVADKPVTIGKGANARRVVLKNNHHLVVFATKNSRGQITWVDQAVTTLETYRRVAAGRPVVCRDLGPDKQFLFSLVKGEYLELDDPDGSGTRRLYRVSNISERQSELRLHNDARLSSSLRGSRPKGRRDERVIVAGDRLRELNAKKILVTYLGELRNAGG

SEQ ID NO: 9173 - protein, 1031 aa, unidentified
  REGION 1..1031: note = Description of Unknown: Cas Enzyme sequence
MSNENGSVLGIDLGANSLGTALIDRNAQQIRFTGVRIFAAGVNNLDESKEAPRGVERRMARQQRKQIDRRRRRFHNTFGILQHAGLLPPGPRTPEYFAALDNNLREKFGNPEKLPYAIRAAALDQLLDPFELGRALVHLAQRRGFLSNSKAVEKDEKEAGKVKEGIAELEQNIAAANCRTLGEYFAKHVDPKQRRIRARYTQRKMYQNEFEAIWRAQLSFGSTLLTATLKSRLANAIFFQRPLKSQADKVGRCELEPGCKRAPVALLEVQRFRFLSVLNNLRIVDTDGRNDRLSDVQRAAVLARSETGEKLAFSKLKKPLGLEKNQSFSAESGGAEDLPGVPSAYRLRKALTRAWDDLTPERQRELVEFLVLGAGHPEDQIAHLIAGFEFDEATASAAVATALPQGYYSISLEAIRKMMPLLAAGQSYATARKEIYGEVRRSEPVALLPALNTETVRNLIGDVRNPIVMRSLSELRKTVNAIVRKYGKPEFIHIELARDVRRNADERARLSKRNNDQRKTREAATQHIASVQGIPVGNITRRDVEKYLLAQECGFRCPYSGRTISMEALFGQHALFHIEHVVPYSASMDNSFDNKTLCYHELNAVKRDRTPWEAFGASGDWENIVERVKRWPAPNPRKLRRFLMNETDRAKLLEEFSSRQLNDTRYASRLAALYLGLLYGGTVDADGSKRVFTCSGPVTSILRDVWDLNRILNPASPGKSREDHRHHAVDAAAIALCSQGMVQRLSEAATQAASIGRRRLAPVGEPWPGFREDLEKSVLATNVSLKPEYKLQGAMHDQTLYSRQRPAPDGKKVVHIRKPVTEVKPAEIVDPRVREAVEATIAEVGSAKKLGVDDKWPVLTTRTGKTIPIKRVRVKKSETPVALGHGVKGRWVVPNSVHHTEIVRNESGKKVRFDHHPVSTIEALRRLGAGEPVVRRDFGEKCRFVCSLRSGDLLEFRVSHTPNTLWLVRTVKSNGQIELNPVSDGRKKAEIMDSKLNPTRVFLTQVVNITFAEGARKVLVSHLGEVLAAHD

SEQ ID NO: 9174 - protein, 1112 aa, unidentified
  REGION 1..1112: note = Description of Unknown: Cas Enzyme sequence
MQKKPYRLGIDMGSTSIGWCMLELDSEKNPCGIINMGVRIFPDGREDYHKTPLSVIRREKRGQRRLFDRRRWRTQHLVKLLIQSHLLPENDAERANEFLKDPLFLRNKALDEEVTLYEFGRILMHISKHRGFKSNRKAEKGDNKKSKYTTAIDNCIAKIDPENSIRTLGEYLWNINKMLNTDEVHREEEKKRGFKPKKGNGKMHLKEPVRFRYDGAKKDLSIIFPTREILQNEFSILWDIQSEYRSELTDELKERIRFLIFEQMKLKSQKHAIGYCYLESDERRCPKADPLFQEFRLWQTINNLRIKDIDENIERKLSLDEKQSIFKYLNTKTSATFISLRKKIYPGNADRYQFTDEVRKKAILGNETEAIFHSKENAAISQIWDSFDDTTKSKVIEILVDNLDEENQIQLVKALGISQSDAERLVQIDIPPKLEGYCNLSLVAINKLLPHMREGMMYSEACIAIGKSHSSAYTGEIFDSGNLPYYGVKLKRQSIPLNRPSNEPNADKHGKINNPTVHVALNQLRKVLNAICERYGPPTAIHLEMGKDVPMSAVERSDISTFQENNEKRNNEIAEVLSSLDPPIKATKENILKYKLWQQISMNEFERYCIYTGRNIGIHKLFTADIEIDHILPKTKTYDDSMANKLLAFKDANDFKNNRTPYEAFHNNPPGYDWQGILQRASTLPDSKQWRFLNNALEMYLTDKEPIARMMADTRYMAVAAREYLSYICGEDNIVSCTGRLTSNLRHEWGLNKILNDDANEKNRRDHRHHAIDAFVIACSDRSTIKKYAIALQKTTKKHISKMDKPYLAFSPSIVAEFINKLYVSYKPNQTNPQKMIQNNQTAGALLDSTAYGYVGKHPQDPDYSRFRLKKEISALKPQDVAAIKSDYIRKALIKHLEETNGDMDMALSKFENIRNNHQKPQTKIKRVSLLYKLRPSTTIEDEVVEDLGDVKDKTMPITVVPVCNRFGRPYKYLASDENIFADIYSEKPKDKDFPWKMEIIRSVDAHQKNFVPNWKKKHPMAKLIMRLYKDDIVAFTNDDGNREMRRVRKISGEIFCLREVNIARKPDGVGDDVGEKFSYMNLQKRGAKKAGIDIIGRCFDPGGKTDAGDRT

SEQ ID NO: 9175 - protein, 1019 aa, unidentified
  REGION 1..1019: note = Description of Unknown: Cas Enzyme sequence
MLPKMRYRLALDMGTNSIGWCLIRLDALENPIAIIKMGARIFSDGRNPKDGSSLAVTRRNARQMRRRRDRLLKRKERMLQALIRLNFFPSDAAERKQLIQLDPYALRKKGLHEPLTGPEFARALFHINQRRGFLSNRKTDKTDSESGALKKAIKSLQVKLTEENCQTLGEWLAKRHEARLSVRARLRGKTIKDKAYDFYVDRAMIEHEFDTLWAKQASLNSYLFNDAARDELKDTLFYQRPLKPVKPGRCTLIPEEERAPLALPSTQRFRIYQEANNLRWFDYDLLEHPLTIEQRDKVVNLLERQGEAKFTKILKELGLPGTTKFNLEDVKRDRLKGNHTSFTLAKDNHFGDRWYEFPPAIQDEIVEKLLNEASESVLVGWLQENAGVDEPTAERIASVSLPEGYGSLSRTGLRRILPELQNDVVVYSEAVTRAGFDSHSALSHTQQTGEIFDALPYYGEVLQRHVGFGSGNPKDPPEMRYGRIANPTVHIGLNELRKVVNALIKRYGRPTEVIVEITRDLKLSRERKLEIQKEQKARQDLNDKQVTEASAILGLTPEHLDRNKRRELSQKMQLWVELDPKNVIERRCPYTGEQISVERLLSDEVEIEHILPFSMTLDDSLNNKTVSLRRANRDKGNRTPFSAFGESPMPGYDYESILQRALLMPREKSKRFAPDGYQRWLREDKDFLARALNDTAYLSRIAKEYLSLVCHPNKVRAIPGRMTAMLRGKFGLNQLLSGSEIKNRNDHRHHALDAAVIGITDQGLLQRFAKASANAREIQLDRLVENMPLPWPTYRWHVERALNSIVISHKPDHGYQGAMHEETAWGLRGDGVVSRRIRPEDGGPRQRDEQNKNVIQITSTRDPLRHGVGDDGQALPYKGYVGGSNYCMEIWRDENGKWNGNVVSTFDAYQLIRSFGEHEGFRRLNNPDQSMNGKPLVMRLMIDDMVRLEVNGAIRTMRVAKISGNGQIFMCDHNEANVDARNRDKSDPFAYLSKMAGSLQKAHGRRVTVSKIGELHDPG

SEQ ID NO: 9176 - protein, 1339 aa, unidentified
  REGION 1..1339: note = Description of Unknown: Cas Enzyme sequence
MKKILGLDIGTNSIGWALIEEENNILRKINSIGSRIIPLDKGLLDEYEKGNDISKNATRRQKRGSRRLNHRYRLRRNNLITLFRILGIVPAGLEPIFNKIKIEGKKLLLPQSAFEKGVKQLNPYELYELRSIALNKKISLEELFRIIYHLNQRRGFKSNRKANKTEDENQTENIFADSKKQSEISYEKVTIVNVEPTGERKGKKQNEELRVILEDGRSSLTDKFIFKKLIGETVILKIKKEILKSTKEPKYTFSIPSKWQKNRKELNEAIIKAGGFPGKYFFEEYLKAKNESKWYEFKVRESIVNRELYENEFQTIWDTQHKFWLQENNIDINFLKNYKEAIETIVPFHNKKEKQKWIQKGIGSFIRNYIIYYQRELRSQTRTIGDCRFEEKYFKKINEETGEVTLERSGPKCCPKSHPAFQEFRIWQQINNLIVYDEKEEVVNIDDNIKVNLFNYLNEREEVKPEEIKKFLQKKFPQINEINVVKNWMGNRMLHFFKKIFNSKDFNGKAILEYKEKFMHLWHLIYSVTSEKGIKTGLTKLDPNIPQDLIKILSSIDYKEKQYASLSLKAIKNLLPLMKCGSLFNENELTEKAKSRIDQFLSGELDREFDEKTLEKLKVKKTTEDFKGLSYYKAASLIYGKHTAKQENRYEQPEDILPVPRNSLRNPIVEQVVNETLMLVKDIWVKHPELKEGEIRIELARELKSNKEERQRVANRQEINKNENLQAVEEIRRHFGSNYNPSLADIEKVKLWKEAGMKSPYTGQTINISDLFSSNVEVDHIIPRTRYYNDGLINKTICESHINSDKDKMTAYEYMNTGTPYQFEKLSYDKFLEFIKRFPVPKRRMFTMKEIPDDFIERQIKDTQYIAVRIKEELGKIVGLNNVKTTTGQITDYLREQWGLGELMKKLLKPRFEKLQEKFSEQLVNEEEIIGSNGKPTGKKRTVIKGYSKRFDHRHHAIDALIVACTRQGIVQQLNLLNKITKGKTKQIEETIGDSLRKFIPPTGKDDIKANKFFAIAEEAVSSIIVSYKNRKRLVSKGINWYQKFNSNKNKIEKFRQEKGIPWAIKGRLHEETNYGVIEHDGQLKFTCRYLLSELTTPQIHNILSLPIKEAVLMHLNKPEYNGDLKKAFGPEGLIDFNKNRKIPVYSVVVIKRGNVDEVRGTQYLYEKERKLVVDTGGNYYFSVYEHPETKERKFDVVSFFDAVQLKINGENPYKTEIGYKYESEGYKLIFSITHNDLVYASAENESVEEIDWTNIKLLSDNIYRVVKFSGTQIYFQPYNYSQEITIHEGKASSAKEYKGEFNKGTNGTEKILGTDISIKNVCIKLNVDRLGNIKPAVN

SEQ ID NO: 9177 - protein, 1181 aa, unidentified
  REGION 1..1181: note = Description of Unknown: Cas Enzyme sequence
WVPNRKHLLARNVMSGEATELTTTPISYRLGLDIGANSVGWAALRLSDESADAGRVQGLLAAGVRIFEAGVEGSIEQGKDGSRAVARRLARQQRRQTWRRQFRKRQLFVLLQRHGLLPEAEDSSSAGRDAVLKPLDQELTGRWCSAGDLESHQKLPYLLRAAAAERILEPFELGRAIYHLGQRRGYKANRRTPEGDDEQQGAVSGGISLLDQARLRDPADPASLRTLAQTVVEEFRFSGGHFAIRSEAAESSRRGRVRGHYTSRQMYIQEFEAIRNFQLANGGPLSAKTWTLLEKVLFRQRPLKSQSHLVGRCTLEKDRFGRGRRRSLMALSDFQEFRLLQSLNHLMIVQDDRTEKPLMPGQKEILYDHLMREGDLKLRTRAARGKTAAASVISLLGLAKNTQFSLRSPEESEEDDVRLIGHRTNAKIRAVLGGEWDDMAESQQEKLILQLVYAADPERLSLWLTLHFGFNEPLARQVAGITLEEQHASLSRRAIRRLLPRLRAGESYAAARQAVYPDSLRATAAAEKLPPVTTWNREINNPAVIRALTEVRRVVNSLIQRFGKPAAIHVELARDLKRSRKERTQLWKQNEDNQKLRDRAKVEIVEQLGYSSPSRADVEKWLLAEECNWQCPYTGRPISAATLKHFDVEHIYPRQYLDDSFGNKTLSDPEFNRARKRNRLPSEVLEGAEWADVLTRVRHFKGRFAEAKLRRFQAESVPEDFVSRQLNDTRYNSRLAAQFVSLLYGGRNDADRQQRIVTPTGGLTWLIRRGFGLDRILSDGDYKERSDHRQHAVDAICVALSSQKVIQRLSGLAEQVSQSSQRFNAFLSEFAKELPWPTFHEDAVQAIQGIIVSHRPQRAIGGPLHAETYYSKPLPAPAPVESDGARGKGGRSKVTEHRVRKSIDSLKKKDIEGDAIVDLAVRAAVQRKYAELASAAGSASAADPKKLWGNRADTRRFPRLPPSRAKSGRSGEAGGSIIFKVRVRTSVNAKTVGKGVTQRYVAAGVDANFAAMVYEIASADGRSLRWVHEVVTRLDAHQKLVERRRLLRESSSKGEALGAIGQTVSESFGELILLPRTRDDFATMSNPPFAVKADDSIRFVCAFRKNDLLELDVSDGRLIYRVQNFSTGEIQLCEHFRQIVDKKDRNTSNRITATDALRRRRLRVVHVTPSGEIRNVETLQH

SEQ ID NO: 9178 - protein, 1034 aa, unidentified
  REGION 1..1034: note = Description of Unknown: Cas Enzyme sequence
MECEITRYRLGLDIGSNSVGWAAVRVEDGKARGMLRCGVRIFPAGVEGSPEQIEQGREESRAAKRRQMRLMRRQTDRRRRRLKRVYGLLASWGLLAEGETSAARGRALEALDRELAARYPETSMPPYYLRARSLDHKLEPVELGRCLYHLAQRRGFLSNRKVRSRESEEDRGKVKRGISQLWAAIEASGARTLGEYLSRLDPHEERIRERWTHRDMFKQEFDAIWTSQAAFHPFVLTPQRRTELFQAMFHQRPLKPQTELIGKCELEPDQLRAPLWQPLCQRFRMLQQVNDLRLMDPAGAERALSSDERALLIGELEANGDLEWRRVRRLLGVGKAVQFNRERGGEKRLVGNRTAAKMRSVFHHRWDEMTSEEREEAASDLVGDLGEGELARKGVERWGLNELLAAEYADLELESGKYLSLSLRAISRLLPRMEGGEAFMSARKAEYPETFEVGPALDSLPPVVDGLPEIRNPAVVRTLTEVRKVVNALVREYGKPEEVHIELARDLKRPRSERERRADRMRQQQKRREEAVKKIQAEGGPGEPSGAGVQKMLLAMECRFQCPYTGRQFGYKSLESGEVQLEHIIPFSRSLDDSFLNKTLCFVDENKRKGDQTPWEYYGRAGHPEWENILERVKKFDSPLATQKLRRFQMREEELERLLGDFSSRQLNDTRYASRLAARYVGLLFGGRADQDHGQRVFVTGGEVTAYLRRLWSLESILGAGEGKTRDDHRHHAVDALVVALTGPVWVKALADAASRARAVGHRRFSSLEPPWDGFVSEVRDAVLRTVVSHRPDRSVAGRFHDETFYGLRDHRGQRSVASVRKAVWRLTADESDQILDPAVRDRVRLQVGILGGDPKKLKGRDNEPRLPTRDGREIPIRRVRVAVNKEVRAVGRGERERLVMGGEYHHAEVFAVLDKAHNVKKWDCALVSHQDAAERLRRNRPMVARDQGSDSRFEFTIHKNDTLEIGPEGRRRLVVVKGLEADKRVGVADVTDARPITTANRNRERYTVNQLMREHRCRKVVVTPLGEVVPCHD

SEQ ID NO: 9179 - protein, 1395 aa, unidentified
  REGION 1..1395: note = Description of Unknown: Cas Enzyme sequence
MSKILGIDLGTNSIGLNLKEDDVFSWYGVSIFRKGVGEGKSGEFSFAAERTKHRSSRRLYNSRRYRKWETLKVLIEYGFCPLKEGNLKNWKNYRKGIGRVFPVNDSEFDRWIKLDFDGDGKPDFSSPYQLRRLLIFDELDLSKVENRYKVGRALYHIAQRRGFKSSRKNGANEKTAVYKGSNETKTIGRNEYENLIEENGSLGAAFAHLEDQNIRIRNRYTLRSDYQNEVHKLLEFQKVSDKDFIEKVDKAIFFQRPLRSQKGLVGKCTLEPNKARCPISHPKFEEYRAWSFINNIKYKNKFSDANEWEDLTLEQKQKLYDEKFMLLRSDFTFQDIRKWMEKELKLELKWVENKNYRTINYKDDTNISGCPISGRFKKVFGNDWEKYAKTVVRQNKKGEQETISYNIEDVWHILFSFEDEEYFTEFLENVLDLEENQIKELLTLFNNFPVGYANLSLKAINNILPFLKEGLIYSEAVILAKLPELLGKENFEANKSSIISELENEIKENRYQKTIITIVNNLIFKYYALDFDERFAWKDTDYKLDKSDFKEVEIASIEHYGEKTWGKLEEDFKQTLLDDVAKLYQDFFASAKREHIKPPHLVNQIKTFLDDNFNVSEKLLDKIYHPSQIDIYPSKEGQVLLESPKTAAFKNPMAYKTLYKLRDVINYLIEIGKIDNETRIVVEIARELNDSNKRWAIEKYQRDREVENRAFASVIEELLKESNFSGYANPKSDIDIDKFRIWTEQLENFDEVKTEINSIENNKKISVSDKYIMKYRLWREQNCFCMYTGKPIRLTDLFDKNKIDFEHTIPRSKSFDNSLANLTVCYADYNRNEKKNRMPTELANYEVEAKGYSAIKPRLAAWEKKVEDLFSQIEFWKNKSKRAMDKSEKDNAIRQRHIRQMEYDYWKNKVDRFTRTEIPKGFINSQLIDTQIITKYAFHYLKTVFNKVDVIKGTQTAEFRKIYGIQPKGEAKNRDKHSHHAIDATVLTLIPSARKREEILKKSYEFAEANNNKQYHEKPFPTFNYSMIEEVEKNILINNIADKDQTLTPGIKKVRKRGRIVWLRDKEGNLLLDENGNKIPKIAQGDSVRGELHKDTFYGKIKVAEKDKNGSLIRDEYGVIQYEKDSKGQDLIKMVVRKAIDTVNFKSDIVVDKYLGEHIKSQLSKGIKQNDLKDFQGNIIRHLRCEAKAGSGILNPDNVTVVKEQTYKSNKEYKNYYYTNTGDNYMFGLYENENGRKIISINVLEASRYSLDKNKDSKYDIFKSVEPIIIGLGKKARKAKLVHIFQVDQKILFFKENREELKEMSKMEISDRLYYIKRFHQAERGNIVFQHHLEARSDDELNKELGTLGKNGFSIDKLTNSFVPPRILFTPNKNVFIIEGKDFEMKLDGSIDFKF

SEQ ID NO: 9180 - protein, 919 aa, unidentified
  REGION 1..919: note = Description of Unknown: Cas Enzyme sequence
MRKLLAFDLGTNSIGWCIFATDHVQSPASILDAGVRIFSDGREPKSGTSLAEGRRVARGMARRRDRYKRRRKAVLRTLTEYGMMPADPRARAALVAETGDSGRAVSNDVYSLRRRALDEKLPLFHVGRALFHLQQRRGFKSNRKTDRKDNEKGAIALGAEKLHLAMKEAGARTLGEFLAGRRGADPANRGDVRVRMDAAGADGPDGRKDRPGYEFYPVRAMLEDEFERIWDAQAPHWPDILTRERKAHLFRIMFYQRPLKAPVVGKCSFNPAEERVAKAHPLFQAFRLYKEVNELELVLPDQSHRKLTLDQRDALVTLLRRKQSATFKSLRKELKLSDRDMRFNKEGEGRDKLVGDEVYSRMADATLFGNRWAAMPMERQWEIVSKLRDEADPFALHQWLVSEAGLSDEAADKAADAKLPEGYGRLGATALSDMLEELKADVIPEAEAAKRCGYDHALARTGEGVDLLPKYQEILERRIPPGTNDPGDDYDIRKGRITNPTVHIALNQLRALTNRLIARHGRPERIHIELARELNQSEDQKREATSRNARNRRDAERRSAKLIELGQPDTGFNRQLLKQWEELNPHDPLDRRCIYSGEVITASMLFSGAVDIDHILPWSRTLDDSQSNRILCTREANRQKRNYAPAEVPLWQDRYDDILERARRLPENKRWRFARDAMQRFEKERDFLDRQLTDTQYLARLAHDYLGALYPDEEADGDGVVKRRNHVVVVTGRMTEMLRRKWGLNGILSSHNLPESAGSRADPAKPKNRNDHRHHAIDAAVIGVTSRSLLKRIADAARDGESEGAENAIRAVEPPWPSFREDLKAVVDHIVVSHKPDHGSLPRPGERGRTAGQLHNDTAYGLTGETDARGNPVVVRRKPFLSLQPKDLPSIRDVDLRRRLEIATMGLSGREFTAALTKF

SEQ ID NO: 9181 - protein, 1485 aa, unidentified
  REGION 1..1485: note = Description of Unknown: Cas Enzyme sequence
MKKILGLDLGTNSIGWALTTHDFELKKGEINGLGSRIIPMSQDILGKFDSGQSHSQTAERTGYRGVRRLIQRNLLRRERLHRVLNILNFLPEHYANAIDFEKHFGQFKKGQEIKLNYKKTIEGKHEFLFMDSFQEMVNEFLKNQQSTKIPLDWTLYYLRKKALSKKISKEELAWVLLNFNQKRGYYQLRGMEDTDSDKEKNKTFETLYVSEIKNSGDIIKKTGDVLYDVYFDNGWKYEKQITKPENWLHKTKEFIVTTSILKNGEIKRSFKIVDSEKDWIAIKKKTEQDIKESSKTVGEYIYETLLSKPKQKIRGKLVKTIERTFYKEELQKILKTQITFHPELEDRKLYQACVNELYPRNEAHQNNIKNKDFEYLFLDDIIFYQRPLKSKKSTIANCPYESRVFLKDGIKQNPQPLKCISKSHPLFQEFRLWQFLRNLKIYQKENNENGKLDVDVTAVFFKDEIDWVHLFEFLNDKKNIEQEQLIKYLVGIDKIEKQNKTNYRWNYVEDKKYPANETRASFLSRLKKIENLQVDEFLSKAIEFSLWHIIYSVKDKQQYSTALKTFARKNNLDETTFIESFIKYPPFKNEYGAYSEKAVKKLLPLMRMGKFWNEDEIPELAKDRISNIQERLESIDYDKEVFEKDRNDRLKTIVDDEIPKQFVKSFLSFKNRNPLTGLNTYQACYAVYGRHSEVGIIKNWNSPTDITAYLDEFKQHSLRNPIVEQVVTETLRVVRDIWQHFGNGEKDFFNEIHVELGREMKNSNEKRKRMSDRNTENENTNARIKSLLEELKSESNNDIRPYSSSHQEILKIYEEGVYQNPEVSYQKLTEDDVIKIRKNTTPSKAEINRYKLWLEQGYISPYTKEIIPLSKLFSIDYQIEHIIPQSRYFDNSLSNKIICESEVNQLKDNRTAYEFLKDENGRIVALSNGNSVKLLNIEQYEDHCTQYFKKNRTKLKNLLSEDIPEGFINRQLNDSRYISKLIKSLLSNIVRDDGEKEATTKRLIPVTGAITSKLKHEWGLNDKWNEIVAPRFKRLNALTNTNDFGYWDDKINAFRTQVPDAISRGFNKKRIDHRHHALDALVIACCTQRHTNYLSALNAEKENFGLRDSLLIKNENGHYTKHFQIPWANFATEAKAQLEKTIISFKQNLRVINKTNNKTWQWKPQENGAFKKELIKQTKGENWAIRKPMHKETVSGFVKIKKIKKGTSNLLSYLDKADLIVNKSIREKVKSLSVVFDGDLKRIKKHLKESPLLINQSEVTKVRVYEWTTNATATRVALSEKLTRKQLEAITDSGIQAILENHLKNYIDDKNVERFDLAFNPDGVEALNKNIQILNNGKKHQPIYKVRLYEEGSKFKIGQTGAKSNKFVEAAKGTNLFFAIYYDENKQKRVFETIPLNEVIEHQKQTAHLPKDKRLPIQPDNTKGNFLFSLSPNDLVYVPTDEELENSSLVDFNNLSKEQVSRIYKMVSSSGNQCFFIRADVAVSI

SEQ ID NO: 9182 - protein, 1326 aa, unidentified
  REGION 1..1326: note = Description of Unknown: Cas Enzyme sequence
MGARYILGLDIGSNSVGSAWIDLEKGSIDVGLGVFPAGVDETDDKRGEPKNAKRRMTRRTRITLARRSLRKRELRLELIARGLLPADADAFKTLLEETDPWTLRRKGLDHALTPHEFGRVLVHLAQRRGALGIREPEEGEEGGEDGKVKKAIGETRAAILARSKELGKQVRTFGELIDLLRAGDEKRHSITTTDSRSEHQRKGPREWRDAVRNRGGEFQFHADRAMIRDEFAKLWIAQRKLGGTLGPLLTDELRTKLDDESGDSLWRHRGLLFGQRRQSWDMGTLGRCALEPAERCAPHADRHTSYFRVIETVNNIRILEGGNAGRPLSVSERTKIITLLRGPLGVHEKGAYKGKPKRSVSVTHIRAALGLGKGGKTAPVRLNIEADEDREINTDWFHRAIVHGGLTEARWNGMDERQRESVNKAVLNFDPDRDEHAAELRAGAIKWWSCTPEQADGLVTGWRTRPPLEKRGNLSRRAIRNMLAVMDAKPADPALGFDRTSRWYTQIEARKVIAEDGDFTDATTGEPIHPRTRDRYATGAKGLTARDRHYIKMHPDSLPPAPMLTNPVVRKAIHEVRRHIVEHIKKHGRKPDAIVIELAREAKMSAKDSDRALFRNRLRDRIRKDIIETFNLHAQKQNQQRAAVERVVLAVQQKGVCPLCGNQTIQTAITPRMAAEGEGCELAHIIPRGIGGSNGLGNMVLSHIKCNRNMGRRTPRDLWGQTFDAEINRVEQMYTKIDRVKPKDVDKASEDKLWGSYFDWRDDDRKIANFKKAAKDIQGFSDRDLSDTRYATRQVMAYLADALYEGKGLPERGGERKIFTTDGGWTGDIRREWGLFQDTHHAREKGTSTQEEHARREKNRGDHRHHALDAIVVALTDRSLQTKWEQREMQAEKDGINTADRAEIEKYRELHPLPLPGTFKDRKDLRDRAMLAVFGDKQGPERPVSHRAVKRKLIGAFHEETLLGPVVGRDGELTGHYTGKKSVLALDPNHLRVPRKETAKEAIERLSADRKQSQEIDEKTARKWARATIAAKEYVPSIVDPSPGNPGIVRDRDLRRTLRECLESNGLNPDDFTANQIKKLVEAGKITQKSGVPIRSVVLLRAMSDPVIASRWEHDHATGVARKTYDAITGEGDLAAARAYKGGNNHHIEYRVDEKGKWSGDLVTMFVASQRKLALFRSLRKAGVPRFKDLAKLPLAERKRWKPQIADADRQHPLIDRTDHLGDGGRFVMSLCEGEMVKMRHKETQEVGYFVVAKINPPRSVVLVPHWDARTATERKDSADNKVRGSERESFTATPDDLKTLAPPGHPHALKVRVSPLGMVTILEKD

SEQ ID NO: 9183 - protein, 1102 aa, unidentified
  REGION 1..1102: note = Description of Unknown: Cas Enzyme sequence
GIASVGWAVLAPDRIVALGVRAFDKAETAKDGDSLNLVRRTARLTRRRLHRRAWRLRKLARLLKRQGVVDDPQLFQPQHPFPHSIWRLRVEGLDRQLNAEEWARVLYHLCKHRGFHWTSRAEEKQADADSKSEGGRVKQGLAGTAKLMQEKRYRSAAEMVLAEFPDAQRNKQGDYGKALARILLGDEIALLFKQQRELGNPHTGQQIEAAILGNGDRKTGLFWEQKPALAGNDLLKMLGKCTFERKEYRAPKASFTAERHVWLTRLNNLRVVIDGRTSALNEQERRVALPLPYQQAGDFTYKQLGSALVKAGFFEPDGFRFTGLSYPSEKQKAEGNPKDPEKAALVKLPAWQEIRSTLKKAGLETEWQGMAGAATSGSPELLDQVAWVLSVYKDDDEVTAELIKLNLPGADKMLDALLDIRFDKFHALSIKALRRIVPPMEAGLRYDEACEQAGYHHSQIHKAGEGAHQYLPPLYSGRDKAGRMVFSEEMDIPRNPVVLRALNQARKVVNAIVRQYGSPGAVHIEMARDLSKPFDERKQIERDQTEYREQNDKDRARFTEHFGRPPKGVEFEKWRLYREQQGKCAYSVEPIDISRLLEPGYVEVDHALPYSRSFDDSKNNKVLALVRENRNKGNRTPYEYLGGAEDSDRWRQFVAFVESTKAYRLAKRSRLLRKDFGNKESEEFKDRNLIDTRYICRFFKNYVERFLKLAEDSQAKRCVVVSGQLTSFLRARWGLIKLRADSDRHHALDAAVVAACSHSMVKRLSDYARRKELDQVSDGFVDVQTSEIVNPAMFQKLQEHFPDPWPNFRHELETRLKLDDPAVMRAALSQLGSYPSEALDTLRPLFVSRAPQRRNSGAAHKETIYAQPKRLKEKGGVTQRVPLVKLTLKDLDKLIDPHRNEKLYAAIRVRLVAHGGKGDKAFPVGNPLRKPDHEGNPTGPVVRTVTTVIDKLSGISIRGGVAKKDSLLRVDVFTKSKQFYLIPAYVHDQVEKTLPAYTADGEVKIDDSFIFNFSVHPNDLVRVAFKKNESILGYFKGYGGPPNPYNITLLIHDRNSKSHKRANDKGEIPSIGVKTALALEKFHVDVLGNIYPARSEKRRGLA

SEQ ID NO: 9184 - protein, 1010 aa, unidentified
  REGION 1..1010: note = Description of Unknown: Cas Enzyme sequence
MAAVLGLDLGSDSIGWALVDRESEKIIASGVRLFRTGEGGDETPNQTRRAKRLARRQRRYRLSRYRILTDFLIAAGLLPEFLPGETRHEYLNRLDKRIQSEMRTALSQGEITLPAADALIAAQRMPYAACYFLRYFCCKFSCNAHWYGRALLHMARFRGFSYQVKTRDQVEAESKKSDSDIKGEALKARLEQEGKILAQEFVERCLERKGIRKSRYTSRFSLRDEFSCLKQNLLAHNPTLSTFFSTNENVNIEDLLFKQRGITVKRSTIGRCSIFPNSERASKLLPEAQEFKIRQALANIRLFGAVDGGKRPLTSAEASSVYESIQSNGKISKTDFFKIIGLKTKTKDSIISSNFEELKDQLTDSLAIILKGMDQLSSGDNPCSKWNADLRKEFACVLLRFNNQEAAERHLVKKFDLNDEQARFAMNHRIPTGRAAHSTKALRHMISELLSGRPPHLIRESLGTPVSNQQLNNLIPVVKAFPTLRDPAVIRTLSQLRKIVNAVVERYGKPESVRIELARSRKLSKREQDAITRLNKNLREERQDIAQWLSSHQIEASDTNVLKFRLWRESAHQCLYCGSMLSFRQVFSSNSCQIDHIWPYSRTLDDRYINKLLVCSGCNQEKGNATPFEKWGANSERWKAIASRFDSWADKKVGSDEVFRDLSESLRNLAGGNRISSKRKRVLEQSSDLIEGFLARQLHTTGYASRLAREYLNLLYSDPNKVNVSSGFITGRYRFALRQTYAAQVRTSLPLLLDEDAQKSRNDHRHHAFDAVFIALSDDRARLALQREWSDGLKAALNAPWQTFGHDLAAVLQKINPVPYFPQKDADRISGKIDKSGFRHRGQLVPRGALHDEMAKTEDERGSRSRSHPSQTSAYFNVKENAFVMIGQASDGSWGWKAMSLWEWCDRVRTHGYTYPTEFSLSIRNKPVTYSTKSIFRLHEVFTLNEAPGLWRLVNASDSEFLFIPLHDARLPVFLRDNRIAVRMQGKDAFRIHLPKKVILSPLGELLPVS

SEQ ID NO: 9185 - protein, 962 aa, unidentified
  REGION 1..962: note = Description of Unknown: Cas Enzyme sequence
LQRHGLLPKSEGSEPLQRKVALDSLDAELRDKHLIADDHLAQQKLAYVLRAKSAEERVEPFELGRALYHLAQRRGYLSNRKGDSDDDERQGKVDTGIKDAERAAGDQTLGQLFARQVNVFDYQVDPATNRPDPKTGRIRRRYLGRHQYQDEFRRINATQQPHQSISEEAWNEIERRIFFQRPLKSQKHLIGRCTLDHLRVRMPDYSERELTESERTKLIAVLQTAGEMSLKSTAKKATGLPKGASFTLEEWEEKLVGHRTNLKMIGAFGDRWLSLPEDLREQITLEVLCYRKPQALVRRAMDAWGLNKEQAEKLAEIRLEEGYASLSKAALKKLVPIMHNGTPYGTARKEAYPESFDAGHAQELLPPVRTWNRDIKNPAVIRALTEVRKVVNALVKKYGKPAMIRIELARDLKNSRDRRKKLWQDNMDNRRRRERATAAILNDLKNDRPSRNDIDKWLLADECHWECTYCGNAFGAGDLIGRHPQVDIEHIFPRRYLDNSFGNKTLACRTCNQRKGNRLPKNAFSPEEHEAILQRVRRFDGPHRIKKLQRFQADAVPEDFVTRDLNDTRYNSRIASDFLGTLYGGKVDEHGRQRIFNPTGGLTALIRTAWGMNGILSDNNEKDRNDHRSHAVDAVVVSMSDQGLVQKLSNVAQEFEQKTDRERAFLSGFPDPWTGFVADAREAIHRILVSHRPTRTLAGPLHAESIYSKRFGTEKQPEYRIRKELAKLTTKEIEGEQIVDPAIRRLVQQKFAELGGGDPSKQFSDPRNHPFMTAKDGRQIPIHKVRLRVDTKPREIGKGPRARNVASGKDSNYASMVYAVLDKDGKEKKWVHEIVDRLTAHERLSANRKQAGEKVLIPDEQEGQRRFKFSLMKNDLLLMEGPEGKDELYKVLSFSSSELQLCPHHISKLEKKDRSKWDRITNVDSLRQRHAQRVAVSPVGEALLSPEQGVQKSAVNAPAKAH

SEQ ID NO: 9186 - protein, 1026 aa, unidentified
  REGION 1..1026: note = Description of Unknown: Cas Enzyme sequence
MAGAALGLDLGANSIGWALVDEASQQIIASGVRIFPEGVDNFDTGKETSKSESRRTARGMRRQIARRARRKRRLREGLTAVGLLPTEPIALQKLLDLDPYMLRQRALHEKLSPHEIGRLLLHLNQRRGFLSNRKSDRERKKETQGMLAEINELAGAVKDAECRTVGEYFAKSLAENQHQRVRGKHTRRDMFEEEFETVWQAQRQYHPELLTDKLKYGSLGKVSAVRDPVACSSKRSLIEQFGVYGLIFFQRPMYWPRSVVGQCELEPKRKRCPRADRLAQRFRLLQEVNNLRFIDPATGDEHQLTAEQRTLLIDKLAKTKEMSFDQIRKALGFIDSIPFNLEAGSRSKLLGMLTDATLADKKLFGPAWHKRAESEKTAIARALIHGDEAEIRQQAKASWGVDDEVVERLLDVDLQAGYARHSIAALERLLPHMERGLLYMTGDGTPSALSEAGYLRPDQRQRNVLELLPEPPDIANPVVRQALYELRKVVNAIIKKYGKPTAIHLELARNATVSSEERRKMSKRMRDREAERDYAADEVRALGYKVTRDAIDRLLLWKEQGEVCMYSPDSLPISQIQLFSGEVHIDHILPYSRCLDDSFANKVVCFVRPNADKLNQTPYQWLAARDPVRFETIRQRAMRLPYNKRKRFTQKELDLEQFIERQLNDTRYISRAAMEYLRTLYAEPHHVLCPKGNHTASFRWLWGLNTVLHDDGTNKKSRADHRHHAIDAIVIALTDRKRLLALTQAERYGATVQRPEKLDPPWPEFRASVEQSVAAINVSHRVRRRVAGALHKETLYGPTPTPGEFVVRKPIESLTPAMIDDIRDPAIRQLVIERLASFGIKFGRAAKDKIPKEVWSESLYLVRKNGRTTKTPVPIRKVRLIKTDQTILPIRDNQTYVKPGSTHHLSLFEWEEKGKRVRDTVPITMLEAIGRLQRREPLISRIHPKRKDARFLMSLSAGESVILEHEGREVLCVFITAASTTQQMIFRAVTVSGRSDDNTPIRKQPNTFHGRKVTVSPLGEIRWAND

SEQ ID NO: 9187 - protein, 1015 aa, unidentified
  REGION 1..1015: note = Description of Unknown: Cas Enzyme sequence
MRLGLDIGTNSIGWWLYKIEDGQITSNVDGGVRIFADGRNPNNKESLAVDRRLARAQRRRRDRYLRRKAALMKRMAAVGLMPKDPCEAKKLEQLDPYKLRADGLDKPLQLNHFGRVIFHLNQRRGFKSNRKTDRGDNESGKIKDATARLDQEILAKGARTYGEFLHKRRAAAPDLKQIPSVRTRLTVATRGSMGKEEEGYDFYPDRRHLTEEFERLWDEQARHAPHILTEELRDEIYKIIFHQRPLKTPEVGLCLFTDERRISSAHPANQRRILFETVNNLKITARGEGSRQLKMAERDEIIHALYNRKHTKTLSGMTMKLKALGKVIRLRSDQYFTLETANRDAISCDPVHASLSHPNRVGSQWSTLDEDKKNEVIERIRAVQSDDQFEELVKWLMATLHLDRDHSEATGNAPLPEGFGRLGSTATSRILAELESDVVTYSTAVKACGWHHSDSRTGEVIETLPYYGKILDRHVIPGTYDPNDDDAKRYGRITNPTVHIGLNQLRRLVNRIISVYGKPDEIVVEIARDLKLSEGQKREVEKDIKKNTAAAIARGEKLDDLGIPNNGSNRMMLRLWEGLSNDIMSRCCPYTGKMISCSMLFDGSCEIDHILPYSRTLDDSFSNRTLCLKEANQAKANKTPWETWGNTDQWNIIAANLKKLPDNKTWRFAPNAMERFEGENDFSARALKDTQYLSRIARAYLDTLYDGHDSKSHVWVVPGRLTEMLRRHWGLNGLTELTDSDAQTVKVKNRTDHRHHAIDAAVVAATDRELIQRIAKTAKMDKSNGAEQVARSVSAPWDNFRNDMGDVIRRIIVSHRADHGRIDFSARKSGRDITSGQFHNDTAYGTVDDNTVVTRKPLLSLKSKDIPKIRDAYLQKILSRIPQGLTEKAYQDELKNFSSSKKLSDGSDNPYFGLRRVRMEEKLRESSRIEIRDKNQKVLKAYKGNSNYCYEIWQLPGDKIEAQVVTTFEAHQSVSEKKPHPAAKRLMRIFKRDMVRFTKDGSEITGYVQKLGLRH

SEQ ID NO: 9188 - protein, 1354 aa, unidentified
  REGION 1..1354: note = Description of Unknown: Cas Enzyme sequence
MKKILGLDLGTTSIGWAYIKEPENEVLGGEIVNLGVRIVPISPNEESDFSKGNKISINAKRTLKRGARRNLQRYKLRRNALLSIFSENKWVTSCFYASEQGAASTFSTLKLRAEAAAKKIELEDLAKVLLQINKKRGYKSSRKAKSEEDEGVAIDSMGIAKELYDSGSTPGQWTYYSLQKGRKNIPDFYRSDLKDEFTKIIAFQSAYHPDLFTKEFVETWMGKPSTQIKQFFNSKGIQLVENKGKREERRLQEYQWRSFALTNQVELPILAFILSQINSQITNSSGYLGAISDRSKELYFKNMTVGQYLHAQIQKNPHFRLKGQVFYRQDYLDEFEQVWNTQAAFHPQLTDSLKKVIRDVVIFYQRRLKSQKHLISTCEFETTHKVAPKSHPVFQEFRIWQNLNNLSFNKKDNPNEKFYLELEHKKDLAKELAFRREYAAADVIKRLAKKPSEWELNFEKIEGNRTNHAIFEAFAKLIELEDGEPIELEAMNSDDILDQFSEAFLRLGINTDLLQINFNLQGDAFEQQAYVQFWHLLYSSEDEASLKKILVKKFGFKPEHTKILTNIALQEDYSSLSNRALKKIVPHLQSGLHYDEACAYAGYNHSSSLTKEANDTRELKSKLDLVKKNSLRNPVVEKILNQMVNVVNAIFEDERMGRPDEIRLEIARDLKASAKERKLMTASIAKSTQEHEKIKLLLKSEFGIQRVTRNDIIRYKLWKETSGISVYTGKTIEASKLFSKEYDIEHIIPKAKLFDDSFSNKVLCENQLNREKGNLTAYSFLQKKFSPEEFEQYLQRVKSLFGTLGRAKIQKLLTADDKIPEDFIARQLQETRYITKKAKELLFEVTRKVHVTTGSITDRLREDWGLIDVLQELNWDKYDKLGLTYIEEGKHGNRIRKIKDWTKRNDHRHHAMDALTVALTRPAHVHYLNNLNARGSTDKKGAEIYGIEQKYLTREDGKYRFIAPLANIREEAKQHLESILVSYKAKNKVVTTTKNKIKKKGGLHIQEVLTPRGRLHKETVYGKSMTYITALEKVGSAFTEEKINTVANMQEREALLARLKAHNSDPVAAFTGKNALSKLPIYISLEKNIRVPEKVKTVVLESNFTIREEIGPDLKLDKVVDQGIKKILEQRLADFGGNAKLAFSNLEEHPIWQNQEKGIAIKRVKISGVSNAEALHNKLDHLGRPILDKQGKLIPTDYISTGNNHHVALYRDEVGNLQDEVVTFFEAVTRKNQGLPVIKHRHEKGWEFLFTIKQNEYFLFPSADFTPREIDLKDPKNASIISKNLYRAQKFSKLQYGNYFVREYVFRHHLETMLNDVVELKDSAYKNLKSLPQLDGLVKVKLNHLGQITQIGEF

SEQ ID NO: 9189 - protein, 1370 aa, unidentified
  REGION 1..1370: note = Description of Unknown: Cas Enzyme sequence
MASKTILGLDLGTTSIGWALVREGDNADIIKTGVRVIPLTTDEIQNFDKGKSITTNADRTLKRSMRRNLQRYKIRRENLIEILIENGLIKNTTILTEVGNASTFETYKLRAQAVNERVELDQFARILLMINKKRGYKSSRKAKGEDEGSAIDGMGIAIDLYERNLTPGQLINERLQKGIKSIPDFYRSDLQSEFDIIWNHQKQYYPDILTEELYEEILGKSKTITASILRKKGFDGLELKGNLSEKKAARFALRAKAVNSKCTLEEISEILPEINNNINQSSGYLGAISDRSKWLFFNKLTVGQFLYQQIESNPHVMLKNQVFYRQDYLDEFNRIWEKQREFYPEILTQELKQEIRDVIIFYQRKLKSQKSLLSICELEGKVMEIDDNGLKKKRKVGPKVCPKSSPIFQEFKIWAQLNNITYSNEGSRKSQGISLELEQMQLLYQELNWKEKLTANEVMRLLDLKGYQLNFNEIEGNRTNAAFISALNDFFVKEGHDELVLSKMNSSELMDALKKLFPIYGIDISLLNFDSNLGGQHIENQTYYNFWHLLYSFEGDNSKTGIDKLKTALETKFGFPFESNTPIANMKLSDDYGNLSVRAMRKILPFLKEGNRYDLACALAGFNHSHSETKEDLSSKVLLDNLEILPKNELRNPVVEKILNQMINVVNTIFETYGKPDEIRIEMARELKKSAKERESATKAIRQITEEHVKLKRELQAEFGLTNVSRNDLIRYKLYLELKENGFKTLYSNQPIDRSKLFSSDYDIEHIIPQSKLFDDSFSNKTIELRSVNLKKGNDTAFDFINKEFGEDGLKQYEARVKALFGNQLGKKSKYRKLLMSETDIPKDFIERELRDTQYIAKKAKEVLSTVVLHVSTTTGSITEKLREDWQLVDVLKELNWKKYDKLGMTETIENRHGQKVNRIVDWTKRNDHRHHAMDAITVAFTKREYVKYFNNLNAKSEKDGEIYKILKTETYFDKDQKRRFNPPMPLSQFRARAKEHLENTLISFKAKNKVSTKNKNAIKTVKGKITTIQDTPRGQLHLETVYGSSQYYSSKVEKIGANFDLEKISKVANSKYRKLLQKRLEENGNDPKKAFTGANSLSKRPIFLNALETYTLPESVKLVEFDTRYTIRKPITPDIKIDKVIDKGIQLILQERLNQHHGDAKKAFSNLEENPIYLNKDKGLILKRVTIQGVNNAVALHNKKDHFGKEVRDAKGNPIPVDFVNTGNNHHVAIYKDEKGNLQEEVVSLFEAITRKNQGVEIIKKQHELGWEFLFTMKQNEYFVFPNEATGFDPSEIDLLDPSNFAKISPNLFRVQKIGKGDYWFRHHLETELIDRIELNGSSYKRIRNPKSMNISIKISLNHIGRIVNVGEF

SEQ ID NO: 9190 - protein, 1634 aa, unidentified
  REGION 1..1634: note = Description of Unknown: Cas Enzyme sequence
MKKILGLDLGTNSIGWALVEQDIENKQGKILGMGSRIIPMSQDILGDFGKGNSVSQTAERTRFRSVRRLRERHLLRRERLHRILHVLGFLPAHYDQQIDFKKNLGQFYPETEPKLAYHNGTFIFKKSFVEMLEDFKQSQPGLLKDSRGEDKIVPYDWTIYYLRKKALTQKIEKEEFAWLILHFNQKRGYYQLRGEEEELNPNKLVELHTLKIVDVISDEPQKGKDEVWYSLLLENGWTYRRSSKTSMFDWKDKVRDFIVTTDLNDDGTIKTDKEGKEKRSFRSPGEEDWTLVKKKTEQFIYSSGKTVGTYIYDTLLQNPKQKIRGKLVRTIERHFYKNELNTILTVQKEFHKEFLNEELFKTCLRELYRNNDAHQFTLSKRDVVHLILSDIIFYQRPLKSKKSSISNCPLEFRKYKNSEGLEVIAPIKAIPRSHPLFQEFRLWQWLANLTIYRNEDDANMNQEFISSAIEYESLFDFLHNRKEITQDILIKHLLEKTGLKGRALTTEAAKYRWNFVTDKPYPCNETRAQIASRLSRVDKITDDFLTQQIELKLWHIIYSVSDKTEYEKALVTFAQKHHIDEHSFVESFRKFPPFNQEYGSYSAKAIKNLLPLLRIGKYWHWDDFSAQTKDRIQKMITAEYDENIKDRVREKSIHLTRPEDFHNLPLWLASYIVYDRHSEASMAEKWNSVSDLDEYLKNFRQHSLRNPIVEQVMTETLRVVRDIWVHHGKGEKNFFNEIHVELGRDMKNTADERKRITEQVTEQENTNLRIKALLLEMMRDSQVENVRPYSPMQQEILKIYEDGALSANVEIPDDIEKIRKKSEPTRSELQRYKLWLEQRYRSPYTGQAIPLNQLFTPAYEIEHIIPQSRYFDDGFSNKVICEAAVNKLKDNQTGLEFVKNHYGETVELGGGRKLRILDEEGYTDFVNEHYAKNRSKRSKLLLIDIPEKMIERQLNDTRYISKFISSVLSNIVRSAEKDDGVNSKNLIPGNGKITAELRQDWGLNDIWNELILPRFERMNVITGSTDFTSYNENHQKYLPTVPYALSKGFQKKRIDHRHHALDALVIACASRNHVNYLNNQHALDKTKTKQARQTSREDLRAVLCIKKYQEGSDKNYKWQFKKPWDNFTFDARDSLEKIVVSFKQNLRVINNTSNKHKKWVDHDGKKVLSIVTQTQGESWAIRKPMHKDTVSGIVRLHKTKVVSLSVALDSIQDIVNKDIRKHIQSLQKSGYDKAQLTKHFKGLNNEWENKDISRQEIYYWENELVASRVSLDVSFDRKRIETSVTDSGIQKILLMHLNTYTGRTDEKGIEITPELLAFSPEGIDELNKNIIALNHGRFHQPIFKVRTYEPKGNKFAVGQTGNKKTKYVEAAKGTNLFFAIYQDDKGKRNYESIPLNIVIERQKQGLSSVPDLNAKGDPLLFHLSPNDLVYVPTEEERGNNLVIDLVTLNKIQIDRIYKFTDSSETTGNFIPAHVSDLLFNLNKKDQEKRGINYPIQNEFGIGSPQSKSQRSIDNIMIKEFGLKIIVNRLGEIINNSNSKNEFSLRHSKLSNEDYIHAEQESSIVNDPSSSVKSDIHFFQSKKDEEYSVSQFILEQDPIQRVRETVALILRVYGLSQADLNQRIQSTKIQIVYYK

SEQ ID NO: 9191 - protein, 1111 aa, unidentified
  REGION 1..1111: note = Description of Unknown: Cas Enzyme sequence
MTIHWTSTCLEVPAKTTPALAGCRHRCPWALLFADECPLFTVISGHASLRYTAPRLVALKAFVKGCRMRTRFQLGLDIGVASIGWSLIRADEAGQPLGIEAMGVHLFEAGVAGDVERGKDESKAAPRRAARMMRRQLWRKQWRRHRVLHELMSCGLLPPGGVADHLATDAYLKGIDGALRATWEREAGHREAQLLPYRLRAEAARRRLEPVEVGRALYHLAQRRGFLSNRKSGKRDEEEASTVKQGIADLSLAISAAGNPTLGAYFSTLDPTEQRIRKRWTSRQMYLDEFEVIWAAQAKHNACMTPEAKKAVFDAIFFQRPLKSQAHLIGHCDLIPGKRRAPIACRLAQRFRMLQKVNDLVIEFPDRTQRTLTRTERETVIHELEQGDATLASLRSKKVLSLPKGAAFNLERGGEKKLPGLRTEAKIRGAIAVQWEALADQHKDDLIDDLLAIDGEVALLKHLRDKWGLDAAAAKALAAEALEDDRSAHCRAALAKLVVRMEEGTSYATARKEEFPHRFLVKPALDTLRPVRAAVPDLANPTVERALTEVRKLVNAIIRTHGKPERIHVELARDVKKGRKKRQEAWEENRKREAERAKAADRIATQAGLSNPKGYDIEKVLLADECGWKCPYTGRDIDMRSLLGEHPQFDVEHIWPYSVSLDNSFSNKTLCYHEENRNGKRNRTPHQAYYGTPAWDAILQRVEHFKGDDRTIREKLKRFTAEELPDGFSARHLVETRYLSRLAGEYLSELYGGRGIEGQKQGVVVTTGGLTAHLRREWGLSAVLGRPQEILDKKDRTDHRHHAIDALVVALTDQGTVQKLQRAAEQAADAGRRMFAQVDPPWGASRDDFVAQVRHAVDAINVSHRQSRAASGQLHGDTFYSRDLPKGKAESKPRVRRPLSSLTDKQVNEIVDSAVRGAVVAKLAELGENDPRKAFKGDANLPAMPRGDGKIVPIRKARVFISKTPRKVGGKGRERRVLSTPGSNHHTVISAVKDEKGNEKWEDTPILLQEVYRRVVRREPVVDQRDTERATFAFSLAANEFVMVRSKDGSERLCRVLSVSQRDIEVSFHSDARTTGERGKDRIRLRGSALSERSFRKVHITYLGEIRNAGG

SEQ ID NO: 9192 - protein, 1136 aa, unidentified
  REGION 1..1136: note = Description of Unknown: Cas Enzyme sequence
MENAKIMKNDLVWAFDIGTGSIGEAVRRGTEFLHKESLLIPHDFAGTKTAATRRRMMRTRLAHKAREEWLRIIWKTAGLEPLYGREVGKVDQNHNVIDPKDYKRIKGEWTLIKEGDSKLEREFAAPGDTTCYTSCLLRIKLLKGEKLQDWQIFKALHSAIQKRGYGKVAWAAKEALRVGKTPDEIETEEQKKLKKADSKYKETCSAWGKFKKSLPSEQFAYPCYFDAFKMKLWNTSSPNVLLDRVDCNAESTRNIRFDRNDIAKEVKALAEQAAKQIALLQSLFDKVKKDGWAQGVDHFPVLAENFADFLAYGPAGEPEASYYPELRKKSKLHMGSDDDWMGVLGQKIPRFDNRIINNCSLITRLQVCKCDIRQDSKTKKPAEESLLPSEVTFLMKLKNIRVQRCGQQTGLTADEIKYIFEEKRNLALEYSKESKDWAKSITDCFKLTQKEWEKVGKKSEMAFRPLPNHEKVAPPKHTGRARFSRPALRLLKSLILSGKSPKTLHHEESLKLKENNDPKKGLIPNDLSFLLKMGDAWEKIYIPEQKLDALEKAYQNPDGTLDKQKAIRAIIGSINNPIVRHRLTVFSDRLSFLTNNHGIPDQVVLEFVREDFMGDDAKRELKKFQDDRKKQRIEARKFANDAGDTSKGGALRYELWKAQGGNCLYTGDTLEVTNLQNYHIDHIVPRAQGGPDALLNYILTTNEANKLKGKQTPYEWLHKTEGWDAYTNRVKARATLLRNKKVQLLINENSPELVERYTSLAETAWISKLAQKIASIHFGWKNGIDDQNKKRITVVSGGLTSRIRRRYKLNHILNPDAKTDEEAEKKNRIDDRHHALDAMVISFIPQWTRDEQKEHFFRFPGEIQKNAKVFFEMQIHSIVPRNLFLEKPQLAETIYGVRKSKEGETIVQRVEIENLGMKPIGMNKVTFNLEYTQKQIKSVRDKRIKELLSEFLKTEPDEQRWKSFCATFRLTSKDGKDCSLVSHITVNVGPTDEYKDLSKDKTGALVKAKKGHKGQIIYLNENQKPHVRPIYVFESAKIVSDELSKNIGLSNIFGFFQSDCMVEICKEMPMESYNIVVLNDEKKKRRIKADSTLLPQKLILNTIITNGLVAEMTTSDSQRIVVKLSELIKYGFRRAD

SEQ ID NO: 9193 - protein, 1368 aa, unidentified
  REGION 1..1368: note = Description of Unknown: Cas Enzyme sequence
MTISMGLDVGSNSVGSAWIDHQTGEITVGLSIFPAGVDESDEKRGDPKNAKRRATRRSRITLARRAQRKRLLRMKLIAVSLLPADAAKFKELLQETDPWELRRQALTTALTPCEFGRVLLHLAQRRGALGLRIVDPDDPEAADSDREDGKVKKAIGEVQSQMRKGGARTYGEFIAQLRDKSITQITTKDNRPKDSRKGPREYRSAVRNKAGSYQHCADRAMIRDEFAQLWDAQKRLGGPLAKILTDELRLALDHDSRNSDWRHKGLLFGQRMQTWDLGTLGRCVLEPTERCVPHADMDASRYLVVETINNLKIIERGKQPRSLTVAERSQIKNYLSGPLGEVTRGKQKGQPKRSVTVTDLRDLMGWGNASKTSAFRFNIEADKERTINTDWFSREIIHGAITAAKWQQLPLRSREGINRAILKHDPDDETHDEKLKALVMQEWAGLNTAQADLLVAAWKKRPRPDAKRLKMSRRAVRNLLTVMDREEPWPDAQQAGVTRWVTQIEARKRIAKDQNFLDVTTGKPLDEHARRRYATGTKGATARDRHYMKKHLLMKNKGPVYGPDGLPLHEPPPAPLISNPVVRKTIHEVRRHIIDYLTNLGCKPDEIHVELAREAKMGKEDSDRTLFMNRLRNRIRNDIIDAHRLSAVSATQQRAAVERVVLCVQQDGVCPLCGNQKVKTKITPRMAANGEGCEVAHIIPKASGGHNGLGNLVLAHTACNRDMGRRTPRQYWQATLTGGFEEGFRWIEGIFADIQRPNPWQVRDLTGDSLWLCYFAGAPSRWGPTYDELKIQQFKKDIKDIQQMTEQQGAATKYAARQVMTYLADALYDGKGLPERSTGTEQNPEPRKIFANDGLWTSRLRREWGLFFDRHGAKAHGLTNEQEHELKEKNRGDHRHHAIDAIVIALCSEQVRKAWEARELAADQANINTADEEAMDHYRRQHPLPLPVAYKSRDEFRAAVQRAVFGEGPLERPVAHRPVKRKLIGALHEETLFGPVVDRGGNLTENYTAKKSVLQLDPNHLRKPRPETQEAAIERLTLKRLKEKKVDDKTARKWAKSVVTSLGFTPKEVDPPPGKSGIVRDIALRQRLRDCLSSFHYVKRNKSGEPVGEAHFINPDDFTENQLKQAVEAGAICQASGVPIRSVVLLRTMSGPVVIDRKRPDYVTGKMVHDEDPASKRAYVGGNNHHIEIRVAKNNQGQEIWTGEIVTAFRAAERKLARLRAFREAGIPKFKVLRKLSKAARAKFHSELGRIEKAHPVIDRSENVDKGGKFVMSLSEGEMLMMKHKQTKEVGYFVVAKLDKPQSIVVVPHWDARSATERKDAEGKKVLDSQREQFAVTPSDLKELAPTGEDHAVKVRISPLGGISILTD

SEQ ID NO: 9194 - protein, 1233 aa, unidentified
  REGION 1..1233: note = Description of Unknown: Cas Enzyme sequence
MPADPSWKARLLREKVKPFLETVRVGIDFGEYAGGIAILKGNEIRHAEVFLDFHETTLEQRRDFRRNRRTRHAKKMRLARLRSWVLRQKRSDGSRWFSDPYELMRRKEFQCQPGEYAVGKGNLAAVKGNLPTWSEAVRRGERTDPDSFIIALTHLFQKRGFGYSDADLEAMNDAQLRDFLASACLKNSPLMFLQKLDVQVKRRELVEEDTDQTWRGKTKVQSTELRELFDQAKKEPPKRRKAVHRREKVAILRDMIRKFGEANGLSDDNIKQWQNELAGPDIQEDFDPRKKPKGLLNKVLRAPRFENRVRGGCAWCGKTCARKSKFRKQAYLAAINNLRVWEIPPSSRLLAGWQKERLRSIWHEGSSNPKEAKQKFLGLCRLFGIRKDKQQEFASLFDAWAANGGEFEKQLKTLRSQVSGQKARPLTADERKKFEELWTGELKEDVSQDGVFWKNFNHKISEIFAELRQSDHPIANDALKKQLTDLLTVQPKGRHRLCPTCLGKAARGETMFDQGIDPWTIKLRSAPNPCRTQHQQRILRRLEHLLFQQRLVDPQEVKYITLEIPKPQSNTAPKKGEQTKTERRSPKALLHEEAFGKCMYCDKELDVTQVTEDHVFPQSWGGPDLRMTNLICACQDCNNSKTDAIPFLAQHIVKLSWDAFVGRVRGNPRLSPRKKDMLLLGSHGGDVEGLESFKALGIPLDELTDEQREEFVRLARWQQGDPFPSDPTALARAGAMPRPFLQGIRKMFEKHDLASPEITPIGDASVIQRAEGWMTARLRNSWRYDLQRKANFPVKATDGSLDHHAQDAALLAALPPHQWREQIFIEEEQSIDGRPLSGLALKKLAPNWDEFNRSRKVPLVHIFGASKITWRRAWRKNFLKETFWKVRKEEAGAKKKRKKGEASEGFSSKPSPKKEWLSTKELSERKGEFLKGETWQHKPQWENLQNCPRCGKPLSDDRRNNQVIGKRCQNCKGRFFQSDIAGRHRYLKKSQPQGQVLVIYPKDGPPRVVNAEGVAEAVCLVKNGENYSVKVKLQPAVAGLLNRQYDPPLAPGEEVLSQCELRRDALIKLPEKRVDLALSFKKDGSEKLLCYPAAVWRFVHRGGDGKIALRREGEEIVATFIFPEGYYRVKELSLKQRNVEVWYESVAKGVSNESWCCPQLNIGHLKIKPLAKEERVQFGENAKNILRFCVDDLGRFDYGVKGQFPERKLSKGELVEYFQSLNGEKHHDPGAAS

SEQ ID NO: 9195 - protein, 1033 aa, unidentified
  REGION 1..1033: note = Description of Unknown: Cas Enzyme sequence
MPIKSVTDEIVFGFDLGTGSMAGVIRQGLEVIYAKSFHIKDPEFASTKNSSLKRRAARTRMAHRAREFWWNEQAKFAGLETLKEFTRSPHGDIRVVSVDDRLKREFPAKGEDVVYTSCLLRLMLVEGRVNELDSWQIYKAVHSAIQKRGYDRDIPWKNSEDARSKDKDEDEDSRIASFLDHLEELGIPEAYRLPCYYEAFRMGLWNPDKGITGVRQSHLAEPAGIESDKGSGYTAPRKMVIAEIKAILESIKKRYPKIDVDYVLYGPGREQYASIKIDNEVGLKRGKATDWQGLLGQKIPRFDNRVIGKCALIPRLNTCRATEPLYHEVHLLMALHRFSFRDSEGVVRRLTFDEFQKVYSSLSGKNPCKKIPMTKILAKIMGGRPIPGSTDLPAANSSGRSRFSRPALRMMKHALLTGKPASDILREVSKWPSGCAEISIKDNHDPVKGLVSADLRWIRELGDTPWERLYVPAMRLIEGRSSIDSAETVRRVIGDVNNPVVRHRLTLFHNLLREMRRVLKSKGLSDQPDHITVELVREDFMGEDAKKRLHSWQRANEASNNEAKAQVAQFGDVGNNAVLRYKLAKQQKFICPYTGKSIAQSSLGMWEIDHIVPTALGGPDAVWNKVLVHGHANLEKRDRTPWQWIGGLRDRWEEFETLVANMDLPSKTVKLMLSPDAQDLADRYTHLAETAWIAKLSAEVIRREFGWNDELGSTKRIHFASGGQTARVRRKYKLDRILSPEGTDDKNRSDIRHHMLDALVITFLRDWDRSTDRLDKFHLPDGVNRDWFKKYVDSHRPKVTGSSCQLEENFYGLGAEPGLMFKRSSVKSLGYTSDPKPKFSQKVLESRIKKIVELVDINLASVLSETCEKVALSPNPERAWSHEIEALRGRNGARIKRLKVPDKLVEEVLHLPATKLHGPMLVRPKGDHRGFLIINYEGKWIAQPVYAWQSIHAEKIRWVATKAKVAMFVKSGDFIKLHDAVDDLTPGVYKILTIMNRVQVCLGNLGSKTSKDALARKSINKIMEQGKATLVDG

SEQ ID NO: 9196 - protein, 1049 aa, unidentified
  REGION 1..1049: note = Description of Unknown: Cas Enzyme sequence
MAKKAPIRYRLGIDLGSNSLGWAVLRLDTEDKPDYLIRIGTRIFSDGRKINDKKGASLAVGRRMARQQRRRRDRILRRKARLLELLRSLGLFPAPGEASQALKSRNPYELRARGLSAPLSAYDLGRAIFHLNQRRGFRSGRKSDSKNEEKGEIATAVTALTEKLQEKGFRTVGEYLYDRLQQGTGTRARRIGDGAKAIYEFYPNRAMVEHEFDLLWTSQSIHHPAICTPENASRIKGVLLFQRPLRPVRPGRCSLEPSEDRAPLALPSVQNFRIHQELSNLRLREPHSRTERGLTGAERSTLVALMAVKATISFAGIKKALALSRATTFNLEGLKREELLGNLSAAELGHADAMAEKWSALTLDEQDALVVQLLDERIPDDELLRRLQSDYGLEPSRAERVLNTKFPDGFGRVSLKAIRVLLPHLMEGLTYDKAAVAAGYGLTNTDGDGSLDLLPYYGAVLQRHVAFGTGNLNDSDEVREGKIANPSVHIALNQVRRVVNKLIDRYGKPTEVVLELTRDIKLGWKRAREIEKEQKHRQDENEALKEELKTLKNVGLSSDSILRLRLFRELAVGDGLTARCVYSGETISLTRLFSGEVEVDHILPYSQTLDDSIANKVLCTTSANRVKGNQSPFQAFGHSPSGYDWSAILDRAASLKRNRRRRFDEDALSRFQEEGGFLARQLTDTAYMSRVAREYLSFVCPPNKVWVTTGQLTWMLRGKWGLNKLISDGEDKNRLDQRHHAIDATVIACVDRSLVHRVARAAEASADRRAGRLIESLDYPWPTFRDGLEHALTKMVVSYRPDHSPVGALHNDTAYGQAGTAMEPVGHLVKGDVKSYVRVLSLVGEKSENFLEHVIDQSIGQRLAKIADSAGSDKKAYQAMLEKFVADTGVKRVRWQETLSVIPLVDDRSGTPTKFVKADGNYCIEIFKGPNGKWSSEMIPTFTANQPRYMAFMKSPDYRRRTFSGYELVMRLIVNDMVKVGNGGASVLYRVQKLSAGRIVLAHHLGSGDLTCSDFSLKGVKTSLSLSAERLRKAHGKRVFVDEIGRVFG

SEQ ID NO: 9197 - protein, 1021 aa, unidentified
  REGION 1..1021: note = Description of Unknown: Cas Enzyme sequence
MLPKMKYRLALDIGTSSIGWCLIRLNADADPIAVIRMGVRIFPDGRNPKDGSSLAVTRRNARQMRRRRDRLLKRKARMMAALTRLGFFPQNEHERRELVHLDPYSLRKKGLYEALTGPEFARALFHINQRRGFLSNRKTNNRDNESGTLKKAIGELRNKLKEESCLTLGEWLAKRHEARLSVRARLHGKTRRDKAYDFYADRAMVEHEFDTLWAKQRSLNPALFSDAARNELKDVLLHQRSLLPVRPGRCTLLPDEERAPLALPSSQRFRIYQELNNLRLLTGELLEKPLTLEQRNQIAALLEQQGEVRFSAMLRKLKLHSTAKFNLEDIKRDRLKGNATSAALSKDQYFGERWYRYANAFQDDIVDKLLTEESESDLIAWLQKNTGIDEATAQRVADVRLPEGYGKLGRTALSRILPELIGAVTVYSEAVSRAKFDSHSALSQSQQTGEILAALPYYGDPLQRHVAFAKENPANDEERFGKIANPTVHIALNELRKVVNGLIARYGHPSEVIVEVTRDLKLSRERKLEIQRDQKARQDRNEKQLAEACAILNLAVANLDKSKRRELSQKMQLWTELNLKDATDRHCPYSGEQISIARLLSDEVEVDHILPFSMTLDDSLNNKTVALRSANRVKGNRTPYEAFGRIAASGYDYPAILQRAALMPKDKAKRFAPDGYQRWLREDKDFLARALNDTAYISRIAKEYLSLICPKENVRTIPGRMTALLRGKFGLNSLLSGNELKNRADHRHHALDAAVIGVTDQGLLQRFSKASASARQANMDRLVGEMPLPWEAYRKHVERALTHIIVSHKPDHGYQGAMNEETPWGFLENGQVTRLVRPEEGGPRRREFSNKKLIAIRSTRNPERHGFDADGQPAAYKGYVGGSNYCIEICRDAKGKWLGEVISTYQAYQVVRQYGETDGVRRLRNPALSQSEKPLVMRLMINDIVRMVIDDKEKIMRVVKIGLNGQIFLAGHNESNVDARNRDPDDPFAYVSKMAGSLSAVKARRVTVSEIGDLRDSSLQE

SEQ ID NO: 9198 - protein, 1039 aa, unidentified
  REGION 1..1039: note = Description of Unknown: Cas Enzyme sequence
MAYRLGLDIGANSIGWCALALDQDERPVRVLDAGVRIYPDGRNPKDGTSLAAARRLPRAMRRNRDRYLRRRRKLLSALTTAGLMPADEAGRKSTSALDPYALRGEALARRLAPNELGRVIFHLNQRRGFKSNRKTDRGSNSETGLIRLAARDLQAELVGKGHPTLGSFLAARHDKREPVRIRLAGSGKTAAYPFYPLREMVEAEFDAICEAQEKHGFVLPRETREKLRLILFHQRPLRDPPVGRCWLEPGEFRGFRAMPTAQAFRIAQELANLRITEPGMPERPLGDAEREKLRGMLLRGRSLGFDQVRKQLKLSADADFNLATVRKDELQGAGTASRLGGKKAFGERWHALDLAAQDAAVEALLGANSDEEAAEALVAQGFSAEEIERAVEIALPEGTTSLSIKAMGRILPHMEGGKRYSDAVQAAGYAHHSDQRTGEFRESLPYYGELLFERIGTGSGKPEDEPERRWGRAPNPTVHVALNEIRRVVNAIIALHGQPTAIAVETLRELGRSAEQKRKFEKEQKANQEANARRASMIAETGLAVNGSNLMRVRLWEEQAKDPKDRICPYTGQLITLRMALSDEVEEDHIFPFARSLDDSAANRVLVMREANRRKARRSPYEAFGSEPDWEAIQENARHLPASKRWRFEPDAMARFAKDGDFLARHLTDSATIARLARMYLEVLAPGKVWSTPGMLTALLRAKLGLNSDRILGKGGQRKDRTDHRHHAIDAVVVALTDRGLLQRVSTAAGRGEDGRNRLIGSLGDPWPGFVDEVARAIGRIVVSYKPNIGWQGALHNDTAYGPITPETKKAPNVVVRRAIETLAEWKRDEIAKGVRDPVLAAKIADAVEGKDKVAARQALGTLRHSGGLQVRRVRTVERLDSSEKIADRRTGKPYKVVKLDGNHRAELWLLPDDRRKLVVVPTLDAAREAEARRLGRKPEKDSRPHPAAKLIFRVHKNDLLALETEGARTIYRVAMLTEGTITLAPHFEGGNLRTRDRSKTDRFAYVHASASMLERKRARKIFVDPTGRVRDPGPNSLP

SEQ ID NO: 9199 - protein, 1073 aa, unidentified
  REGION 1..1073: note = Description of Unknown: Cas Enzyme sequence
SPWLLAARVLRGGPKLSWAELWDVLRWYAHNRGYDGNKGWSRQDLTANPEDTEKEQKAHELLDAFRAKHGRDGTMAEVLCDRLGLDPLAAKQSSEIRFRDLGAAFPREGVEAEVERLLRAHLGVLPGVAETFITAVMRDHTAVAGPDYRLPARYGQRVGSQRTPGGLLFGQLVPRFDNRIIATCPVQFQRVYDRVLAETGNASQATFEAQKLAKVPGVGCVEFHRFRWAMQLANVTVATGDARKSRRLSKEERLALNADMERHGALTPGEFKKAVRALTGTNKDNLDRLLALPDADKSLVLDPARKLASQGVLAVLWPHLSPSQQKHTLTDLRRGKAITVRALLAASPAAQPAFDHWWDGEAMKKPKKKGKGESATDRTRDQALDEAHSLAPASGRAAHSREVMADVWKFVLYRDGHPMDPDGPLFRSEAIRRAQLDRVIDEQTNNHLVRHRLRLLERLHAHLLTEFAAGDPARVARITIEVNRNLKELSGKTAQEQAKEQGQQTAQFRSVEKKLNAAYEGLGVKLGPGLIRKGRIAEDLGWKCPYTGATYDELDLLHRRVDKDHIVPRSQRTSDSLDSLVITFSEINKLKGQRTAVQFVEEFQSQPVPGLPNLMVKSLGNFLRDVEGLETFKGHDDDKRRKKNRQRLLKLRDYVEKEFTPGDLTKTSQLVRLGAEALQRAYLNTNAKPVIVSLPGAVTAAARKSWNLLGCLAAANPNVLNAEDLDENGNPRIHRKTELRGITHLHHALDASTIAFTSHLLPCDGGVWKREAIELLAKRRCTAMEQAQLRAMLRWNVSFTQEGQPVLAELPDELREQLRTRLAERRVVQHLPASMGDMVSDQTVWRVFDPADSHPNARRLARWLAAAEVEVPKPDAPTVIIITRKRKAPPKPGEEAKSKKGKFHEGKTWEWYFVAAAKDALLGFAPSGDPAKAKLKPLKAVKVLGDNFGIALDPVPTLLRPLHVWRQMTALKAANGGKWPRVLRNGMLIRVLRAKSPKVNYSGVWMVRGVTINQRAGYLLNLSPPDQIRDRGERGCFQNVSLETLLKCGLEILKPTLCGIAQPPAPCPTTSSA

SEQ ID NO: 9200 - protein, 1095 aa, unidentified
  REGION 1..1095: note = Description of Unknown: Cas Enzyme sequence
MQHLHPHLEKKFSRFLPQLRLGIDIGEWAGGIAVVRRGEILHAETYTDYHGTTLEKRRQLRRGRRTRHAKKMRLARLRSWVLRQELPDPYHLMRRKEFQCQPGEFNVGRKKLKSVTGKKKDDLGSWVEAVQDGHRTDPDAFVIALTQLFQKRGFKWEGSDLQEMTDKELAEELDETEGVRITPSLAEQIKAEIQRRQVNPQQEYEGRIKDLDGLLQKALGRKREPRTPEHRSIIEGDLRRLVEAYTSRHCPDNAGGWTKALLRLLNKRVRKLRFENRVLSGCSWCGKNTPKKSGSQIRELAYRAAVMNLRADAANSRRPLSDAERKYFLDIWERRKSDRPPSPETIKKKLLALRSQTEMAKQLWELLASPAPAGRTNLCLQHLKMQAEGAFLCSGHYAICKQSSDDPGKHILQERVRNVGPAIRGAPNPCREAHDERVIQRIERILFNSNGAPRFGAAPALITIEFPKPNTAQSYSCPSCNEKLAIDLRVRYRLRDVKAVKAEPCEEVLKFTCPACDVVVQVKAARQLTIRGVRRRIPVTLKNTDAFLRKAKGGMKDKKIQTYLRETRNSCVYCGLTIDRSTIEIDHIFPKSKSNPGIDSNLVACCQNCNNSRTGKGDRTPWRWKGEADRQWWQEFERRVRKLPLPMRKQRILLSADEFYPENPTALARAGARPRAFIEELKKMLGRHSVERDQIADNYEEGKLVIQTIDGWMTSQLRRSWVVDRDGTPNFPEKNVWDLHNHAQDAALIAACPPHTWRERIFAFGEHGDQAPKELAPNWGAFLAGQHVKKPIVTVLGNYDVNWRKQFANTEFWRDPLGEHTKPIKGELLKNLKAYQAENIKWPTLQEEFKAVCEKYAIKGRSNLPAEALAELQERIKNRKFESAKVGRARRSWNKHHSEKQSRMSETPAELQERLKTENDVRRVQYKTHGSGKPFVIRPSDGPPRMTEAQPAAEGVIIWLKKGKTLEEAKDRDLVISVVRPSPLQQFDVPKEDPPLEEGVQRWGPWRRNDFVRLPANGRHREGWYRLTKFEDDGISALPERAIPNELVKRMRLKDDDKARELPSQERKLVKRELLPYLKRGLLSEVSHATRPDSA

SEQ ID NO: 9201 - protein, 1143 aa, unidentified
  REGION 1..1143: note = Description of Unknown: Cas Enzyme sequence
MKKKKILGLDLGVSSLGWAIIETDENEENIQLIPGAIGVRIFSQVTKVDNDKEMKNAARRTSRGMRRNIARRVRRVAHVLQILIENGLLPKVTLSKEKNISLQEEYWNHPDVQGLLKVNPLELRAKGVNENLELYEFGRALYHICQKRGFQSTSKKELKELGLLESPENDATSKKEKKLTPFKQKIKDLEDQFENKTLGQHLYSLIQDKNNPQTIRNLGTNRDMYRHEFDVLWTEQSKYHPELTDQHKKILKNIIFTQRPLKSQEDKVGFCKYFPEERKIPKSHPLAQEFIILGYLNNLTVFRDGTKKKTEIRNIADIFGDNLEKKLGEGLEIFRTYAEAKKNKKEEIPNVKKDEISMWLDVKGSLINSNKVSWKKDILHIKLSGIFGTVYADWTTEKKNGVIETLKLNDIEKAHNGGFDTDKKRKKIIVKGYKDWSIDERYWLELDNIAEKDIPSKYLELSQKAIEIFLPELRKGVPFKTIEENLKKKGILPKENHNKYSTIGLSRKPGNTHNHLPDIANPRVTKALVELRKVLRGITTKYGAIDEIRIETSRDLKNGLDKRKKIEQAQGKRKNENDALRQELTENFPGRNTDIHSDDFKKYKLWKELAKGQGFSQAGYLSPYHHKGDSQENIVISSTQLFDNAKIQIEHILPLSWSLDDSFNNKTLCPHDINLDKGNKTPFEYYNGPESPDWKTFEKRVWDIFGYKDKDGNKKLRCKGQHLLLTPEQVTELQGKFATQDLNDTAYIAIEAKEFCQALLGEAKHEQSLVQTSKGQLTSVLRWNWRWNELLNPDETNLELKNIKNRGDHRHHAIDAVIIALTCRKIMKRASDLAKKLDEDKREIKLHERVWGNIIPGIDGITLTLQKNLDEMNISHAQNHKISGALNEGTAMGKSKNGTFTKKVPISKITAPQILKIADENIKKYIITLFTPKLTEAQRKGMTEKEIKKILEPEIKKIQTLQLFQPKKDGGFSDKPIYSVKIYENLDENALLGTRPNGKGGFHSYYSLGNNHHMEILRHKTLKNMDETPKQVGIIITTLEAATRGKGHQNIINKNGPWLDQEKSEYKAEDWEFLCSLFTDDVVQNSEGEKYRIQKMTGDKITLRKIRAAKIDDNIDRIICSANTFKFQKIQIDALGDIRLAND

SEQ ID NO: 9202 - protein, 1087 aa, unidentified
  REGION 1..1087: note = Description of Unknown: Cas Enzyme sequence
VGHRLETYRIIFILICFRPKIVIFIQNGLFMSKILGLDLGTTSIGWALMEKGASVIDGGVVIFPRGNNLDGTSGKEISYSQQRTLYRGMRRRLYRRNLRRDRLLQNFKNWWGISSLDIYTNSKPEDLYRIRAEAIDPEKDISLNELCRVFLYFAKKRGFKSNRKSAGKAGEDVGVVKEGILDLKTELGENECKTLGQYFHKLITAHKKGERLDERILQRWTGREMYQYEYDMIIQTQLGRIQDLDEEKASAIRKEIFFQRPLRSAKHLVSNCQFESQKKVMPRSHPVFQEFRLWQMLHNLTWINKDTGEYSGLSLDQMALAADLYLTKKKPTETQLKSKIGLSTRVQFNEVVLKPCSTFILMEEAVGTTAWKGFTGKDKLDIYHSILFTDDDNQHKFVEYLLKKWGLSKEQSQNLFNLILEPDYGSISHKAAKKMIPFLQSGYPYDQAAVKAGYHHSVRNTHLNLDYIPYLKSNEMRNPVVQKAVGQCINLVNHIIKQYGKPDEVVVELARDLKKPKEAREKQWRRNKNIERKREEYALILSKYRSSPVATWDSLITKYELWLELGCEDDGLKAFDGFAEKIRTSDMEKYRLWLESGRVSPYSGKVINLTDLFSPHIEIEHIVPFSRSLDNSRLNKTLCERTFNHDKSNKTPLEYFENKSQVLSDDFIKRIGYINNEIKREQFLKKGPDADYLNSQLSDTAFIARRIVEKLSTSIPKIGTSKGRLTSLLRTQWGLNNLLYNDTEIEPQTIVTIKNRGDHRHHFIDACLLASITPAIVQKVSKMEIGNSGKLSGVTINPPFERFRTEVSEKVNEILTVHRMNNKFLNKTLNSYRQSESPNKTSQISTSVRGSLHEDTLYGKIELKDGSQKFVVRKPVNQLNEKQLGNIVDQGIKVHLQHLIVTTPGGWKELIKSPILFQGRPLRHVRWMASDVIMPLLRPDTQTYISPGNNLLMAIYENETGLRKFISLSFYEAMQRRRNQEILYPATQGDYRLKFTIKPYDKFIWCEHPDQVDWDDNEDLQQRLYYVIKFTGSSIYLGQAHVANVKADYDKKPIKIYCTYNTMRAVKVRQDIQGRIIWRSDSGMIKA

SEQ ID NO: 9203 - protein, 1080 aa, unidentified
  REGION 1..1080: note = Description of Unknown: Cas Enzyme sequence
MSIRGHAMSKPRQYVLGLDLGVSSLGWAILELQGSGDVRRATSIVAAGVRIFEAGVEGGIEQGKDSSRGAKRREARQPRRQQWRRQYRKRRLFELLQRHGLLPKSEGSEPLQRKVALDSLDAELRDKHLIADDHLAQQKLAYVLRAKSAEERVEPFELGRALYHLAQRRGYLSNRKGDSDDDERQGKVDTGIKDAERAAGDQTLGQLFARQVNVFDYQVDPATNRPDPKTGRIRRRYLGRHQYQDEFRRINATQQPHQSISEEAWNEIERRIFFQRPLKSQKHLIGRCTLESKRRRCPEALPIFQEFRILQAVNHLRVRMPDYSERELTESERTKLIAVLQTAGEMSLKSTAKKATGLPKGASFTLEEWEEKLVGHRTNLKMIGAFGDRWLSLPEDLREQITLEVLCYRKPQALVRRAMDAWGLNKEQAEKLAEIRLEEGYASLSKAALKKLVPIMHNGTPYGTARKEAYPESFDAGHAQELLPPVRTWNRDIKNPAVIRALTEVRKVVNALVKKYGKPAMIRIELARDLKNSRDRRKKLWQDNMDNRRRRERATAAILNDLKNDRPSRNDIDKWLLADECHWECTYCGNAFGAGDLIGRHPQVDIEHIFPRRYLDNSFGNKTLACRTCNQRKGNRLPKNAFSPEEHEAILQRVRRFDGPHRIKKLQRFQADAVPEDFVTRDLNDTRYNSRIASDFLGTLYGGKVDEHGRQRIFNPTGGLTALIRTAWGMNGILSDNNEKDRNDHRSHAVDAVVVSMSDQGLVQKLSNVAQEFEQKTDRERAFLSGFPDPWTGFVADAREAIHRILVSHRPTRTLAGPLHAESIYSKRFGTEKQPEYRIRKELAKLTTKEIEGEQIVDPAIRRLVQQKFAELGGGDPSKQFSDPRNHPFMTAKDGRQIPIHKVRLRVDTKPREIGKGPRARNVASGKDSNYASMVYAVLDKDGKEKKWVHEIVDRLTAHERLSANRKQAGEKVLIPDEQEGQRRFKFSLMKNDLLLMEGPEGKDELYKVLSFSSSELQLCPHHISKLEKKDRSKWDRITNVDSLRQRHAQRVAVSPVGEALLSPEQGVQKSAVNAPAKAH

SEQ ID NO: 9204 - protein, 1520 aa, unidentified
  REGION 1..1520: note = Description of Unknown: Cas Enzyme sequence
MAVKTNGPLTIGLDIGIASVGWAVLEPNRILDMGVRAFDAAEDKDGKPNNQSRRGARVSRNRYDIRAWRLKRLVRMFRDIGMLTHSEIKHLFSAGHEKNIKHVSPWQLRAEGLSRKLTNQEWAQVIYHIVKHRGFKFFSKTEDPTSSTIEDEESASEKSAENAERDGLRSGLKYTETLLAKYPKLKFKTIGYIAYQLANARQDKDGIYRDTKGNELETQDCEEFQNAYRNKDKSYRHAFRRDDLQAELNALFDAQQQHGNSFTDLPKPDDVEWLSEVTVSSKTRPVEPTFCAQVFALLELQHPPITAGQMVAMIGDCELESEARNGKGNAERRAAKCSFSNERATWLQTLNNLRIRRNGKEDELSDAERAELINLPYTQAKLTFKQARDILREKTGFPAHWREASFTKVSYRSNRKNDGSWINVVSADDTRTSLGKYGGEKIRKAANKELKVCLEMGAMTFAKLRQLYKLHDSDTFEHKRKEDEIILSSLEDQYPVPFEAMDRKNAFIKILPSKGKKALTFKRNSMQALSTLRERKPDATLADLRMAIEEVEHFDEGWQFEYSQNQSTAIAPESEATTVVPIEYEDAQNAEEEVLIELKGWHALNRTLEISHSEWWASLQPAWRDAASPDEGLKSNALAKAEQLDKIAEALTKAQTDADIDRELASLRLTNEQLYALQTAKKVFKQYRNLSLKALRNILPHLEHQKNYSEACDLAGYKVISFERTKYLPPLESYLYERIHHGKKTGYKEWRYKDLTNPVVARAFNQARRVLNALIARYDQSPAYVHVELARDIARPLKGRWSNGKYIEGRLDVQKKQEENRNKRASVRENFADAYRINNPSEHQILMERLYHQQQCKCLYTLECLDLDRVVRDGNYAQIDHIWPRSLTFDNSMENRVLVKAHANQDKGNRIPYEFITQKYGDEHWRKVEAHVLSCKGLSDNKQKRLLARELEADEFLARNLVDTRYATRLFARMVRDRLLFDGQVADKVEDIDPSESGKSRLAKFHKSRVRTPQGGVTNFLRRRWLGDIKDRDAGDKHHAMDACIVAACTPELIHRVNSWFANDERVPSRFRKNEDGTYTDRGTGENIDKQEARERGLYLPPPWDEFRREFLGKYASVFVSRAIRKKRNGELHDANPMAMRYYPVGLRELTPDMLDEKQLPPDLPEKRLSLIQAVRQQLLSFDGDAVRAFADGFSIKNRNGTDRTIQAISLPVATLPDDYLTEKTKKIKNLGLKENFKDSAKTIVALNKLSLKKLSEQELGSAFYHRNSRVIEALKAQLNKFDDDAKKAFPDSEKFYPFGNGENRPFIKSIRIPAPRGKGIHVRGGVADLGAALYTEMYKHEGHYWFRARYKTPSEDTFGLPVMPRGAQFICNFRKNDFIRIQHPNLAACYRETSRYKDRLGNILIDAVAVFESGVFEGYWDHFQPSNNRPAVRLHDNGPFFLLDDGKISKKETVTLIAKPKKKKTKNQEEDVDYVEYCVNESGTPPLKFSLVKEIERQVSNAAFIEKTKVGILGEISES

SEQ ID NO: 9205 - protein, 1397 aa, unidentified
  REGION 1..1397: note = Description of Unknown: Cas Enzyme sequence
MIKNILGLDLGTTSIGWAFVKESTTPDINSSIDRIGVRIIQYDNFSKVDKSGKVSESKNPESDFASGKGLSPNADRTLKRGARRTLDRYKQRRENLIDALIKNKIITNETILAENDKQTTHATYSLRSKAAHEEITKEQFSRVLLMINKKRGYKSSRKAKNEEEGQTIDGMAIAKKLYDENLTPGQLCFQFLKEGKKYLPDFYRSDLTAEFEKIWNFQKQFYPEILTDTFKKSIEGKGQRATSAIFWTTYQFNTAEYKGTRDEKKLKSYEWRNNAIHTQLTKEEVAFVITEINNNLNSSSGYLGAISDRSKELYFNKETVGQYLYKQLQSNPHTRMKSQVFYRQDYFDEFEKIWETQAKYHAELTKELKEEIRDIIIFYQRKLKSQKGLVSFCEFESKEIEIVVDGKKKLRTIGYKVAPKSSPLFQEFKIWQNLNNLLIQNKEQKIATSFDAEAKQMLFNELNIKGNLSKDEVLAIVGYPTQEWELNFKTIEGNRTNQAFYAACFKMMELEGHDETDWQKLSLAEISSRIEGFFVSQNIGTEILRFDSELDGKAFEQQASYQLWHLLYAYEGDNSNSGNDKLYELLLQKYNFKKEFAQVLANISLQQDYGSLSAKAIRKIFPFIKESRYDAACATAGYNHSSSITKEENENRPLKAKLDLLPKNSLRNPVVEKILNQMVNVVNAIITDPDLGKPDEIRIELARELKKNAKEREDMATAISKSTIEHDNIRALLIKEDGIKNPTRNDIIRFKLYEEMAFIGYKNIYTDIKINRTDLFTNKYDIDHIIPQSVLFDDSFSNKVLVPRQVNLDKGNKTAYDFILGKYGEQFLNEFIGRVEMMEKFYQKEKPAIKAKAKKLLKKATDIGQGFIERDLRDSQYIAKKAKQMLNEVCRTVLSTSGSVTGKLREDWDLINVMQELNFDKYKKLGLTELIEKKDGDFKERITDWTKRNDHRHHAMDALTVAFTKHSHIQYLNNLNARSKEDKLGREIYGIEQKETYTVNDDKGNKKRKFNLPLPNFRTEAKKHLEAVLISFKARSKVVTKNKNKSKTSKGDKIKIELTPRGQLHKETVYGKLQQYATKEEKIGAKFDEAIIAKVAVPAQRVALLQRLVENNNDPKKAFTGKNSLDKNPIYLDADKTVNVPEKIKIVWMEDDYTIRKDVTPDLKIDKVIDIGVRNILQKRLDEFNKNAKDAFSNLDKNPIWLNKEKGITIKRVTISGVKNAEALHTKKNHLGKDILDKNGNKMPVDFVSTGNNHHVAIYRDEAGNLQEKVVSFYEAVERVNQNLPVIDKSYNQNEGWQFLFTIKQNEYFVFHADGFDPTEIDLLNPGNNKLISQNLFRVQKIATKNYFFRHHLETTVEERKELKNITYKPQLGLSGIAKIVKVSINHIGQIVKVGEY

SEQ ID NO: 9206 - protein, 1043 aa, unidentified
  REGION 1..1043: note = Description of Unknown: Cas Enzyme sequence
MPNVGGIVSLVKCGTISLKVCLRIGGPTLGGATLGLDIGRNFIGWALVDEKFECIIGTGVRVFPEGVDRDRRGDELSRNKERRVFRGKRRQIARRSRRRRLLRTALVQAGLAPSDPKLQIAVDRLDPYALRRRGLDGPLSLHEFGRVLLQLAQRRGFLSNGKSDYRRGKETSDMLAAIGQLEAEIADAGSRTLGEHLAKLLEEDPFRRVRARHTARAMFEAEFGRLWEEQQKHHPGTLTDALRYGAAGRTSYPCTPRRRAGADFLAEFGIHGLLFFQRALYWPRAGAGRCELETKERRCPRGDRLAQKCRLLLDLNNLRLVLADAIVPLSDEQRSNVWTLLARQKQVTFLKLRGYLGLPADVGISLELAGRTKLDGMRTDCLLADKDMFGKRWHALPEGEKNAIVKSLLEDDEATVRRRAVEEWGISPTVAERLVTVDLGEGYSRLSRKAIHKLLPYLEQGMTTLGDLKSPSLLAAAGYLRPNGRMVQQCDFLPETPSVTNPFVKQALYEVRKVVNAIIREFGKPLAIHLALAREVKGSAEKRIKLSREMREREARRNQVAVKLRTELGQRANRENINRYLLWQEQGKTCIYSGQPIGLADLFSTEVVLDPILPKSRSLDDSLMNKVLCFRCEHDAKGNRTPYEWLAEADPQRYEILLQRSAWLPIGIRRPKRAKFTRQAVDLVDAIERQFRDTSGITRSVLEYLQCLGVDVVACKAQLTAELRRRWGLAAILSDEDGGGDRRHDHRYHAVDALVLALTNRFRLQRLAVAVDGESLPPPWESFRREVSERIPRISVSHRIRRTVSGALHEETLYGPTAKPDEFVYRKSLAALTLSMIDHIRDEQVRRLVQARLAEFDIKPGADKSIPAQVWKEPLLMTRQAGRTASAPAKIKRVRLIKHDRTIRPIRNGTAYVRTGSNHHVCILQRVDAKGAIKRESVFVSMLEAARRVRDGEPIVRRVHPDRPELRFLMSLSPGEMVLATFRGTERLVCFRTGASTQGQLYFVDHSDGRPEKEAEKLVAVANTLRGRKVTVDVLGRIRWAND

SEQ ID NO: 9207 - protein, 989 aa, unidentified
  REGION 1..989: note = Description of Unknown: Cas Enzyme sequence
MRRTLGLDLGTASIGWAVLDVPERADEVGAVLGMGSRIFSAGAEEKGASVSTKAKERRVKRSQRRQIARRSRRRRLIRTELCRIGLLPETDAEFSRLMDVDPNLLRRRSTEGEALTLREIGRVVYWMSSRRGFLSLRTGGSQILDDDTDSETVKRYRLTQFSPSTGAAVVTGQEDDLVGFVREQQRHHAGLLGDEVLFGRRGRLSYPVRPIKQTDFLSGGTVLEEFGLHGLVFFQRSVYWSEDSIGTCSAEPESKQQRAPKALRLSQQFRLWQTAVNLRVGRDRRPLSPEERARLVKELNSKKSLAFSKVRRLLELDDSEPINFERNEEVSLTGNEVDPEMARRLGDRWKGLDDDAKDRVVELLVGRGTEDQIASTLQKRFGFTVDEANAAMEATLPSGRMAYGRRAMSRVLPHLATVSSVRDALVAAGYQVPEEARQGQTVDIDRIPNPYARTTLLQLVKLVDALQRRFPREGMPSFDVVRIELSRDVSNNKKRRDEIARQQKTNQKDRAAAKDLVSEFAEGAENSSDLVRRFRLWREQKEQCLYSGRPIPAVLVGSNEVQMDHILPRAQTLDNSLGNLALVFSSENRDKGDRTIFEWGGTTKVDEVVARAEALGLRQGKINKLHREHVDPDVIPSSLLVTTGYINALARDVIAQHLSVPVEVSRGRLTRQLLYRLGLNKDIGDHRRHALDATMVALTTVSIAQRLAKDYKSYRDRGTERTDEFGGWEPWPGARDAIKDAHAQILVSHRVSAKPSGQLHEETNYGLVDNPLRPGAKLHARRKTITGGLSQKELEEIADPAVKQALVENLRRRGIDPSAAKLTFIADDPPILPDGQKIRKVRLHKSLPGNQVLRPNTDPKTTVTLSRNHAAYVYRNTKTGRYRIHVQTTFDAFKDRAVNPKVFRERFKKDGEEFLWSVRIGDTLRSLSELGEPQYWAVTSLDLANGRLNCRPLNASTGETLRVSAKTLREGEWNKVVVLPDGQIRRARD

SEQ ID NO: 9208 - protein, 1051 aa, unidentified
  REGION 1..1051: note = Description of Unknown: Cas Enzyme sequence
MANTTKRWRLGLDLGSSSVGWAALRLDESGRPDGILGVGSRIFAAGVDGDIESGRDESRSVERRGARMQRRQLERRSRRLRNVFNELRRMGLLPGQGLADSETIHQCLGELDRDLSSRWVPVGDHRKAQLLPYLIRSAAAERNVEPFELGRALYHLAQRRGFQSNRKESARQSDEKELGKVKGGIASLAEAMGSMTLGQYFAGLDPMERRLRSRWTSREMYRNEFDRIRAAQTGHADAPSEDAWKRLARCIFHQRPLKSQRGKVGCCEFIRSDRRAPKWTLEYQRFRLLSTVNNLRVRTPIEDGVALTIETRRGFAERPLTPDERAKAIELLSHAASVKLTKLRTHLKIKGTTFNLEEGGEKELKGNVTEARLRGVFGDRWDGMTPSARQRAMNDVLSMEKDDALERRAREVWKLDETEIPGFVQLRFEEGYAPLGRRALTRLLPHLEAGLTVQEARKVAFPDHFQAGEARASLPPVRKVLRYLRNPMVERSLTETRRVVNELIREYGVPASVHVELARDLKKSRKDRQDIAKAHRNRQGERDEAAKSLRELGIANPSRSDIEKALLHAECGGKCPYTGRSIGLSDLFSKSSIWDVEHIIPFSRSLDDSFLNRTLCLAEENRNGKRDRTPFEAYSGDAERYAQILARVGRFQGKDAKRKLERFMLKDVGEALRDEFCSRQLNDTRYASRLASAYLEELYGGASDAGGIRRIFASTGQATAMVRRELGIEGMLSPHASALKSRDDHRHHGIDALAIALTSPAMVQQLAGAAEGARRAGRRRFCAIPAPWVTFSDEALEAARVMVVSHRGKRSIGGALHEATNYSRPIGGDDEIRHVRKPLAAFATSGDLEDIVDPVVRQAVKDHIAVRGGNRKCLANPDDPPRLPARHGSLGNPVRRVRIRASRGVVVAVGTGTRTRHVAPGSNHHMAVVAVLGAGGKVSWEGHVVTRLEAVRRAACGEPVIQRGWGEGRTFCFSLAGGDMVRLIGEGKDGLWYVRGVSAKVDLAPSHDGRPTNRVRAEGDRWLASVNQLMSRFQCRRVAVSAAGIVTECNA

SEQ ID NO: 9209 - protein, 1157 aa, unidentified
  REGION 1..1157: note = Description of Unknown: Cas Enzyme sequence
KYVIMKIGIDLGSNSIGWAVVTDNSILASGVRVFPEGINRVKGTVEESKNLKRRLARQVRRQYFRKRMRKKILWGILEQQRMAPSTGELKSWREMNPYLLRDKATEEELTPLEFGRIMYHLSQRRGFKSSLKGADNEEGKIFDGNLKIGKIGITQTEQGINTGGYATLGSYLNSLNPHEERIRNRYTTRKMYRQEFEIIWNVQKTFQPNRYYEELYNQLGHEKTGVLFFQRPLRSQKSLIGKCTFERNKPRIPSSHPLNQEYRAWCMINNIRYGENQKLTDAQRWQILQLADNNAKLTIAQIKKKLKLLEEFNYEDDSTLPCLTTTFQLNKHFGNKVDLNDIKTANDLWHLFYEAQDPDWLVNKLQKKYAFTEEEAKSVVKGKNRIRLEEGYGSLSALAIRRILPFLREGYRYDVSVLLAGLCKVMGVDFWGRLSEIEKETLVGNIKAASETRGKGTIRENLWNYIVAEYGVPEKATAADLYHHSDLDRQQDLLDALPEPKKLRNPIVEQALFEMRSLVNALIKEHGRPDRMVLEMARELKNPKKKREEMLSNNRKREKQRNEIKQKLIDEGIRPTGYNITKFLLWEESKEQCPYTGRSIPRSELFDDGIWQIEHIVPYSVSLDDSFGNKTICYADENRRKGNKTPWQFYNFSEALWAEVKERAKMIFCRRETYPKFLKFINEKDPKAEDFLNRQLNDTRYMATEAKAYLQKICSDVVVTPGGVTAELRHLWGLDGILSPSIQTELNFDGPGWLVTDSGGKIVEFVPWSLTQTHGKIEEKLSKKGVVWSGEMRTGVFYPSKNRDDHRHHAVDAIAIVCTERSFVQAISAGHSTGKWLKSEVFQSPWPSFFQDAKRSIGQILVSHKKRKRLLTTRTVKQKVNGKKVQHKLTTPRGQLHDETFYGKVLDPNIGTEVFTTRKPLSAFNKVKQLREITEPRISELIEARALELGVDLTKKDAELPKNFFFEADENGIPIPTLYLPGGNDRASIPVKKVRTRVASSNMTLRNETTQQYAEPGSNYLAAIIEDSNGVWREEVLSFWTAVKRSKDGYPLIGLDQGEKIRYLFQANDLYLLNWPNDLNPENAPRELLSEHLYRVQKFSSMFYVFRKHNASTLAYENEEIRIVSFSSLKSKNLNKCSIDNLGKLRLSIDEKGHKYR

SEQ ID NO: 9210 - protein, 1094 aa, unidentified
  REGION 1..1094: note = Description of Unknown: Cas Enzyme sequence
MIARKHVVWRLGLDVGSDSIGWAVFRLDRRSEPDRLLGGGVRLFDGGREPRKHESFAKDRGLLRRMRRRLRGRKWRRDQLIAKLNELGLAPPNSPPLEIYRWRAEAAQREVDPSTLAAILLHMTRHRGFKSPRLGRPAQAEDDKKADDQDQDDDTGEDEEIGRWAKAEDTLRAAMREAKVKTVGQLLNDYLATRGFVRARRGHENLAVPTRLLLREEFAVIRAVQAPHLGLKPGDWEDLADLMFEQRPLREPQPGRCTFFPQEHRLPRCLPSAQRFRTRQVLCNLRVTEGIVGETRALTPEEFATLAKRLDEGGTHSWASLRAAIGAKRGAKFTIEIERRPGQSKKAAREVEGDETAGLFGELIPEWNRRSIIERDGIVSDLRKIQRERRKLLAKAAELGLSGQAVEDLAQAVQFNLPRGYLSVGRQAVDKIVPHLKAGVASYDKAVEAALGRSHSDFRPDTLLPELPYYGQVLKTRVRPASDGPKEERDHGRIGNVTVHIALNELRKVINALIHRYGPPAMIVLETSRDLAKSAKELRDIDTHQKAREKENEEFGKEYGENLAKSGKMGKGKGKKLAVGLHEARRRLRLAKRQGNACVYTGKPFGRTDLFTEAYEIDHIVPLSIGGTDDESNMALCLAGANRKKKDRTPYEAFHGDAKTWNQIQDAVAKLPEAMRWRFGPDARARVEGEDTGWAPRQITDTSYIARLAREYLCHVCKETWTTKGKLTALLRSAWDLPVAKLPVKGADGIVRDVPKKRLDHRHHFVDAAVIAVTSRSLVQRVNTLAARGELKRAYEADIDPPYPGFEAEVAKHWKRVWPSMRPDHSLTRPSGALHNETLYGIEDAGKDAAGKQLVRLTRRIGVGELFKPLGKFVDDAAVEAQLESFVSDGFRDRFRKVLARHREGAKCLAEAAIKAAADPHWGPRGIGEIKCFRDAKPRTKEDVTTIPRGGKKARDASRPAVDTNANAWLEIRRDGKKWKAVVISRFEAKSVPPPKTDDPNLVAVLRRGDPVAWERGGKVEYGYLKVMVGDGRIYFWPLRVVTTFAALSALRPDLGVKTRDGVPFRAETFRKAKGRPLSISVLGRVRDPGPSKS

SEQ ID NO: 9211 - protein, 1094 aa, unidentified
  REGION 1..1094: note = Description of Unknown: Cas Enzyme sequence
MAKNLPHGWGLGLDVGSDSIGWVVYRLAKTAKPDKLIDGGVRLFDGGREPKKKTSFAKDRGIARRARRRLRAKKWRRDALTKRLVAAGLAPPNTQVLDIWAWRKRAATEAIDPPLLGAVLQHILRHRGFKSPRLGRALVEEEGKIAAKKSRKAKAVEDAEDTEAEDLKRWASAEKYLRERMRETGAPTVGALLADELKSKGFVRARRGFEDQPLPTRPLIREEIDQIGRVQAARHGIGAAAWSDIADTILDQRPLRDPRPGRCTFHPEDERLPRCLPTAQRFRIRQSLCNLRIAQGIVGETRALTAEEFAIIDGVLAKGGAHTWPSLREAIGLPKRGVKFTIEIERASGQSKKAAKEIDGDESATVFATIVPGWSDMAIGDRDLLVGRLRAAQRDRKQLLAIGAGLGLTAAAADTLADAAQFNLPRGYLSLGLRAVTEILPHLIAGTPSDQAFARGLGRSHSDLGPTTLLPSLPYYGEVLRRGVLPCNDGPEQERRTGRVGNVTVHVALNEIRKVVNALIERHGPPARAVIETTRELKADAKRLREIEAEQKKREEENEAFTEEYGESLAAGGRKGKGGGKRMSVGLHEARKRIRLARRQGNVCPYTAQEIGRADLFTEAYEIDHVIPREIGGDVFDNLVLCVAESNRKKRDRTPYEAFHDNTEIWNHVADMLKRLPETMHWRFGPEARQRAEGEGDDGGWVPRQIRDTSYIARMVREYLTHVAKEVWTTKGRLTGLLRSAWDLPVPRITIKDPQGVDRDIPRKRLDHRHHFVDAAVIAVTSRSIVQAVNTLSARGELKRAYEADITPPYKGFAKDVGQRYERIWPSIRPDHSLSKPSGALHNETLYGIKADGEGLVRRTERVGVEALFKSKATYLTDEKADAAIQSFVSEDFRRRFMRILDKHRAGASCLAEAAIKACADTHWGPRGIGEIKCWKDDTPRAAGKLKRIPRGPERDANRPAIEPNANAWLAILRNGKKWDSAVVTKFEAATATIDPTSTPNLVFLLRRGDIVAWERNGRTEYGWLKVIKATRKEFYVWPLRLSETMEATALRPDLNISKRDGIFFSPETFRKAGGRKCTVSVLGRLRDPGPPKE

SEQ ID NO: 9212 - protein, 1102 aa, unidentified
  REGION 1..1102: note = Description of Unknown: Cas Enzyme sequence
MANSGDLPRWVLGLDIGSNSVGWAALRLDEHGDLAGMLSPTSSAADRPAIGVRVFEAGVENYGEGEKREATRSQARRLARMQRRQTERRARRRRKVFYLLQSASLLPAFAHGSYDRFGGADAARDALLKELDSALLPAALQGGPTARAQDIAQRLPYFLRASALDRPLSRHELGRALYHLAQRRGFESNRRAPAKAGDDDRSAVKSDISRLQAAMDELDASTGRPRARTLGEYLWGLDPETERIRRRWTARSMFKREFEAIWSAQQPYHGALLGERLRRDLFRALFHQRPLQSQTGLIGTCELEDGGEWLHPESGEVYRVRRCRRAPRCLLVSQRFRIWQDLNNLSWTDENYQTLRLTLDQKRKLFDALDTTRSFGKSDLKKLLGLKGKLRFSFEAAGQRELKGNLTNAQLLALFGDRWRDLDSESCESVVLELWSLSEAAAKRRAQLGRGPWAWIRPTESEIHKLEQIHLVEDYSPVSRRAMARLLPHLERGEFYSRCVELGYGRRPPRREEQLLPPVPVACPTLRNPVVSRALSETRRVVNALIKLYGKPELIRVELARDMKRNKKDRERMLKATIDRRDERERAFQRAREARGGGRLAQDDVLRILLWDECDGVCPYTGETISMGMLFNGEVDIEHIIPYSRSLDDSFANKTLCLAHFNRNVKRNQTPFEAMHARHDDWEAALQRLHRHVHDKRMSPSKLRRFLMAPEQLEEFLSDFTTRHLNDTRYASRVARGYLASLYGGDERGCDAEGRLRVQVSPGQVTAILRRALSMSRVLGGGEKSRADHRHHAVDAVTIAMTSPAIVKRLTDAANAAESTTGRAKPVIAPPWDTFELDVSRATDAIVVSHANYNRVRGRLFRDTLYGTPRSAAGQRLDDTADEKTYVHVRVAVQDLSRKDVESDDVIVDVAVRDRVREKLGAGEPEKTFDPERPETLPRMTNGPVIRKARVRRAKQTLSIGRGHRQRRVENAENHHVEVVASGSRAGREQWKARLVSLADARARADQHNPVVDRDGAFVFSLGKGDVLTVPVAEHAPKYLVIKSINASSGGRVAWVPHTDARGSKERKTERCGTEPTIGSLRGLVSGKVVVTPIGLVRRSRA

SEQ ID NO: 9213 - protein, 1485 aa, unidentified
  REGION 1..1485: note = Description of Unknown: Cas Enzyme sequence
LETLIDFGMCPLSKEQLRQWKYHDKTKGKSSRKFPITKEFLNWLCLNPYKLRAEALERNLTLQEFGRILYQLIHLRGFYSTRKVKEEGKMAKGEGDVIGFVKTSEFIKDKPSYGSAMYSISPKENENYKQILDKEGKELRVRARYTLRQWYVDEFEKIWTKQAEQLGIEKQSVIVKTEKVVGNPYRDANKKLGLKKRLQHKIDYLKSKGIKTELTIDDGKLEATKLVIEKTLSLRELLGGGENVKQEESILFYQRLLRSQKGLLNECSLEKTRRDENDEVVYGGKTPCPLSHPDAELKRAYEFINNIEYGNEIRLNEEQRKLVLDLINKNHNNFDFEKIPDELSLSYEKFNYDDKHKVPGNYTIKHLSQLFSQEVWEKNKYEIWHCFYFYSDNKKLLEKLKTYGLKEKDYEKITGKINDDGSLKEGVILKDGYSNFSLKAIHNILPFLEKGYKYSDAVVLGGVRNVFGKKWNELNGQRDEIEKSVMIINHDVKNEEGEAIERIKDYLIKNFHFKKDDKAFFGLYHHSQEIQRDELSDDLEAVPNLRNPIVQQALSELKKLVTELKTEHLSKGEHFAKIKVELARDLKQSKKRRKEQRDANLERENENTKARTVLDEFGLSYTRDNIHKYLLWKELRDETGRTICPYTGKTISLSDLFGRENKFQIEHIIPYSVSLDDSLGNKTLCDAKENGDKGERTPFQFYGSNEKRWEEISDRAFRILPYMKAKRFTNKTIHETDFISSQLNDTRYISKEAKDYLQQICSDVSVSPGQLTAELRHLWGLDTILSPPIEVSDETLLGATWAKLDKDGNPIAFYPIINRRPFNNHGEFIITGEIKEGIFESKFLEIKYPVENLNDGKYWAKVKVSNMPVQLVRVNKDLPYYEKEKEILLYGMVEKGKKFSSKFLTQKIDAPDLEENETYWAKLSIHSAKIDAGKKKEKKLKPKKDEILLYGKVTNKVFTSKIYSCSTDVEDGKYYAIVKVNLENVSFSEAKNKKPISTDKQVIVTGFVNETLFAPNVDLKQSYKVSGKDGLHWAVFDVKSSPYDFSIIKNKEPEIEKGKEELVEGVVTYAEILDVDKSTGEIFSEERRKVFFSGKQRIDHRHHAIDAIVVALTEQSHLQKLSTHNANKKAKYRNQAYDRNELTFPKPWDSFREEAERVIDQILVSHKQTNKVLTKKKTFSKKDGKAFEGVGARGQLHKEFVFGAHPKPLLSNDGKFTFEDNRKIILEKENGKVKQYYHIRKSLEDIKTSKHIEKIVDIEIKKIILNHIKTQYPKIDLNDDFNVPPEAFFKVGEDKVKQPRIFLPNRKGGEKVPIKKVRMREEMNNAERLKDDINQYVNPRNNHHVLIYKDRNENLKESVVTFWEVVARKKHKQPLIQLPPEDSDGTIITTMRRDDMFLLGINESEIDWEKQDNKLLSDYLYKVQKLAGADYFFELCFRKHIDARSDDEAKARYVYIKNFGDGKTGWLTYNPIKVSLSPTGTITKL

SEQ ID NO: 9214 - protein, 1051 aa, unidentified
  REGION 1..1051: note = Description of Unknown: Cas Enzyme sequence
MAETTKRWRLGLDLGSSSVGWAALRLDDNGQPDAILGVGSRIFAAGVDGDIDSGKDESRSVERRGARMQRRQLERRSRRLRNVFNELRRMGLLPGHGLADSESIHQCLGDLDQELSSRWIPVGDHRKAQLLPYLIRAAAAERIVEPFELGRALYHLAQRRGFQSNRKESSRQSDDKELGPVKEGIASLAEAMGSLTLGQYFAGLDPMEQRLRSRWTSRQMYRNEFDRIRAAQAGRPGAPSEDAWSRLARCIFHQRPLKSQRGKVGCCEFIGSDRRAPKWTLEYQQFRVLSTVNNLRVRTPIEDGVALTIETRRGFSERPLTADERTVVLELLSRSASVKLTKLRTHLKLKGTTFNLEEGGEVELKGNVTEARLRGVFGERWNEMLPVDRRRAMNDVLSMEKDEALERRGREMWKLDDSAIPGFVQLRFEEGYAPLGRRALQCLLPHLEAGLSVQEARKIAFPEHFQSGEVRGTLPPVRKALRSLRNPMVERSLTEMRRIVNELIREYGVPAFVHVELARDLKKSRKDRQDIAKAHRNRQGERDDAAESLRELGIANPSRTDIEKALLHAECGGKCPYTGRSIGLSDLFSKSSIWDVEHIIPFSRSLDDSFLNKTLCLAEENRNGKRDRTPFEAYSGDAERYAQMLARVGRFQGKDAKRKLERFMLKDVGDALRDEFCSRQLNDTRYASRLACSYLEELYGGSSDAGGVRRIFASTGQATAMVRRELGIVGMLDPQASGLKSRDDHRHHGIDALAIALTSPSMVKQLADAADGARRAGRRRFCAIPAPWVTFPDEALEAARVMVVSHRGRRSIGGALHEATNYSRPIGGDEETRHVRKPMTAFASSGDLDDIVDPVVRQAVKDHVAARGGNRKCLANKDDPPRLPSRDGALGNPIRRVRIRASRGVVVAVGAGARVRHVAPGSNHHMAVVTVLSAKGAVGWEGHIVTRLEAVRRAVCGEPVIQRDWGEGRSFCFSLAGGDTVRLIGGGKDGLWYVRGVSKKVDLAAIQDGRPTNAVRAAGDRWEVSVNQLMSRFQCKRVSVSAAGVVTECNA

SEQ ID NO: 9215 - protein, 1068 aa, unidentified
  REGION 1..1068: note = Description of Unknown: Cas Enzyme sequence
MSVKHYLPYTLGLDIGMASVGWCLLTEDDILAMGVRAFDKAEAPDGAALNAIRREKRLMRRRLRRRAHRLLRARRLFRREGLIPGSDSAHLAMGSDAGSTPWELRARGLEERLSPGDWARALYHLVKFRGFHSTRKSEIQNDEEAGRMLIGVSQNQALLDEGGYRTPAELACHHERFARHKRNKAGSYTQTFSRKALSNELALLFAAQRQLGNPHASEDFEAEVASLLWSQRPPLTGADMLKLLGSCTFEPGEYRAPKRCYSAERFVWLSKLNNLKLFDDGAWRPLNESERSILRELPFSGKTEKITYKTLRRELQQRAGLAATARFAGLSYRPDSAKNPEDAIFFSASGWHGLRRAYDKAGLEQAWLRLCGETERLDAIGYALSVLKTDQEIQDHLQAAGLSDTEIAALLAVGFKDFINLSLKAIRKLLPGLEQGQRYDQVATEVYGHHSARVETAKARKLPPLDKATLRNPVVFRALNQARKVVNAIIDDYGAPVRVHIELARDLTRPFEERRQIEKGQHQYRDQKLEDIARFEETFGFTPRSQDLLKWRLYREQDGQCAYSLKPLAEGGDCRTIFDGTRTQIDHILPWSRSFDDGYNNKVLVLTSENQDKANQTPYEFLRGESDSEHWRLFEAWVRGNKKFREAKRQRLLRKHFDATESNDFMERNLTDTRYICRYFKNLLEQHLQLAETSEARRCVVVNGQLTGFLRARWGLIKERQAGDLHHALDAAVIAACGHALVKHLGDYARRGELERVRSGYVDVVTGEVIDIKRLRTLESRFPEPFPHFREKLLDRLSPAPARGDPLLVSRAPTRRASGAAHQETIRSAKRMGRQGVSTVKTPLTRLKLADLARLAGREDPRNHALYQAIEERLKRHNGNGVKAFGPDLPPLIKPSREGVGPIVRTVKLEDTQRSGLPIRGGIANNDSMLRVDIFRKAGKHFVVPVYVADLTRRELPCRAVVAHKPETEWEVIDDRHEFLLSLYPNDFVCLKFKGKPDVAGYYAGCDRAGGTIHILAHDRNQSVGKEGLIRGIGVKTALSITKCHVDVLGRRYPVLSEVRRDLAQHRR

SEQ ID NO: 9216 - protein, 1103 aa, unidentified
  REGION 1..1103: note = Description of Unknown: Cas Enzyme sequence
MTQISGKDGLQTPLSENNGPYILGLDIGTTSVGWAVIDSRNGKPVALREVGVRIFEAGVEGDIESGRDASRAAGRRNARLQRRQTWRRASRLRRSFAELQQHGLLPAGAYDSESRHEALLKLDAELREKHVPKEDERAAQLLPYLLRSKGVTEPLTLLEFGRALFHLAQRRGYRSNRKTDQKSEATGEQTSARPLNTDKPATDSAASGKEDTFKVKESISRLQQEMGTLTLGQYFATLDPLEQRIRQRWTGREMYLDEFERLWAEQSKHHPELTPDAKQAIWKAIFHQRKLKSQKGLVGKCELEPKRRRCAMALPIAQEFRIRQQVNHLKLREANGYERFLEADERNALIERLKNQQSLSFSKAREGLGKGAKFTQELDEKGEDKLVGDRTTNRLRPIFDAAWEEFSEAQREQIVFDVLHFQDAKALARRAMRAWKLAPDAAEKLANTQLEPGYARHSKLALTKLVDQLRQPSNKDPQAGKSYMEAREAAGYGTAKTTAVHDLLPPVLNSMSQLRNPAVCRALTEVRKVVNAVVRKFGKPDVIRVELARDLKRSRKDRKKVSESNDKQRKARERAKQRILTEIVFIEPSRSDIEKVLLAEECGWLCPFTGDSISMQSLLGPSPQFDVAHIFPRRYLDDSFANKTLCRADVNRHRMYDLLPIQAFGQDGEKWTDILNRVRQFMKRTGRVGSSKLERFQMTEVPDDFVSRQLNDTRFATSFAADYLACLYGGRWDESGRLRIQASTGGITAHLRNEWRLNSILGGGEKTRDDHRHHAVDAVAIALTSPGSQTMLQAAASRAASRFDRRPFAEVEEPWGDFLPQVREVILAIDGVRRAVSHRVNHKLEGTLHADTLYSPLKTHADGSTAHHVRKMLHKLSLTEVTGDKIVDPIIRALVQKQFERLKATGLKDPAKAFADPNNHPYLTTKRGGLVPIHKVRLAVDVKPKTVGKGHRERFVAPTGGSNHHTVIIAKLDAAGNEVKWEQRLVPRLEAHQRLRDRHQSGSGETDIIQRDWGKDYRFKFFLMPNDCVEMDDASGHRQVYRVCSISQSATTNEIQCLEHNDSRKIGDARSSWNRITGIDNLRKRNARKVRLTSLGEIVRDDV

SEQ ID NO: 9217 - protein, 1008 aa, unidentified
  REGION 1..1008: note = Description of Unknown: Cas Enzyme sequence
RYRLGIDIGTNSLGWCVVELGHNGQPNGIRRAGVRIFTDGRDPQKGTSLAADRRLARLMRRRRDRFLARRDGLIAALIRHGLLPTDAAARKALEVLDPYELRARGLDQALTPHEFGRALFHLNQRRGFLSNRKTERSAAKEKEIETKGMKGAINDLQARMVETNARTLGEHLHRLHTEGRTVRARLRGEGAKATYDLYASRAMYMAEFDALWTAQQACNPALTDSMRREIRRILFFQRPLKPVKPGPCTFDTTDSRAPLALPSNQEFRMLQELANLRIVAPDQRQSPLTNEQRDKVLAKLRTTKTELKFKKIRTILGLGTEVGFNLENEKRAGLKGDTTGTRLADDDRFGPAWWSMPTERQDAIVTVLLDEANDDEVVKIALSDWGIDEAHARKIAECPLPTGYGRVGRKALARLLQIMRSDVIRYDDAAARAGYHHSDRRTGEVFDTLPYYGYLLDRHVANASGKREDADEKRYGRIANPTVHIGLNQLRATVNALIKCYGKPERIVVEMARELKLSQKRKDEVQKAQAENQGLNDMRRRKLADLDLPDNGENRLRLRLWEELNFKEPHDRRCVYTGEVISLQRLFGPEIEVEHILPLRRTLDNSAANKTVSLRRANRAKGNGTPHEAFGASPTIDGWRYAWDDILARALALPANKRWRFAEDAMARFAKDGDFIDRQLTDTHYLARATRTYLSALYPGEESRVSVTPGRLTEMLRGKWGLNRLLSDHNLKNRSDHRHHAIDAFVIALSDRSLLQRIASAADQERERLIDDMPEPWDGFRDALRDRLDRLVVSLRPDHGAAGRLHEETAYGIVRKPEDWDGATLVSRKALVSLNEKEIERIRDKALRASVQYHVAAAKAGAEKWGATQLKAALTAFAERTRVGRVRLLKVEERFELITHGPHAKAYVGGFNHCIDIFALPNGKWSGAAVSVFEANRPGHTLKWRETHPDARLVMRVHKGDMLKLEHDGKTHVMRVVQLRAKADSLLLVPHFEAGKYQERHDDRDDPF

SEQ ID NO: 9218 - protein, 1408 aa, unidentified
  REGION 1..1408: note = Description of Unknown: Cas Enzyme sequence
MKNILGLDLGTNSIGWAIRNLDSITENQITSSGAVIFQKGVGEGKSGEFSLSAERRTHRSKRRLYNAKRYRKWSTLKVLIDNKMCPLTIEELERWTKYKKEDGGRNYPTSPEFMEWVRMDFDVDGKLDYINPYELRCELLESYNEKDKNRLHKIGRAFYHLVQRRGFKSSRKSGKSGYANNEELEKLKEANPEIQISQVLLNKLNTENKRIRASGVIQRKYFEDEFNAICKAQKIDGALAERLHKAIYFVRPLRTQKGLVGKCTLEKGKSRIPISHPLFEEFRALQFVNNLKWRKAESKDLYEQVPVSVRKEIFKKQFFKISAPHFKFEEIIQEFSNDGEYEFNYRNKPNVSACPVISRLKAVLKDEWTNPFIEDKDEIGINWSGLSIAYSVKYGKKKGKERKLDFEDIWHLLFDYLQTKDKEEELKKFMMEVVGWNDEKKAKAFSEIDMQQGYGSLSKTAITKILPYLKKGYIYSEAVSFANLKNVLGEKSFEENKEKATKAISETIAQIDTKKEKLNIINGLIQKYFGELQTTKAKGLDEVIKKEAEKDVADKLKYYFGEKNWNDFPEPKQKEYYDFILKKYLAFLDGKQPPDEKAASRQGKNPEIDYYKLPRLDEAIKDVLKQKFDATDEKLKKLYHPSDIEIYPTAEEVEFIDEETGEVRKCKQLGDPMPPSKAWKNPMAMRTMHELKKMVNYLLETGQIDEETKIVVEMARELNDANKRWAIQTHQRKREEQNIEFAKAILGLAKEKYPNLNENDADNIDKIRLWWEQLDNGDEIYKQVKALKEDVQKYRLWREQECRCMYTGKMINLVDLFDGTKTDFEHTLPISSSFDNSLANLTVCDSEYNRKIKIDRIPYDCPNYANENKGYSPIKSRLKNWIEKVETLKERIEENKFRTKKTQDIATKDDYIQKRHLLQFEFDYWNKKVKTFTVEEVPNWWKNSQLVDTQIISKYARAYLKSLFRKVEVQKGSITAEFRKIYGIMGDEKKDRSKHSHHAIDAAVLTLIPGSARREAILKEYYEALERKQKYHQLPYEDFHVNHVKDIENKILINHVKKDQTLADTKKRARKRGKIVYLRDKKTREYLKDKDGKKIPMLLQGDNIRGRLHKETFFGAVKAVERDNNGYALKDENGDYRIKQVNGEDEIWIVARKLITDIDIDKDIIVDEVLKRHIKEQLQNGKKPHEVVDFNGKIIRHIRCRVKAGRGVLSKDKALPIKKHAAAFLSKHPHKQEYLTQNEENYLFLLYEGVDKKNKPTRGYKILNLFDITLLGITDIEQLKNESEFQKLKKGKEKNQIELKLKAILKVGDKVIFYKENREEITKENVGNRTYRIYKFNEMTTTGYLYCQFHSEARPDNELGDGDTMFNPEKYQARLKLRPDEFNCLVEGKHFEIKPDGKIDWRDNQPLQ

SEQ ID NO: 9219 - protein, 1284 aa, unidentified
  REGION 1..1284: note = Description of Unknown: Cas Enzyme sequence
MGARYILGLDIGSNSVGSAWIDLEKGSIDVGLGVFPAGVDETDDKRGEPKNAKRRMTRRTRITLARRSLRKRELRLELIARGLLPADADAFKTLLEETDPWTLRRKGLDHALTPHEFGRVLVHLAQRRGALGIREPEEGEEGGEDGKVKKAIGETRAAILARSKELGKQVRTFGELIDLLRAGDEKRHSITTTDSRSEHQRKGPREWRDAVRNRRREFQFHADRAMIRDEFAKLWIAQRKLGGKLGPLLTDELRTKLDDESGDSLWRHRGLLFGQRRQSWDMGTLGRCALEPAERCAPHADRHTSYFRVIETVNNIRILEGGNAGRPLSVSERTKIITLLRGPLGVHEKGAYKGKPKRSVSVTDIRAALGLGKGGKTAPVRLNIEADEDREINTDWFHRAIVHGGLTEARWNGMDERQRESVNKAVLNFDPDRDEHAAELRAGAIKWWSCTPEQADGLVTGWRTRPPLEKRGNLSRRAIRNMLAVMDAKPADPALGFDRTSRWYTQIEARKVIAEDGDFTDATTGEPIHPRTRDRYATGAKGLTARDRHYIKMHPDSLPPAPMLTNPVVRKAIHEVRRHIVEHIKKHGRKPDAIVIELAREAKMSAKDSDRALFRNRLRDRIRKDIIETFNLHAQKQNQQRAAVERVVLAVQQKGVCPLCGNQTIQTAITPRMAAEGEGCELAHIIPRGIGGSNGLGNMVLSHIKCNRNMGRRTPRDLWGQTFDAEINRVEQMYTKIDRVKPKDVDKASEDKLWGSYFDWRDDDRKIANFKKAAKDIQGFSDRDLSDTRYATRQVMAYLADALYEGKGLPERGGERKIFTTDGGWTGDIRREWGLFQDTHHAREKGTSTQEEHARREKNRGDHRHHALDAIVVALTDRSLQTKWEQREMQAEKDGINTADRAEIEKYRELHPLPLPGTFKDRKDLRDRAMLAVFGDKQGPERPVSHRAVKRKLIGAFHKATQYGPVVDRWQQNGVAHERLVEDRTTIRQAVLGDTKSDFLKPAHLRLARPESLDEAVDRLSRRFQIGKRGMSGEDAVKEARKFIKSKAHSPALVEPKPKKGGIVRDPGLKMLLRRKIEERDLDPDKYTKSELERSIDEKGPLRHDSGVPIYNVVLLRSNSKPVVVQRDHFDHQTGVRRKLDDPSSLRLYDGRNNHHIEIRTNLKGKWSGEVVSAFEASKRKLAFFRALREARVPRFIDLKKLPKDQRAKFRPLIDTAEKSHPIVDRRDAPAAGTLFVMSLCEGEMVKMRHKETQEVGYFVVAKINPSRSVVLVPHWDARTATKR

SEQ ID NO: 9220 - protein, 1117 aa, unidentified
  REGION 1..1117: note = Description of Unknown: Cas Enzyme sequence
MNKVFGLDLGTNSIGWALRNPDLIENQIEKFGVLTFNKGVGLGKTGEYSYAAERTRKRSGRRLYQSRKYRLWATLENLIKEDYCPLSIGNLNKWRQYSKEEAVKNNNGGRVYPVDDIAFDQWIKLDFNGDGKPDYTSPYQLRKELAESKLDFSKQENCHKLGRALYHIAQRRGFKSSRKGADDIKEKETSNEEVVDLQYSEKKKNKAIIEYFEKYPDAKTIGWLYALLENANIRIRESVTQYAIRENYKDEIKYIFEFQGLGLQDSLFIKLVESGKNKNDGSIFYKRPLRSQKGLIGKCTLEPSKYRAPISHPSFELFRAWCFINNIKYKEAAKSDDYWKPLPIELKQSILEDKFFRKSKVYFPFSEIAEFISKKGFKWHLNYTLKTTVTGCPVSARLKDIFGGNYLEIKIPKEPSAKSAKNYYDIEDVWHVLFSYEDQEFVTEFALQKLQLTPENVKQFVIAWNALPVGYGMLSLNAINKINKFLQKGLIYTEAVLLANLPEVIGEQLWDGNEDFFIENISNIIDENRKQKTILNIVNTLVSQHKNLEQKFGYKNNEYQLDNGDKEDIKKAIEDAFGITRWNEKQIEEQHNITIVITDCYQAYFKTTGFTRREINGERHFEIKSGNGIYYKTDSGYYRLPKLIDTLKGFLLSHFELSDKQLNKVYHPSEISIYPPAKPDKDGIIKLGSPKTGSFKNPMAMRTLHELRKLMNYMIETDQIDSDTRIVVEVARDLNDANMRWAIDSWQRQREAENAEFALAIDELAINEGLPISSQRESDIDKMRTWYEQNNEEPIPPITDIKKEIEGIRWKDSKKGSYKKIIAAKSIIDKYRLWMEQDCLCIYTGTTIRITDLFNDNVIDIEHTIPRSISFDNSLANQTVCYHDYNRTIKKKQIPTQLNNYSESSGGYSAILPRLEKWKEKVERIKQQIDFWKTKSKKSSTKEWKDDAIKQRHLWQMDLEYWQNKVDRFTMKEVTTGFKNSQKIDTQLISKYALHYLKSFFEKVDVQKGTNTAEFRKIYGLQIPDKKKDRSKHSHHAKDAAVLTLIPVAAKRDEILKEYYEHRERNQSFTTDPYKGFKREFVWNIDDSILINNITNNQSLTPAKRKIRKRGKEQFIP

SEQ ID NO: 9221 - protein, 1397 aa, unidentified
  REGION 1..1397: note = Description of Unknown: Cas Enzyme sequence
MEKTLGLDLGTNSIGWALRDINADDNQITDKGVITFDKGVGEEKGIEVPLVKARTAARSKRRNYQAEKYRKWALVKCLIEKGMCPLLESELYWWKRYQKDNNGVQQGRKYPESKKFRQWLQYDFNGDGKPDYQEYGYSIHENIYLFRVLAISENEEHKKIFKDNPEILGRVFYHLVQRRGFKGRVEDDKETQTILLGSKEANTPGVNELIPFIEKYKTLGAALYYINKNEGYRIRKRYNRRQDFEKELFEICRVQGIPETVQHELWKAIIWQRPLRSQKGLVGYCTFERPQKNEKGQYIKGGKTRCPISHPLYQEYRTWQLISNLKIVVPDDIDKVAFLTDKVYPLFIRDSEVEFVKIKKEIEKVGGIVRAKFDDETRFPTNDFLYRIKEIYGENWRIILKWEETLTNKPKSGKYHRVEDLWHEIYHFIHLKSTTPATFYDAIANKLHFDDKQIKSFKKLKLDQGYASLSISAITKILPYLQKGLLYSEAVFLANLNKIFATELTPETKTEILSAFRLLSISFNENKLRLGIVNSLISDQLNSSTRFGMNSDYALDDDDINDIKLKIEDTIGVQNWNKKEDIEKVKLLDFIAEKYLIFLQKPVNYDANKSFYKIKRFDQILKEYLVEKYDFSIEHLNKNLWHPSEIEKYDPAPSSKKVPNIKILGDPNPVGKGFKNPMAMKTLHRLRNLINYLLESGKIDSDTRIVVELARELNDANRRKAIQNWQKRREDENKELAKGIINTAKVKYPDLDENDPLIADRARLWYEQIENSDEIMRQAKALKDDLLKVKLWKEQNCRCIYTGRIISISNLFNGTEVDIEHTIPAKISWSSEQWNLTICDSKFNREIKRKKIPADLINYETTSEFDKDGANILKRIEPWAIKLKSLNASLQKNINQTKGSNYMDKNAKDEILIKRRMLQMDIEYWNKKIETFTKLEYLGGFRRQQLTDTQIASKYAFHYLKTVFNRVEIQKGITTSTFRKIFKIQNKKELKDRTKHSHHAIDAAVLTLIPPSSIRTKMLDEYNNALDMNQSYHKNPIGWDNFKASYLLNLEETILINYQKKDTTLLQTKKKMRIGGKIQFIHETTADGINILKRDLNGKPIPKMAVGTGIRGQLHKDSFYGSIKINDQLMLVERYPIESFDSLKDCTHIIDKKIKEIVKTELINRVESGMSFDKAKFLPIFFPGSQQIIKKVRCRVAAGRGYLTSEKAIEISIKNHISKYEHKQNKYVQNYKNSLCLFYINSENNLRGLMIVNLFELSFLKIKTIQSIKQENFYRSITLGKGKNKSEALLENIIHVGDKFIFYKESKDELLNLSHSEISKRLYTIYKFNEPAPSTVYIYLQHHLESRSNDELGNGEKLIDFGKYQPRLFLSASKLNCAMEGLDFHVTPDGHINWIIK

SEQ ID NO: 9222 - protein, 1223 aa, unidentified
  REGION 1..1223: note = Description of Unknown: Cas Enzyme sequence
VKKILGLDIGSSSIGWAFIEENGVESKILKLGIRVIPFSGDETDQFIRGQAISVNKDRTLKRTARKTNQRYKIRRKLLETFLKQNGMYPETKQMFDPDPLTIFELRSNAATKQITLKELGRVLLLLNQKRGYQSSRSSSDEEDGSRKKLSDYLSEMNKRKDFISERHITIGQYFYSRLSEDRNFRVRQNVFPRECYKAEFEQIWCTQQGYFPDVLTDEKKLIVKDQIIFYQRRLKTQKRLVRKCQFELHHRVAPKSSPLFQVEKIWESINTISLTNKQKEFFNITNEQKAEIFTHLDHNFKLTQAELFKILKVKRTDGWYPNEQIAKAGIQGNMTKATLIKAFSDMGIDRSDLLKFELVEKDAFDHQTGEVKNYKMISASFEKEPLYRLWHLLYSVDDSEQLIKVLMKHYSFTLEQAQSLNKIDFKKQGFGSKSARAIRKLLPSLRIGLNYSQSAAIAGYNHSSNITKAENDQRELQSSLERYKRNTLRQPVVEKVLNQLVNLINIIIKQKELGRPDEIRIELARELRQSREERSDVYNNTIKRGKENQAISERISADYPGLKITRRLIEKYKLFEQQGGICIYSGKKMELSSVLRGEGVDVDHIIPQSRLFDDSFQNKVLALRKENEAKGNETAYEYMKSKSDDLFRQYVERVDQFFADKVITKSKRNKLLMAANEIPVDFINRQLNETRFISREATKLLKQICRNVFVSTGSVTEFLRTQWGYNDILKQLNWHKYEQAGLVKENNIEGWKKRDDHRHHAIDALVVATTSQSIIHRLNNLNASTTRQEMLASVKNSAPEGWQAKRSLLEQHVLGLQPFSVATAKEAVNKILISQKAGKKVAAPSKNIFKHSKKIPPNSQFSLAPRGQLHKEQVYGKVLKYASAKTPLNGRFNQVDKIANPVEKVLVEERLAKFGGDPKKAFKDLNKNPIWLDATKQKALEAVTLWEEHFVYKYSLGIKFNEKDIDSIVDVKVRELVRARFNERKGTKDHPLKDLENDPIWLKKEKGLKIKTVRCFTGYKSLVPLHFAKSGITMSGRDRITNAKPIDYVNEGNNHHLAIYKDETGNYHWTIVSLMEAVKRKNYLLPVIVTQPAKSWEELNVLKIVDTSIMENLPLKEWIFITSLQQNELFCFNLTDLEYKEALKQKNFEKISQNLFRVQKMSQNEAGIKIYFRHHLETRVDDAKMGGEAMAIKTGKLIRISSLKRFTKNLPIKIKLDASGMII

SEQ ID NO: 9223 - protein, 952 aa, unidentified
  REGION 1..952: note = Description of Unknown: Cas Enzyme sequence
MQLIFGFDIGTTSIGSAVIRYDARRSEGRIEHLGTRIFPEARDPDGTPLNQQRRLMRTMRRQVRRRRERRIQLNNLLSEFGFLPRFNSAEWSKVMALDPYQLRKEGLERTLTPAELGRAIYHLSKRRHFRGRDLEEGDEENINESADEKEAKSGREKTIQALKRSDLTLGSYLFSMPSGHRKRGIHANRDHVQDEFNRLMVKQSSSHPILSSEVQLKIADSIFAQKPVFWRKNTLGECRLIPGAQLAPKASWPSIQKRMLEKLNNLAISGGNGRPLEPEERQAILDQIQTQGSMTWGGIRRVLEPIFKARGESAKSIRFNLEEGGEKGLSGNPLEMKLLSIFGDAWHSHPYKQAIREAVDSRLRASDYGDVGQRVIILREVERKKRRQAAAQSFVKDFGATQSQVVELEKLTFSTGWDAYSYEALAIINPELEEGHRFGTLLNSPDQEWYDWRDRNFPNRHQATGEILDRLPSPKNKEESQRLRNIRNPTVIRVQNELRKVVNNLISVYGKPDLVRIEMTRDIGLSKAEREEKTKAMRNQEKLRKAALEGLKSNGIAEPKRDDIEKWLLWKESGDRDPYSGDHIGFADLFLNGQFEVEHIWPRSLSLDNSFANKTLCRKDMNLRKGNRIPFDAFHTDPDLWAAMKDRVSGMLATKGGVGMSRGKIRRFLAQSMPDDFTNRQLTDTGYAARQSVTLLKRLWPDVGPEGKVPVQSVSGKVTAHLRRLWGLNNVLSDDGEKTRADHRHHAIDALVVACADPGISQRLSRYWQLKDNPATASQKPQLDPPWLDIRAEVDRLIKDIVVSHRVRKKVSGPLHKGTIYGDTGQEEYSGKIAYRMFTVRKNISLLSKSELSDIRDETIKRIVNEWVAQRGGDPKKAFPPFPTVSPDGPEIKKVRIWIKQQRALMAPVTTGYADLGSNHHIVIYQRPDGKAEFEVVSLFEASRRIRAKEPV

SEQ ID NO: 9224 - protein, 1077 aa, unidentified
  REGION 1..1077: note = Description of Unknown: Cas Enzyme sequence
MTRRILGLDLGVASLGWCLVERGVDVRIVDTGVRIFKAGKDKMGTKDEQTPNQERRRQRLVRRQIRRRVKRRAHVWDLLARADFLPEVGKRQRASIIEALEKNLLAKWDALCKSEPALQRFLITLPHVLPYVLRAEALRRPLDVEEIGRVLLHFSQRRGFLSNSRKAPASEDAKEASAIKEEHRSLKQKLAERGETLGQYLACLDPEVGRIRTRHTLRSMYLDEFEKIVAAQSTYHPALKDSEFVRTLSNALFHQLPLRSARHLVGPCRLVPSRQRMRQAFPIAQAYRVWQGLASMRIEFAKGQGMRPLTKDERERVASKLLVGQKLKVADVLTILNAPVRALHNLNDDTRGHLIQWDRTAEAICEVTPNGWWHSLSQDRRDRFVQLYFSFRQIAPFAKHLASAEWSLDPETASRLANIDLEDHHSAFSRAALTRILPKVIEGKSLGELELELHEFQPKAPTIEPRLSKLQGIDDARLAEVRNPIVTRSLSQLRKVVNAVIDIHGRPDEIHIELARDLKKNREERFEHQFLQNQERKARSAAKEWLKTNNLTPNRSNVEKWLLWEECNRTCPYSRKTISKEALFDNGEFQVEHIWPHWISGDDSFLNKTLCRSDYNARKGSRTPKEAFGNTNEWDEMLQCVREFKGRPNVKKDFAHRVKYSRFQKTTVDIEGFTSRALNDTRYAAKLARLYLSRLYGGDDDGPGRRIFCNSGGVTAILRDTWKLNSILGKFVEDAEEEGGGFHIKMREDHRQHAIDALVIALCDSSTLQQLAAAFRKSDEALEQRAVVKIKPPTASLVTDMSLRVDEMIISLRPKRRLRGGVHKATHYGQIETLDPDTKQFGNRFVTRKRLEALTDKHVEQIVDKGVRNSVIAAIKDAREKKPGAKIADVFSDEARLPTLPSKRGAPKSIRKVRILMRGDFTMDDEDVKKVNVAAPGEAARWVDLDGNHHVVVREVIKQGKPTWELEAVSLFHASKRLREGKEVVERSNGGLGRYLFHFAVGDVLELATPAAGMGHFWEVKAAAAPQSHIVPLNDAREDKRDAMKAPYGSTLMKWGARKVTIDVLGRVRGGTDEEDS

SEQ ID NO: 9225 - protein, 1004 aa, unidentified
  REGION 1..1004: note = Description of Unknown: Cas Enzyme sequence
RIDAHTPPLLGAYLASLDPQQEKVRRQWTSRKMYTDEFDALWFKQAEHHALADDARDAIRKAIFNQRDLREPKRSVGRCSLMPDQPRLRLAHPKYQEFRILQVVNDLRVSAGFAAPQPLNAEQRSVLFNKLMKAYELSFDQARKAIGLPAEFRFSHERETQTTRTAHRGPQSLLQALGVRLKGSAAAMEKRLKRLLAAVQLETDADDPRYIVELEQASLRQAVTKNTGLTIDDARSLLGLGSDARFLVVTMQSNKLIGNRTGVALRRALDDRLASLTPKLRACLVRDLCSKFHDDEVHALLLRPQAGDHGPAPHTIEALRGRGWGFRPTDAAALMKASFEETRGAVSRRAIEALLPLMREGASYATAVRDRFGNLLTGSSINRLPSIMCFTGNHRAKNCHCKPCGAGLAVAPVLRGIRNPAVIRSLTEVRKLVNAIVHEHGRPELVRVELLRDLKNPRGKRKDDEAASRRREGLRESARDRIRARVVEHGVEEPTDLDVDKVLLADECRWVCPYTTQSISWGELLGSRSRFDIEHIWPFSRSLDDSFMNKTLCEREFNQLHKRNRVPARACTPERLSEVLKNVRRYKSDWRTRAEKLRRFEAHDVDAGFANRHLSDSRYIARAAAAYLSLLFGGPIAARLEDNAPGTRLVQVTTGGITHWLRSGWQVSRGILGDTVGKNRDDHRHHAIDAVIVALTEARAVKALADAANDAEQLFKGRKFERIAGLPWPTFREDVDRVIRKIVVSHRQSRRVSGSIHNEQSFTKSKQGQVCKFVLLDELTPKQINGTTILDKRAANAIRQQLQTLGASSADASSVFADPANWPVLTDHKGHKTRLRHVRVVFAQKATHSYQRVANRRWIKTASNHHAAIFARVAPDGKEVEWKDDVVTLLDAYRRVDRPLPHYAVVNTPPSDWKGNWLFKFSLAKGDLIEMDLPDGRGRAIYKVSSISKGDIRVVLHNDARPVPEINALPVDAGFRIRPIDRFRRRNVKKVLVTYLGEIRNAGG

SEQ ID NO: 9226 - protein, 1068 aa, unidentified
  REGION 1..1068: note = Description of Unknown: Cas Enzyme sequence
MPAKEYSLQRSGSAENAPPPHHVWAFDLGKGSIGEAVRVGTVFKHKASLLIPGDFAETRTARDRRRMWRTRQAHHAREQWLREVFQAIGLPVLYGRNHDTKTGEWKPGEPGDPRLEREFPTAGDDTCYTSCLLRIKLLRGEKLEPWQLFKAFHSAIQRRGYDPDIPWKTREAKKTKEADGEDDDAKTGERMKKFEEELAKMAPGQADYQFPAYFDAWKMGLWNPAQPADLKLRVDCHAESTRNQIVPRRLVEAEIRHMVEGAAKHYKALAGKANYLLFGPAQKPYASYNANPSKPPYLREGAATDWQGVLGQKIPRFDNRIIAKCALIPRLNVCKLREGGKGEPHPKSLVAVEVVFLMKLKNLRFQRGNKQEALSAAEIRSILEDPKRTKWAITKAAWKKQCAAIGAIPLPGHEEVESPRLSGRSRFCRPALEILKRLILSGQKPSDFLREELARLDGNKDPHKGLLAADLKFLGDMAARKDTWEGLYIPNQQLDALVQSTVGPDEAIQRLIGQQNDPIVRHRLDTFAKRLKALNVHGQPDHVVLEFVREDFMGKRAKMELSKFMKQRAEERIKAREEAAKAGATERSAGLKLELLRAQGGHCLYTDVGLDPSRLDEYEIEHIVPRSRSGPDAVFNYVLTTHAVNEEKGDRTPYEWLSSTGGWDAYVNRVRSRLLALRNKKVQLLISPNAEELTERYTALAETAWIAKLAQTIVGLHFGWCNGIDEHGRKRVTVISGGLTGRIRRKYGLNRILNPSAQDEEEAEKKNRSDDRHHALDAMVISFIPGWARDAKKEGFFRFPDGVNREFFAKEIADVMPQNLCFEKPALAETIYGARGEESGRVIVQRVELFKLAMKGIAPGKTKFDLDYLATQIKAVRDGHIQRKLAEFHATSPDEARWMAFCENFRLAGKSGPAGSCVRRVLMNVGEPTEYKDLSKDGTGAFRKALKGHRGQIVYVETSTDKMGKPKETVQVRPIYAFESPVLVRQQLREELGDRCRVIGFFQSGCLIEVIKPVPHTKLALPPGKYLLNTILTTSKAVKLTTSEGKTYPDIPRYNLAEMVAAGMRRVD

SEQ ID NO: 9227 - protein, 1023 aa, unidentified
  REGION 1..1023: note = Description of Unknown: Cas Enzyme sequence
MATQPNIREELTLGIDLGIGSCGWAVIAEGADGGRIVGLGVRTFDVPETAKERTPTNQLRRQHRGLRKVLRRRRQRMNALRDRFKEAGLIESAAKNALRIDKLDPWKLRAEGLDRRLSGPEFAVALGHIAKHRGFRSNRKRQSNEVADDSNKVLKAIEATRQRLQGYRTVGEMFAKDGEYAGRKRNRDGDYTRSILRDDQQREIHLLFDRQRQFGNSRATAELESRYADLAFTQLPLADSEGKVGWCPLELQHGRTERRAAKRSHSFELFRFLSRLAALRLREGREERTLTPEEIAAASANFGTQNGMTFKRLRKLLGLDDGARFDTVPVEEEGKRDVVNRTPSNGCMQGSKALRDALGPAWPALLAAPDKLDRAAFVLTFREDSGSIGRGLAEIGFEPAVLEALMRAVRQGDFAGFKGAGHVSAKACRAIVQYLREGKVYSEACAAAGYDHARRPETKLDEIANPVARKALTEAIKQVRAIVNEYGLPGRIHVELARDVGKSKEERDEIKNGIEKRNKAKDRLREQFAEDIAEPPGGPEDLMRYELWREQNGRCLYTDQAIPPNAVVARDNSVQVDHILPWSRSGDDSFVNKTLCLARANQEKRGRTPYEWFGREEARWSAFLAAVESNKAMQGRKKRNYLLKDASVLEEKFRPRNLNDTRYATRLLRDALARWYPADDKVHVYSRPGPLTDRLRRAWGIQDLKKNAQGERLADDRHHALDALVVAATSQSALQRLTVAFRQAEAAGLHRDFAGLPPPWPGFVAEARSKLTEVFVSRAERHRARGEAHAATVRSIGERDGAAVVFERRAVDKLTPADLERLKDPERNMAMLASLRQWIEAGKPKGTWPLSPKGDAVRKVSLVTNKKLDVLVRDGAAERGEMVRVDVFRKQNRKGRWEFFLVPIYPHQVFGGDPSPPNRAIQADKPEEKWPEMTEGYEFLWSLMPFSYAEVEKSDRTFIAGYFRGAHRTTGALNVSPPHSRDVTVDGIGTRTLLSFRKFHVDRLGRRFEIKRETRTWHGAACT

SEQ ID NO: 9228 - protein, 919 aa, unidentified
  REGION 1..919: note = Description of Unknown: Cas Enzyme sequence
RLHVCRNPSRAEYKALDDDKLLPAQVTFLVKLKNMRVEERTPERNQRGLLASQIKAIFDECNPKRKYNLTVGQWRGWCEQFGVLPITDTTEKNRRGVRMTDESDEKKKAEKDPVEAPSDGGRSRFSRPALKILKLLILSGLRPSDLYVKLVAREQEIIAQVEMDILDAPPVREKRDKEGNVFKNYAERPRTWLTVADLQFLLAMRKTGANEDTWEDLFIPNQRLDQVVREIVAASQSCGMDTERKMRNRAVSKLIGSQNDPVVRHRLTVLWDRLQELGKIHGTPDQIVLEFVREDFMGEKAKRKLKEFQDGRAAARKEAKELGGLKFELWKAQGGECVYGKPATKDGHCLYTMRALPQPGTVGWEELDIDHIVPRSAPYNGPDSSVNKVLTFPNLNREHKRNRIPYEWFHQDRPNEWDAYKQFVRSKIGALGAKKVQLLTRSDAADLVSRYTSLAETAWIAKLAQTLVRLHFGWPLDHERGKERITVVPGGLTGRIRRKYLLNTLLDERFKNLPTSQIVPQSEEDAEKDRTDKRHHALDAMLISYFPDWMRNPQKEDFFRFPAPLDQPFPGKRNKHAVREFFKRQLDEVLPENLFLEKAKLAETAYGQSFQPEEVSAEGPVPRYKTRKIALEELGYRKNPKGGMEFSCEHARRLARGILDPETRRKTVAFLASPVTEAVWKAFTQKVQENLKLGKRSKSSKIEVRQITEIRVHRVSVKALAYEKGNSREYDVEFARENVSEIVEESPEQLVIKTKLRDFFAGNPSESQWRAYAESLLPIDRCRLRAETNEDGRKAKTRTVKFLVLAHKPIPMKFNLAKALARIDRVCDERTRLRLREFANQASVPDQAAWNVFCESFAQERVDDHGRPRRDANGRSLYGAPIKKVRLNDGSPEQFKDFSKDGTGTFYKNKKEHKGQFVF

SEQ ID NO: 9229 - protein, 1541 aa, unidentified
  REGION 1..1541: note = Description of Unknown: Cas Enzyme sequence
MKKILGLDLGTNSIGWALVEQDIESKQGKILGMGSRIIPMSQDILGDFGKGNSVSQTAERTRFRSVRRLRERHLLRRERLHRILHVLGFLPAHYDQQIDFKKNLGQFYPETEPKLAYHNGTFIFKKSFVEMLEDFKQSQPGLLKDSRGEDKIVPYDWTIYYLRKKALTQKIEKEELAWLILHFNQKRGYYQLRGEEEELNPNKLVELHTLKIVDVISDEPQKGKDEVWYSLLLENGWTYRRSSKTSMFDWKDKVRDFIVTTDLNDDGTIKTDKEGKEKRSFRSPGEEDWTLVKKKTEQFIYSSGKTVGTYIYDTLLQNPKQKIRGKLVRTIERHFYKNELNTILTVQKEFHKEFLNEELFKTCLRELYRNNDAHQFTLSKRDVVHLILSDIIFYQRPLKSKKSSISNCPLEFRKYKNSEGLEVIAPIKAIPRSHPLFQEFRLWQWLANLTIYRNEDDANMNQEFISSAIEYESLFDFLHNRKEITQDILIKHLLEKTGLKGRALTTEAAKYRWNFVTDKPYPCNETRAQIASRLSRVDKITDDFLTQQIELKLWHIIYSVSDKTEYEKALVTFAQKHHIDEHSFVESFRKFPPFNQEYGSYSAKAIKNLLPLLRIGKYWHWDDFSAQTKDRIQKMITAEYDENIKDRVREKSIHLTRPEDFHNLPLWLASYIVYDRHSEASMAEKWNSVSDLDEYLKNFRQHSLRNPIVEQVMTETLRVVRDIWVHHGKGEKNFFNEIHVELGRDMKNTADERKRITEQVTEQENTNLRIKALLLEMMSDSQVENVRPYSPMQQEILKIYEDGALSANVEIPDDIEKIRKKSEPTRSELQRYKLWLEQRYRSPYTGQAIPLNQLFTPAYEIEHIIPQSRYFDDGFSNKVICEAAVNKLKDNQTGLEFVKNHYGETVELGGGRKLRILDEEGYTDFVNEHYAKNRSKRSKLLLIDIPEKMIERQLNDTRYISKFISSVLSNIVRSAEKDDGVNSKNLIPGNGKITAELRQDWGLNDIWNELILPRFERMNVITGSTDFTSYNENHQKYLPTVPYALSKGFQKKRIDHRHHALDALVIACASRNHVNYLNNQHALDKTKTKQARQTSREDLRAVLCIKKYQEGSDKNYKWQFKKPWDNFTFDARDSLEKIVVSFKQNLRVINNTSNKHKKWVDHDGKKVLSIVTQTQGESWAIRKPMHKDTISGIVRLRKTKVVSLSVALDSIQDIVNKDIRKHIQSLQKSGYDKAQLTKHFKGLNNEWENKDISRQEIYYWENELVASRVSLDVSFDRKRIETSVTDSGIQKILLMHLNTYTGRTDEKGIEITPELLAFSPEGIDELNKNIIALNHGRFHQPIFKVRTYEPKGNKFAVGQTGNKKTKYVEAAKGTNLFFAIYQDDKGKRNYETIPLNIVIERQKQGLNSVPEVNEKGDRLLFQLSPNDLVYVPTEEEKTGMILIDIISLNKNQIDCIYKAVSFTGTTCFFVKHSVATSIVNKVEFSALNKTEKSIQGIMIKEFCIKFKVDRLGNPKLPYSESNLQSTTESKTVVKEPRAIYK

SEQ ID NO: 9230 - protein, 1432 aa, unidentified
  REGION 1..1432: note = Description of Unknown: Cas Enzyme sequence
MENKTLALDLGSNSIGAAIREASDNEQFKKTTVITFETGVGKDKENKYTISLAANRTTKRSIRRLYQARKYKLWATLELLAKDKKYCPIDDKSLRQWKHYNKEEAQKGNGGRKYPVEDVAFANWIKLDFNNDGIPDYTSPYQLREELVTEKLDFLIEENRHKLGRALYHIAQHRGFKSSKKVQNKDEETTGDLADSLEEGIGAEKPKEDKFNKAIETLGFAFNLTVGSTLAPVERAGIRIRKDLHQYTTRKMLIREVKYIFEFQGLDFKSIFGDKTISRSAIFWQRPLRSQKGTIGKCTLETNKYRCPASRPEYEEFRALSFINNIKFKPKNVKDAEWKQLDLNIRQDLFKDKFFVQKDFEFYAIYKWLQKKNGHDDWEFNYNFKTNIPACVVSARLQHIFGEKWNSIESRNDKKGKEYKTYFYEDIWHILFESDDNDFIKEYATDTLELDEENTKKFLNLWYAMPVAYGNLSLKAINNLLPFLRKGYIYTEAALLAKVPKVLGENIWNENKDSITENVKQEVIEKNRNEKRLLNITNNLIARYKSLSDNEKYAVKNYEYKLDKDDIKQVAEACIESFGEKTWKEKSEQLKEKNKTIVAGEFQSFFHDKDRGFKKLPHLLDSMKQFLIDNFDFLQCTEPVSENQRCNKCIACKRVNKLYHPSQIEIYPPAKSKYYEDLGKELSLLGSPKTGAFKNPMAMRALFELRKFINYLITTGQIDEGTRIVIELARELVDTNKRWAYETYQNKRKEENKEFALAILELLNDKEAKGSLVNPNSEDDIDKFRLWYEMIEDVEWYERKGKLAENTKITKTKKNRKGEDQEFEEFEEKTFERINKSLYFKLKKAKDNVVEKYKLWKEQEYRCIYTGATIKITDLFKENVIDFEHTLPRSQSFDNSLANRTVCFADYNRNVKKNQIPFDLPNYNEDVGKYQAIKPRLKKWEQKVKDLKLQVEFWKGQSKRASDIERKNYCIRQKHLWQFEMDYWENKVSRFTMEEINSGFKNSQLKDTQIISKYALHYLKTVFHNVNVQKGAITAEFRKIFGIQEIGTEKDRSKHSHHAKDAIILSLIPIPALREQILKTWYEIQEHELLLTSGSEKDKKVIKNQIDWLKQELERLKKQCNLPNVNAVIGKVDEQTLINNIARDKSLTPSGKRIRSRGKVVPAKDENGIIYKMDNAGNKIQRKYKDGNPVWKNDEFGKPLLDKSGNQIPAYETKEWWAMGDSIRGQLHLDTFYGKIKLVKRGKDGKVEKDDKGEFKFVEDNNGLACVLRKEVTKDLKVDKIVDPHLKAIIEKQMKGRIIATTLNEDGGLWMLKKDGTRAHKIRHIRCFADDVSDPIGFKRHTLQGKHEHKNFYWAKNGENIICALYQKTIKDKKGNEKVDRELEIVSLKDAADLLALGLVDNERQIEIYRKEKNSKNNIKEMPYVLLKPGMK

SEQ ID NO: 9231 - protein, 1060 aa, unidentified
  REGION 1..1060: note = Description of Unknown: Cas Enzyme sequence
QAEAALNDHTRRPYILGLDIGVASVGWSRIECDPDDNFRPVRLLAAGAHIFEPGTEGSQADIAKGKDVARNQQRRTARLTRRQTWRRARRKQQLLRLLIAHDLMPAPGTSIKRPEEIDTYLKAFDADLRTRWLTEGRHLDELRLAYLVRAAAAEREIGRHDFGRALYHLAQRRGFLSNRRADARKKDGDDDRSVVKAAINGLQERIDAHTPPLLGAYLASLDPQQEKVRRQWTSRKMYTDEFDALWFKQAEHHALADDARDAIRKSIFSQRPLKSQKNLIGRCSLIPTEPRAPIAHRLYQRFRVLQTVNNLQVVPPDGSPKALKSDERATLLALLLERGDLTFDKARKALKLPRGTVFNLESGEEKRIVGHRTDAKLRDVFLKHFDAFSPADQDRMVEDLRSFRLPEALERRGRKRWNLSAFDPLAFSNITLEEGYAPLSLAAIERLLPDLERGVPYGTARRAAFPESFATQEPVAELPPVLEAVSDLRNPAVTRSLTEIRKLVNEAVRRFGKPHTIRVELARELKNPRGVRERITRQMRDREKERSIVAARIIKEAGIAIPRRDDIERVLLAEECGWHCPYTNKSFGMAELLGPTPQYDVEHIWPRSRSLDDSFLNKTLCYHDENRSRKRGRTPFEAYGGNAELWSDMMRRVERFKGDPYARLEKLRRFKADQIDTDFSNRHLSDTRYIGRAAADYLGLLYGGRDDATGTKRVQVCTGGLTAWLRTGWGVSDLLGEDGEKNRADHRHHAVDAVVVALSDTRSVQLLSSAAAVADHRWARRAFDHVDEPWPGFRDEVAKAIDGIVVSHRQSRKVSGPLHDQTIYSPPIDGKPRVRKELHKLSVSEIRDGKIVDKRALKAIRDKLEAAGKSVPTPRDIQQLFGLEENLPEVRGHDGQMVKLRKVRVLADPGQTCIGKPGFERHINTASNHHTVIFAELDAAGKDKKWLDEPVPLLEAYRRQAANERIVRRELGADKRFVLSLAPGEYLEMDTPGDATKRAVYRVCSISEGDMELRLHHDARTADEVKKAKARVRVSADRLRKLRAKKILVTYLGELRNAGG

SEQ ID NO: 9232 - protein, 1117 aa, unidentified
  REGION 1..1117: note = Description of Unknown: Cas Enzyme sequence
MQLEKLPYTLGLDIGIASVGWCVLGENRIIDLGVRCFDKAETAKEGDSLNLVRRSARLMRRRLRRRAWRLTKLTRLLKRHGVIDDIRFFQPQHPFQHSLWQLRAEGLNRLLNVEEWARVIYHLCKHRGFHWISRAEEKQAEADSKGEGGKVKKGLADTKKRMEEKGYRSTAEMVLAEFPDAQRNKQGDYGKALSRALLGDELALLFRRQREFGNSQATVQLETAILGSGDRKSGLFWEQKPPLAGSDLLKMLGKCTFEKEEYRAPKASFTAERHVWLTRLNNLRIVVDGATRGLNETERRTTLPLPYKQAGDFTYKQLRAALVKAGLLPDAFKFAGLSYPTATQQAEGKAKDPESEKLVRFPAWQELRKTLKDKGLEIEWESMAGAATGGNPDVLDSIAWVLSVFKDDEEVAAELRRLTLPGGETMIDAMLDIRFDKFHSLSLKALRKIVPHMETGLRYDEACAEAGYHHSQLRKAGEGKHKTLPPLYAGRDKDGRMVFNENLDVPRNPVVLRALNQARKVLNALVRLYGSPTAVHIEMARDLSRPLDERNKVKKAQDEYRERNDKDKAAFEAEFNMQAKSREFEKFQLYREQQGKCAYSLEPLDLHRVLHDIGYAEVDHALPYSRSYDDSKNNKVLVLARENRNKGNSTPYEYLDGAKDSERWRQFAIYVESNKSYRLAKRSRLLRRDFAGKAAEEFRERNLNDTRYICRFFKNYVEDYLKLAEGSEAKRCVVLSGQMTAFLRARWGLVKLRGESDRHHALDAAVVAACSHGMVKRLSDYARRRELEKVREGFVDVETGEIVNPAMFQQLHEHFPDPWPHFRNELDARLHLDDPSELRARIAALATYPQEALESLRPLFVSRAPQRRNSGAAHKDTIYAQPARLKAEGSVTQKVPLTSLTLNDLGKLIDPHRNEKLYAAIRTRLAAHGDKGEKAFPSNDPLRKPDRDGNATGPVVRAVTVVIDKLSGIPVRGGIAKNDSMLRVDVFRHKKDGKFHLVPIYVHHTIAKELPNRAVVAFKDEKDWTLIDEGFDFCYSLHPNDLVRITLKNETHLGYYASCNRSTGAINLWAHDRNRRVGKEGFIEGIGVKTAIAVEKYHVDTLGNIYPAPTEKRGGLA

SEQ ID NO: 9233 - protein, 1105 aa, unidentified
  REGION 1..1105: note = Description of Unknown: Cas Enzyme sequence
MISKPVVLGLDIGIASVGWAVLAQDHIVNLGVRAFDKAETAKEGESLNLARRMARLMRRRLRRRAWRQIKLARLLKREGLITETGAVQTPSPISPWRLRVDGLERQLSPQEWARVIYHLTKHRGFHWISRAEAKKADEDAKGEGGKVKKGLAGTQRRMRDKGYRTAAEMVLAEFPEAQRNKAGDYSKALSRVLLADELALLFQRQRELGNPYASAALQAQILGNGDQKTGLFWLQKPPLSGDNLLKMLGRCTFEKTEYRAPKASFTVERHVWLTRLNNLRIITDGETRGLNDAERQMALPLPYQRAGDFKHEHLRTALTKAGLWDERVRFAHFSYAQSADGKTKDPESSILVKLPAWQELRKTLKDKGLETEWHSMAGVAQAGQPEQLDAIAWVLSVYKDDTEIERELAKLNLPGGRAMIDALLDISFDKFSNLSLKALRKIVPHMERGLRYDEACVLAGYHHSQLHESGAGEHKYLPPLYSGRDKDGRMVFDEDMDVPRNPVVLRALNQARKVVNALVREYGSPHAVHIEMARDLSKPFDERRKIEKEQHEYRDRNEEDKARFVEHFGQPPKGQEFEKWRLYREQQGKCAYSIETINLDRLLEPGYVEIDHALPYSRSFDDSKNNKVLVLAKENRDKGNRTPYEYLGGTENSPRWQRFIAFVEGNKAYRLAKRSRLLRKHFGEEEAKGFRERNLNDTRYVCKFFKNYVERYLKLAEDSESKRCVVLSGQLTAFLRARWGLLKIREESDRHHALDAVIVAACSHGMVKRLSDYARRKELESVREGFIDMETGEIVNVAKYHQLKAHFPDPWTGFRHELEARLKQDDPEKLRTAVENMGTYSAEELAELKPLFVSRAPQRRNGGAAHKETIYAQPESLKAQGGVTQKVALSSLKLADLDKLIDPHRNEKLYAAIRARLEAHGGKGDKAFPPDNPLRKPDRDGNPTGPVVRTVTMVIDKLSGIPVRGGIAKNDTMLRVDVFTKAGKFHLVPVYVHHKVKGLPNRAIVAFKDEADWTLIDDTFAFCFSLHANDLVLVRLRNETVQGYFTSCDRSTGNIGLWAHDRNQSVGKEGFIRTGVKTALTLEKFHVDILGNIYLAPPEQRRELA

SEQ ID NO: 9234 - protein, 1064 aa, unidentified
  REGION 1..1064: note = Description of Unknown: Cas Enzyme sequence
MARIFGFDIGTTSIGSAVIDYDPIRESGEILRLGVRIFPEARDADGTPLNQTRRTKRTMRRRLRRRRQRRRALNEALFDAGLLPAYGTTEWQAVMATEPLTLRSRGLSESLEGHELGRALYHLAKRRHFKGRDLAEADSEEAADEKEARRDAESTIGKLSASGETLGEMLYKKTSPDDKGVRRQMLAGNGLHERSRRVHVNRSVVASEFDRLWTAQTAFNAPLHAPRFRARIEDLIFAQRPVFWRKNTLGQCRFMPGEALCPKGVWLSQQRRMLEKLNNLALLDGNARPLDQKERAAILEKLQFQASMSWQGVRGALRPIFKARGEPGREKSVRFNLEEGGDPKLLGNVVEAKLATIFASGWPNHPYRQAIRDAVHERLWAADYRQIGEHRVVILFETERKRRRAEAAQSFIADFGITEDQAAVLGNMSLPTGWEPYSTAALLQFLPHLESGLRFGALVNGPEWENWREKTFPKREQATGEVLDRLPSPAVLDEQRRIATLRNPTVIRTLNELRKVVNNLIGLYGKPDLIRIELARQVGKSKREREDMQTGIKKRERDRAKAEADLRLKDITQPKRSDIEKWLLWKECGEFDPYSGKPISFDALFGTGDFDVEHIWPRWVSFDDSFANKTLCLKSLNLQKGNRTPFEAFGSGPEWEHMNARVWALVKDGKMKLGKAKRFCREEPLDDDFKSRQLNDTGFAARQAVAFLKRLWPDLGIAAPVTVQAVTGRVTAQLRRIWGLNNILSDDGEKTRADHRHHAIDALVVACAHPGVTQKLSNYWQTVDASTAQRPRLDPPWKRIRADAEWAIKAIVVSHRTRRKVSGPLHQEMPLGYRNRNTIKNGIEYGVFAKRIPVESLSLAALKAESLEDLSRTAPFLVSDDQIRRVLLAHVEAANVQSVKAYPPYPRVSPQGPEIRKARVLALRQKTLMVPASTGFADPANNHHIAIFRLPNGKFDFDPVTLYLATRRMSRCEPVVRRDRDGGGVFVMSLAAGDTVQFTKEKGKPPTLWRVQKIASKGQISLLDVSDASPQEPSLFEPTVSGIMSRNAIKVSVDPIGRIRPAND

SEQ ID NO: 9235 - protein, 1085 aa, unidentified
  REGION 1..1085: note = Description of Unknown: Cas Enzyme sequence
MERKDKGGQSRLSFGAFFCLLIVAFKLKKLNSLSDICSRILVYKWNFFKKTGKYMKYRLGLDLGTNSIGWVILKLIDGKPTAIIKSGVRIFPDGRKDKDKTSLAVSRRLARQTRRMRDRYLKRQKRLMNHLIEFGFMPKTESKRKSLQQLDPYKIRKKGLDHLLKPEELGRAIIHLSKRRGFKSNRKIDNSASKSGMVKSSIDKTRLSIEEKGCRTYGEWLYQRRKSGEGVLARTVGDGVKEEYEVYADRALIEDELIALWDAQKRFKNPYCTDLAFRAIRNTIFFQRDLLPVLPGKCTFETEQLRAPWADIRAQQFRIFQELNHLRVIDQDYNSRPLGLEERNKIAEALSKGGDKTFDKIAQLIELPETSRLRGAETRGHLKGNETAKILSKTGHFGKAWHKMTEAQQIDIVNELLTNESEISIINYLKKHTNISEEAATKIANCRLPEGYSNLSLLVIEKILPKLKQQVITQYEAAFQAGYTNNNFDCEKIFDQLPYYGQILERYTGTPNENSSNSDEAKYGRIANPTVHIALNELRKIINAIIVKYGHPHEIVIEVVRDLKNSAKVREQISKKNKENKKTNERYAKELEPLGLRNNYKNRERLILWEELAVSPQDRKCPFTGQQISIAKLFSPEVEVEHLIPFSRCLDNNLVNKTLAMRKANRDKGNLTPYEAFGQSTNGYSWDHILDRADKLPPHKRERFAPDAAEKFANQEKWLDRQLNDTAYISKIARQYLTAICHKNSVRVVPGKLTSLLRNALGLNCLIGDTAQKERHDHRHHAIDALVVGLVDRSLLQKASKHAKYAREQGFKKILQDMPPPWENFLEQASDSIKRIVTSHKPDHGVEASLHNDTAYGLVEKPNEKGISKVVHRKSLAKELKKTDLPRIRNRKLAQSIKEYTDQSQLTFNAAVKEFSQANKIYRCRVVESLTVIPIKDQDGFEYKYYKGDGNYCYEIFENEKGQWSGRIISTFEANQHAYKKFLANTKVSRKYSFCGKKLIMRLCGDDIIALNDPTRKILRVVNITEGAITLASINESNVSARNKDTDDPFKLFAKAPSGLQKLRARRVFIDPIGNIKDPEFNNES

SEQ ID NO: 9236 - protein, 1099 aa, unidentified
  REGION 1..1099: note = Description of Unknown: Cas Enzyme sequence
MSVKASASLTIGLDIGIASVGWAVLAPDRIVALGVRAFDKAETAKDGDSLNLVRRTARLTRRRLHRRAWRLRKLARLLKRQGVVDDPQLFQPQHPFPHSIWRLRVEGLDRQLNAEEWARVLYHLCKHRGFHWTSRAEEKQADADSKSEGGRVKQGLAGTAKLMQEKRYRSAAEMVLAEFPDAQRNKQGDYGKALARILLGDEIALLFKQQRELGNPHTGQQIEAAILGNGDRKTGLFWEQKPALAGNDLLKMLGKCTFERKEYRAPKASFTAERHVWLTRLNNLRVVIDGRTSALNEQERRVALPLPYQQAGDFTYKQLGSALVKAGFFEPDGFRFTGLSYPSEKQKAEGNPKDPEKAALVKLPAWQEIRSTLKKAGLETEWQGMAGAATSGSPELLDQVAWVLSVYKDDDEVTAELIKLNLPGADKMLDALLDIRFDKFHALSIKALRRIVPPMEAGLRYDEACEQAGYHHSQIHKAGEGAHQYLPPLYSGRDKAGRMVFSEEMDIPRNPVVLRALNQARKVVNAIVRQYGSPGAVHIEMARDLSKPFDERKQIERDQTEYREQNDKDRARFTEHFGRPPKGVEFEKWRLYREQQGKCAYSVEPIDISRLLEPGYVEVDHALPYSRSFDDSKNNKVLALVRENRNKGNRTPYEYLGGAEDSDRWRQFVAFVESTKAYRLAKRSRLLRKDFGNKESEEFKDRNLIDTRYICRFFKNYVERFLKLAEDSQAKRCVVVSGQLTSFLRARWGLIKLRADSDRHHALDAAVVAACSHSMVKRLSDYARRKELDQVCDGFVDVQTGEIVNPAMFQKLQEHFPDPWPNFHHELKARLKIDDIALLRTEMERLGSYPTEALATLQPVFVSRAVARRGGGEIHKAKIFSIKHSIANKAVEKVPLSDLTLAKLEKMIGKNDPRNEALFKALHVRLSNFGDNPKKAFGPQQPKMLKPTKDGKNAPQIHAIRIEVTQNSGLLVRGGIADIGGMICVDVFRQGGRFNVIPRYQASPSKMRGTAAETRDSGFCFSLTKNDLVEIVMDGKTIRGYFVMYENDGRMTLRGHDQSQPDKNYFRKSVATATHIAKFHVDVLGKTYPTRPEERRGLA

SEQ ID NO: 9237 - protein, 1426 aa, unidentified
  REGION 1..1426: note = Description of Unknown: Cas Enzyme sequence
TIQINVMEKTLGLDLGTNSIGWALRDINADDNQITDKGVITFDKGVGEEKGIEVPLVKARTAARSKRRNYQAEKYRKWALVKCLIEKGMCPLLESELYWWKRYQKDNNGVQQGRKYPESKKFRQWLQYDFNGDGKPDYQEYGYSIHENIYLFRVLAISENEEHKKIFKDNPEILGRVFYHLVQRRGFKGRVEDDKETQTILLGSKEANTPGVNELIPFIEKYKTLGAALYYINKNEGYRIRKRYNRRQDFEKELFEICRVQGIPETVQHELWKAIIWQRPLRSQKGLVGYCTFERPQKNEKGQYIKGGKTRCPISHPLYQEYRTWQLISNLKIVVPDDIDKVAFLTDKVYPLFIRDSEVEFVKIKKEIEKVGGIVRAKFDDETRFPTNDFLYRIKEIYGENWRIILKWEETLTNKPKSGKYHRVEDLWHEIYHFIHLKSTTPATFYDAIANKLHFDDKQIKSFKKLKLDQGYASLSISAITKILPYLQKGLLYSEAVFLANLNKIFATELTPETKTEILSAFRLLSISFNENKLRLGIVNSLISDQLNSSTRFGMNSDYALDDDDINDIKLKIEDTIGVQNWNKKEDIEKVKLLDFIAEKYLIFLQKPVNYDANKSFYKIKRFDQILKEYLVEKYDFSIEHLNKNLWHPSEIEKYDPAPSSKKVPNIKILGDPNPVGKGFKNPMAMKTLHRLRNLINYLLESGKIDSDTRIVVELARELNDANRRKAIQNWQKRREDENKELAKGIINTAKVKYPDLDENDPLIADRARLWYEQIENSDEIMRQAKALKDDLLKVKLWKEQNCRCIYTGRIISISNLFNGTEVDIEHTIPAKISWSSEQWNLTICDSKFNREIKRKKIPADLINYETTSEFDKDGANILKRIEPWAIKLKSLNASLQKNINQTKGSNYMDKNAKDEILIKRRMLQMDIEYWNKKIETFTKLEYLGGFRRQQLTDTQIASKYAFHYLKTVFNRVEIQKGITTSTFRKIFKIQNKKELKDRTKHSHHAIDAAVLTLIPPSSIRTKMLDEYNNALDMNQSYHKNPIGWDNFKASYLLNLEETILINYQKKDTTLLQTKKKMRIGGKVQFIYETTSDGNKIIKRDTAGKPLPKIAKGYGIRGQIHNETIYGAIKIKNINGKIEQNAKSLINSPNTYVKRIHLDVDPVFGFKKKDTDESFIKQFEEIVDPVLRNLIVNIVTDRLRRNIPQKEIFKSPIYMPCKNPNIQNTIRHVRVKVDSVPMEIKIHENASLSNKKYKHYKYADNATNAILCCYLPINKYSVSKCFFRVYTLMDLANNSFTKIETQNGEEFKLFWTIKPGQHLLLKEYEEEDLKLLLKEDLYNFSNRLYKIETVSPQFSKGYLYHYTELKYHIEARADKKDKLPKRSGKINFKNALENPLLRLNVANTHFLVQGKDFKLAPDGEIVWLND

SEQ ID NO: 9238 - protein, 1127 aa, unidentified
  REGION 1..1127: note = Description of Unknown: Cas Enzyme sequence
MSKPNPKLTLSFDIGHSSIGWAILSPTRPHPEILGCGSVMFPKNDCLASARRTHRRARRNIRSKRQRISRIKKLLCHLGIATELDLDAPGHPAPHVLAASSLLAPEATLSWLEIWHVLRWYAHNRGYDGNARWARHSENEEDTEKEIAAKKLMLDHGTNTMAETICAELGIHPTKSKNISSARPFKNYNAAFPRAIIRAEVVALLEKHKGHLTRLDDDFIECLIQQTKDSDNSGWQRIPVPNLTLPKRYQGGLLFGQLVPRFDNRIITICPISGQKVPNKDSKEFLEYRWAMLLANIRAEGKPLSPEQRQSIHNLMVQKGKLTPTDLRLAIEKITGTKNNNIKLSFEIHPDSKDALELDPSTAYFQKAFELPAKKGGFGLHLFWPHLPEPARNRGLGRWRKGRPVNLAWMLDQCSKENFDVKPLQNAVHAALAEDEKKKKPSFLTLDHLLNRPFIPETPTGRAPYARPVLQEVVNFVLTTNRHPTEVGGPIYRSPEVLQKERSRSIFDLTNNHLIRQRLTILLRLTDDILKQYAENQPSRITDIVIEVARDLQQYSGLTSKEMASALTKRLTHFKAAVKYLESNAPDLPLTGSLIRKCRIAMDLDWTCPFTGKRYDPYTLSQLEREHIIPYADRPTNALDAQVLTFDWVNKLKAKRTALRFIQDISEDNRFLSPKKYRDFVDALKVAKKETYPEDNHRQMARKKWLLLETYEAKEQGFTEGALTQTSHLNRLAARRLERRFIDPITGDCTAEIHALPGQVTAEARKAWKLLGTLVPACQECKDKTKTEIREITHLHHALDASTIGLIAHYLPGNVPSQHKNEKGSIWKAMLQRHKTSDEIFLLMQTGIFQRSERLDQKGEVRRDAKLVDLPDKLKKQIINRLSECRVVQHIPSDRSGALLEQNPWRVRFTSATHAIITQVSGEGASDASISKSFNPQSGAVVRQRNKQMTAENLKEVEELVTECGRAKFRKHELNLLNKGVFKIKKVRHSRLVGLQRGKLAKNNSVLIISENYGLALGNSPQLIPHHSVPEKLARILEINGNKFPDILRIGTLIHVPRGTWQGTWRITSLKDSQAYGLSVDLAAPDGCKMTRGNAKVPDMLNDGLKILRPPLTGTDLTQIRPHAPTQ

SEQ ID NO: 9239 - protein, 1283 aa, unidentified
  REGION 1..1283: note = Description of Unknown: Cas Enzyme sequence
MGNNKESNIWAFDLGLGSIGEAVRVGTEFKHVASLLIPPEFAETKTAAGRRRMMRTRLAHKAREDWLDVVWREAGLEPLQKRRSYQDPVSKKWIPEKCQKGDARLEREFAGEGDDTCYTSCLLRIKLLRGEKLEPWQIYKALHSAIQKRGYDKDIPWKRAEAKRAGIKFEDLEKEEARAEAELAKKDPAYQAALGAWKKFKSEIPEPYHFPCYYDAWKMGLWNEAKPFELKSQIDHNADSTRNVRFDRPDVTEEIHALATAAGEQIPSLKGKADYLLFGPAGEPYASHDAGLRKQHKLHLGSKDDWQGVLGQKIPRFDNRILAPCALIPRMHVCRVMPKFKKAEPQTKRELETKSLLPAEVIFLMQAKNLQVDDKNTGVVRFLETGEIQELLDKATTDVLDAVRDEKTEAQILECYKITVSEWKHWCADKNFRYLNDAQGTKTKNPAIDEEKNEGGKTTDIVKAPRPSGRSRFSRPALSILRHVLLNASPELPPDKIIEKLHKDDLELFDLLGLDVLEKEPLLNGKKGVYEKRPRTWILVSDLVFLPFIWKQRLDDDKTPLSYSPNQIRIPDLALRFLRRKHEITNKPFSEILRDKDPEVNRRAKAILELIGEQNNPIVRDRLTRFWQRLLHFNNPVVNPDTKKQKPGLGLDDPECLVLEFVRDDEDNSLDGKARKGAIKDAIDNNTKERERIRKLLEDGNLPTSDDHILRRRLWEDQGCQCIYTGKGIGCTNYQNFELEHIIPRSKGGPDAYWNWVLADPEANAEKDSRTPYQWFHDEKADSEWVDYKNRVLNLKGKLGSRKADLLLSADAVELVGEKYTALADTAWISRLAQSIARLHFGWPLDDDQGKERVITISGGLTARIRRKYLLDSLLGPANRSGEHSEDDPDPAVVRNRIDEALQELETLKSKHPTTDPELSEVKEERRELLQTLRDLAAQSNKNRKDKRHHALDAMLLTFLPNWARDKNKEDFFRLEEIGDNTIYSEEGSRRKEAHRERIGKLYNENEAVFSQIREAKKEGNDAKMERLKKSILPARKEMAVLYQSIDKQKQPRNIKAVREWFKNQLATANFGNKVLPQNIARSRPKIEKTIYADRYVIQSAKQQKSVALCNFGLRPEFHDESISIFDARYLRTQLQAIIGIKGSKEKEALKKLKRLLHGKVSSEFPLETAQWITFCEQSEVLSHFPKMGKNKTLPTTAECLLDLHKIAIWATSRPPGHTGLINLAYKDGTSLVLDMEELGLKVPKFAKRIERPKKSKFKKETKPSLVLICLEDQCEKWPGFVF

SEQ ID NO: 9240 - protein, 1082 aa, unidentified
  REGION 1..1082: note = Description of Unknown: Cas Enzyme sequence
MDIHENRVLGIDLGIASCGWALIETDDAGVGLIVAMGSRTWDAPETNKERTPTNQLRRGHRGMRRVLKRRRQRMSEIRRLFRDQSLIEVQGPTGLRIAQLDPWTLRAEGLERRLTGPELAVALGHIAKHRGFKSNKKSDKGANAADDSSKMLKAIGETRGRLARYRTVGEMFARDEMYAGRKRNRDGQFTHSVLRDDQAREVALLFDVQRRIGNPQASSELETAFTQAAFFQRPLQDSEHLLGPCPFEPTEKRCAKRAPSFERFRLLSRLRALTLGEGREERPLTPDQINQAEGDFGLSKSFTFKALRKRLGLLDETSFGGVARADEGRDFVARTGNAAEGTASLRGLIVDGAGDNAWRSLQNTPEKLDAVASAVTFREDIDSIEKGLTQIGLEPAVLTALMAGIDDGRPLKAFSGAAHISAKAARAMLPHLRQGLTYDKAAAAAGYVHTDRAAPGAAEGSLHQRMVHDIRWVDANVSNPVARKAVIEAVKQVHAVVGAYGLPGAIHVELAREVGKSKEERDEIKSGIDKRNAAKDRLRDQFKEVCGRESSSAEDLLRFELWTEQGGRCLYSDRAIAPHQIVASDNSVQVDHILPWSRSGDDSFVNKTLCFAAANQNKRGATPFEWFGDAAARWETYRGVVESIKSMKGRKKRNYLLKDASVLTEKFRPRNLNDTKYATRLVLDLLARLYPESDRFTGVPRKPEEARRKRRLFSRPGALTDRLRRAWGLQGLKKGEDGKRISDDRHHALDALIVACMSEGALNQLTRAAQVEEERGSSRFIADFPAPWPGFRDEAHDRLREVFVSRAERRRARGEGHAQTVRRVEDSTDGQVVYERKRVDDKFKREDLARIKDPDRNAALIAELTRWLDAGRPKDAPPVKRFGGRNADGIEKEPERFEPITKVRLATTNKVDVLVRDGVAERGKMVRVDVFRKKNKRDAWEYYLVPIYPHQVFDAEDWPEPPMRAILPAKPESDWPDVRVGYEFLWSVYSQSFIELEKADGTFIDGYFRGVDRSTSAFNVSAHYSKEQLLRGIGPRSLKFLRKYAIDRLGNRTEILREKRTWRGAVRGGSGNLDTGLSGISA

SEQ ID NO: 9241 - protein, 1126 aa, unidentified
  REGION 1..1126: note = Description of Unknown: Cas Enzyme sequence
MISKPVVLGLDIGIASVGWAVLAQDHIVNLGVRAFDKAETAKEGESLNLARRMARLMRRRLRRRAWRQIKLARLLKREGLITETGAVQTPSPISPWRLRVDGLERQLSPQEWARVIYHLTKHRGFHWISRAEAKKADEDAKGEGGKVKKGLAGTQRRMRDKGYRTAAEMVLAEFPEAQRNKAGDYSKALSRVLLADELALLFQRQRELGNPYASAALQAQILGDGDQKTGLFWLQKPPLSGDNLLKMLGRCTFEKTEYRAPKASFTVERHVWLTRLNNLRIITDGETRGLNDAERQMALPLPYQRAGDFKHEHLRTALTKAGLWDERVRFAHFSYAQSADGKTKDPESSILVKLPAWQELRKTLKDKGLETEWHSMAGVAQAGQPEQLDAIAWVLSVYKDDTEIERELAKLNLPGGRAMIDALLDISFDKFSNLSLKALRKIVPHMERGLRYDEACALAGYHHSQLHESGAGEHKYLPPLYSGRDKDGRMVFDEDMDVPRNPVVLRALNQARKVVNALVREYGSPHAVHIEMARDLSKPFDERRKIEKEQHEYRDRNEEDKARFVEHFGQPPKGQEFEKWRLYREQQGKCAYSIETINLDRLLEPGYVEIDHALPYSRSFDDSKNNKVLVLAKENRDKGNRTPYEYLGGTENSPRWQRFIAFVEGNKAYRLAKRSRLLRKHFGEEEAKGFRERNLNDTRYVCKFFKNYVERYLKLAEDSESKRCVVLSGQLTAFLRARWGLLKIREESDRHHALDAVIVAACSHGMVKRLSDYARRKELESVREGFIDMETGEIVNVAKYHQLKAHFPDPWTGFRHELEARLKQDDPEKLRTAVEDMGTYSAEELAELKPLFVSRAPQRRNGGAAHKETIYAQPESLKAQGGVTQKVALSSLKLADLDKLIDPHRNEKLYAAIRARLEAHGGKGDKAFPPDNPLRKPDRDGNPTGPVVRTVTMVIDKLSGIPVRGGIAKNDTMLRVDVFTKAGKFHLVPVYVHHKVKGLPNRAIVAFKDEADWTLIDDTFAFCFSLHANDLVRVTQRSGERVMGYYRGCHSGTGAINIALHDRFAHGDKTTSLAFSRKNPDKPIPNDKLGLVEGIGVKLAATLEKFHVDILGNIYLAPPEQRRELA

SEQ ID NO: 9242 - protein, 1118 aa, unidentified
  REGION 1..1118: note = Description of Unknown: Cas Enzyme sequence
RTMRRQIARRARRKRLLKKALIETGLFPSDAAEQERLLQADPYELRTRALDGPLTLHEIGRVLLHLNQRRGFKSKNKEEAKAESQAKRKGSKKDQKPKPDAEKKTEDMLLEMRELEQAVRKDDARTIGEYLHRKNDRFNHMERKDDDHVRGRHILRKMLMDEFDLIWAEQSKHHPSALSDQLAYGKLGRPKDIQRPLPKSQEFLDRNHSIRNPRYGMSDLEAFGLFGLIFFHRTLKPVPNEAIGLCELEPKERRCPRADRRAQRFRLLQEVNNLRYIDPDRLEERELDKDQRDKIVAYLSTREKATFEDLRKLLGLDEAHRFNLERGQRSSIKGMVVDWLMAKAVGKEWHGLPEEVKTGVVYALNNSVDDDETFQRLTTEFNLDAAQANAALTVDLPEGYLNLSLKAINRLLPYMEQGLIYEHKDPAKSARAAAGYDDPWALRRRIFDKLPDPARTKDCPIGDIPNPVVKRTLVELRKLINAILTEHRRVTGNPKWRPDAVHVEMGRDVRSRPKDSSSPAYWRYKQEEDERKEREAKREHAKEELRKNNIPFGSNGRNILKYLLWEEQGRECIYSYPARAISFAQLFTEEIEIDHILPRSQSLDNSQMNLVVCFREENHPIRGKGQQTPRQWLESSHIDKYKDVCRRAKKLFPYPKYKRFLQKEAKLDDFIARQLNDTRYIAKATAEYLRCLFDDDENKTGVVLGLKGQLTSTLRRQWGLNTILSELPDSPAWRQGGTLHDGEKNRADHRHHAIDAIVLALTDRSRLQKLAKGFEVVEWIDQETGEAKYHEAYRGNEILEPWKSFREDVRTLIRDIKVSHRAERKVAGKLHDDNPFGPTKEPGRFVKRKAIESLSPSEVENICDGGIKKIVTEALSAAGIEFGRGKKPDAKAMKKALSGLRMPKKEKDASGKTITKPAAGPPIRRVRLWVTSDAIGRIREGTPHEVCVNPGSTHHLALFEWQENGKTKRGSVFVTMLAAMERVKAQQQEFERLLREHEKRTGKALTKRDPRYRDFQKQASKAAPLIERIPPKDHPTIPADAKFLFSLSAGEMVLANYKGEEKLLVFRTAASTQGQIYFVEHTDARRGKSQKPFVFTANTLNARKVTVDPIGRVRWAND

SEQ ID NO: 9243 - protein, 1154 aa, unidentified
  REGION 1..1154: note = Description of Unknown: Cas Enzyme sequence
KASNLSPKDQRFRATYQLFSDLSDQEFYTKYPTIYHLRWALMTEHRKFDLREIYLAVHHIVKYRGNFLRKGNPEKFKPSDLNFGKQFAAINESWRAIFHELAPQLPKDNLNEIETLVLDTSRSRLDRQRKLVKLLMAATDEHQAWKPYLTEVAKAILGLKTKLFLLTGNEVAKADEKTWTFSLNDIEDHRADLEAAFDDTSLVLIEKLVDLQAAVQLTEIMPSGQYFSQSMVQSYETHAKHLQWLKDYAKQQTDDKKKQAIRLAYDHYVTVNEKGKAETAADFYKDLNKVLKGDSSELATKISREIDLEHFMPKQRTKGNGVIPYQVHQQELDLIINNQKEYYSFLGTKNPVTAHLKTQRYQLDELVSFRVPYYVGPMVTASDQTTEGKFSWMVRKDTEDTGEITPWNFDDKVDRTASATNFIQRMKTTDTYLIGEDVLPLQSLTYQRFMVLNELNNVRVNEALLSRDQKQRIYNQVFKGHGTVSVKALQDNLIDNSDVATTPKIEGLADPKHFNSALTTYRDFRKFLPKDIDREDRRADIEKIINWSTIFEDAEIFKAKLQEISWLTDNQRQRISNKRYRGWGRLSQRLLTEIKDEQGLSIMDQLWRTQHNFMQIVHEPDYAKAVEKVNAAGMAKQDVFDTINEMYTSPQNKKALRQILLVVRDIQKAHHGQAPSRIFIEAARGADQNPQRSRQRQKQLSDLFADRAKAIVDDTVVDELKSKIDDKAAFTDRLMLYFLQNGRDMYTGDRIDIDRLSMYDIDHILPQSLIKDDSLDNRVLVNQRINREKNDVFASELYANSMRGTWNVWRSAGMISARKLKHLLMRPDEIDKYATGFVNRQLVETRQVIKLVTDILSTEYDPRETKLISVKAGLSHQLRQELKLPKLRNLNDYHHAFDAFLAALIGTYLLKRYPKLERFFVFGQYKVVPQLNLRRFNFIHDLVAGKQDKIVNQETGEILWDRSKDIDYMKHLLSLKHLLVTHEVLENRGALFNQTIYKAKEDNSNVGGKRKLLPAKQNRPTEIYGGYSGQNIAYLAIVKVHEKTDYLKVMGVPIRCLTDLKAARQQGKQAEKDLLKKIFLPEFTKKSGKTTDFEMLDSHIYLHQRIRDVVYGKKHEFALGTNTYYRNLQQLVLPLGSQQVLLSPRSSSDELVKV

SEQ ID NO: 9244 - protein, 1330 aa, unidentified
  REGION 1..1330: note = Description of Unknown: Cas Enzyme sequence
MSRPYNIGLDIGTSSIGWSVVDDQSKLVSVRGKYGYGVRLYDEGQTAAERRSFRTTRRRLKRRKWRLGLLREIFEPYITPIDDTFFLRQKQSNLSPKDQRKLYPQTSLFNDRTDRAFYDDYPTIYHLRYKLMTEKRQFDIREIYLAMHHIVKYRGHFLNEAPVSSFKSSEINLVAHFDRLNTIFADLFSESGFQLETDKLAEVKALLLDNQQSASNRQRQALSLIYTPSTNKAVEKQNKAIATELLKAILGLKAKFNVLTGIEAEDVKAWTLTFNAENFDEEMVKLESSLDDNAHQIIESLQELYSGVLLAGIVPENQSLSQAMITKYDDHQKHLKMLKAVREALAPGDRQRLKQAYDQYVDGQENTKAYSKEDFYGDITKALKNNPDHPIVSEIKKLIELDQFMPKQRTKDNGAIPHQLHQQELDRIIENQQQYYPWLAELNPNSKRQTVAKYKLDELVAFRVPYYVGPLITAEQQRQSSDAKFAWMIRKAEGRITPWNFDDKVDRQASANEFIKRMTTTDTYLLAEDVLPKQSLIYQRFEVLNELNGLKIDDQPITTELKQAIFTDLFMQKISVTVKNIQDYLVSEKRYASRPAITGLSDENKFNSRLSTYHDLKTIVGDAVDDVDKQADLEKCIEWSTIFEDGKIYSAKLNEIDWLTDQQRVQLAAKRYRGWGRLSAKLLTQIVNANGQRIMDLLWDTTDNFMRIVHSEDFDKLITEANQMMLAENDVQDVINDLYTSPQNKKALRQILLVVNDIQKAMKGQAPERILIEFAREDEVNPRLSVQRKRQVEQVYQNISNELLNNTEIRNELKDLSNSALSNTRLFLYFMQGGRDMYTGDSLNIDRLSTYDIDHILPQSFIKDNSLDNRVLVSQKMNRSKADQVPTDFTSVELGQKMQIQWEQMLRAGLITKKKYDNLTLNPDHISKYAMKGFINRQLVETRQVIKLATNLLMEQYGEDNIELITVKSGLTHQMRTEFDFPKNRNLNNHHHAFDAYLTAFVGLYLLKRYPKLKPYFVYGEYQKASQQDKWRNFNFLNGLKKDELVDENTEAVIWDKESGLAYLNKIYQFKKILVTREVHENSGALFNQTLYAAKDDKASGQGGKQLIPAKQDRPTALYGGYSGKTVAYMCIVRIKNKKGDLYKVCGVETSWLAQLKQLTDEDSQKAFLKQKISPQFTKVKKQKGTIVKVVEDFEVIAPHILINQRFFDNGQELTLGSATYKHNEQELILDKTAVKLLNGALPLTQSEELAEQVYDEILDQVMHYFPLYDTNQFRAKLSAGKAAFMKLPWKSIWDGNKMTQIGQQIILDRILIGLHANAAVSDLGVLKIS

SEQ ID NO: 9245 - protein, 1338 aa, unidentified
  REGION 1..1338: note = Description of Unknown: Cas Enzyme sequence
LFDEGKPAADRRAFRTTRRRLSRRRWRLKLLREIFDSYITPVDEAFFIRLKESNLSPKDSKKQYSGDILFNDRSDKDFYTKYPTIYHLRNALMTEHQRFDIREIYLAIHHIVKFRGHFLNATPANNFQVGKLDLDQKFEDLNDIYQRVFPDDSIEFRIDNLEQIKAVLLDSKRSRSDRQRSLVDDVYQTSEDKEVEKQNKAVATEVLKAILGNKAKLNIIANVEVDKEAAKEWTITFDSESIDDDLAKIDGQMTDDGRAIVEILRSLYSGITLSAIVPENHTLSQAMVAKYDLHKKHLTLLKKLINSMTDTKKAKNLRAAYDGYVDGVKGKVLTQDEFYKQIQSNLDESVEASEIQTYIDQDIFMPKQRTKANGSIPHQLQQQELDQIIENQKEYYPWLAELNPNPDKKRQQLAKYKLDELVTFRVPYYVGPMITAEAQKKQSGAEFAWMIRKESGNITPWNFDQKVDRMATANQFIKRMTTTDTYLLGEDVLPAQSLLYQRFEVLNELNKIRIDRKPISVELKQQIFNDLFKKFKNVTIKHLQDYLVAQGQYSKRPLIEGLADEKRFNSGLSTYNDFCGIFGAKLVDENDRQADLEKIIEWSTIFEDKKIYRAKLNDLAWLTDEQKDKLATKRYQGWGRLSSKLLIGLQNSEHRNIMDLLWIGNENFMQIQADSDFAKLIKDANQNALQNNDSQDVINDLYTSPQNKKAIRQILLVVHDIQNAMHGQAPTKIHVEFAKGEERNPRRSVQRQRQVEAAYEKASNELVGANVREELKDAITNKRDFKDRLFLYFMQGGVDMYSGEPINIDNLSRYDIDHILPQAFVKDDSLNNRVLTDAEKNRRKSDAVPNELFGAKMRVTWERMKEQGLISKGKYRNLTMNPENINKYTENGFINRQLVETRQVIKLAVNILADEYKENTQIISVKADLSHQMREDFELLKNRDVNDYHHAFDAYLAAFMGNYLLKRYPKLRSYFVYGDFKKFTQKEIKLRRFNFIYDLKHEDQVIDKETGEILWNKNEDIAYIRHLFAYKKILISHEVSERRGALYNQTVYKASDDKASGQGSKKLIPIKSDKPTEIYGGYTGRTLAYMTIVKVTKGKKISYKVVGVPTAVLAKMAGVRQGSQEEQDKLYGVLKPQFTHQKENKKTGEITETVDKFDIIVPKVKYQQLVNDNGQLFMIGSDTLPYNAEQLVLSKESVQTINNPGIKDEGSDEESENKKLDNVYDEIVLCMNKYFPLYDNRGFRNSITNGKNKFLKLPIKNIYKNGKLINVGKREVINRILQGLHANASVTDLSNLGIKSPFGFLQKGAGLSLSGEAQLIHQSATGLFEHRVQLNKIK

SEQ ID NO: 9246 - protein, 1385 aa, unidentified
  REGION 1..1385: note = Description of Unknown: Cas Enzyme sequence
MCLKGFTEQLYFKEFYRMKVNNYHIGLDIGTSSIGWVAMGEDGKPLRVKGKTAIGARLFREGKPAAERRMFRATRRRLNRRKWRLKLLDEIFDPYITSVDSTFLARLKQSNLSPKDLRKEFNGPMLFPDLTDKQYHLDYPTIYHLRHALMTQDKQFDIRMVYLALHHIVKYRGNFLNSTPVDSFKASKVNFDDQFKKLNELYTAINPEESFQINLANSEKIGQQFLDPSIRKFDKKKQISKIVPVTMDDKAVDKLNGKIASEIVNAILGYKSKLDVAVQCDPEDSKPWAVKFDDEDIDAKLQKILPEMDENQQSIIGIIQDLYSQVTLNQIVPNGMSLSESMIKKYNDHHDHLKLYKKLIGQISDSKKKTALKKAYDQYVGNDGKVIEQDDFYSSVKKNLDDSELSKQIMDLIDADKFMPKQRTSQNGVIPHQLHQRELDEIIEHQSKYYPWLAESNPNKHDLHLAKYKIEELVAFRIPYYVGPMITPEDQKKSGAAVFSWMKRKEPGQITPWNFDQKVDRMESANKFIKRMTTKDTYLIGEDVLPDESLLYEKFKVLNELNMVRVNGDSLKVADKQAIYQDLFENYKHISVKKMQNYIKDKTGLPNNPDISGLSDPDHFNNSLGTYNDFKKLFGDKVDDPDLQDDFEKIVEWSTVFEDKKILRAKLNEISWLSDKQKDDLESSRYQGWGRLSKKLLTGIVNDQGERIIDELWNTNKNFMQIQSDDDFAKRIHEANADQMKATDVEDVLADAYTSPQNKKAIRQVVKVVDDIQRAMGGVAPKFISIEFTRSEDRNPRRTISRERQLEDTLKDTAKTLVKSMNPDILSELDDASKSKKGLTDRLYLYFTQLGRDMYTGKPINIDEISNYDIDHILPQAFIKDDSLSNRVLVSKAVNNGKSANVPLKLFGVKMAHFWKQLAEAGLINKRKLKNLQTNPDTISKFAMHGFIRRQLVETSQVIKLVANILGDKYRNDDTKIIEITARMNHQMRDEFAFIKNREINDYHHAFDAYLTAFLGRYLYHRYIKLRPYFVYGDFKKFREDKVTMRNFNFLHDLTDDTQARIADTETGEVIWDRETSIKQLRDVYHFKFMLISQEVFSLNGMMFKQKLFPAKVAENSTLIPIKQGKPVNIYGGYSNNVDAYLSIVKIRGKRENKYKVVGVPMRSLHNLKLAEGIGHEAYINELKMVLTPQFTKDKKNRKTGQISRQVTDFEIIVGKLMYRQLVIDGQEKSLIASSVYQYNAKQLVLSDDSIKTISNAENWDEEILSTRYDQVYDEILQKCKQFLPIFQHRHFQERLEAGQPQFSQLSVRDLYKGAKMVRSGKKSIINSILRGIHANADRPDLDLFGIKNLGQFSSTSGINLSPNTIICYQSPTGLFERRVTLKDL

SEQ ID NO: 9247 - protein, 1026 aa, unidentified
  REGION 1..1026: note = Description of Unknown: Cas Enzyme sequence
MQKNYVLGIDLGSASVGTALLDFENQSIDFVGVRIFDAAMDGDTDTGKEESRAAARRVARGQRRQTDRRRGRFHRTFIALQKIGLMPLGNRSDVLPALQRRLEKRYPETNVLPYFLRARALDHALDTEELARVFYHLAQRRGFLSNRKIDKAPKKENEKLSDFKQELKDLTNALAQSGARSLGEYLNSLDPHQARFRNRHTSRAMYKDEFSLIWETQKKHHPGLLTMDARERLFRAIFHQRPLKDSSDKIGRCELVPSERRMPLWQPEAQLLRILGFVNNLRIDQGPGMPSLPLTTLQREQLLAFLQAHPRITFSEARKQLSLHESARFTIEIHGGEKHIPGNLTESRLREALPGIWTKLPIREQSAILTILDEGIPGDATDEAVRQWFASHYSWNESVLDRLVAVQLPDGYARFSLIAARKLLPHVQAGLSVTEAIQLAFPDHGKPQPPADLLAPVKSILPELSNPNVIRSLTELRKVVNAIIRRYGKPAEVHVELARELKKSKSERANAVKSNREREKLRELAISQLQAHDKVRFQNPSRRDIEKLLLAMQQNYRCLYTGVQFDIDGLLGDHPRFDVDHIVPYSRSLDDSFDNKALVSTDANREKGNRTIIEWLGKESEGFERVLDAAKKMDSRYKNRSKINRITIDMTHDKDLLAEFTQRQLVETRYASKLACRYLGTLFGNEVDESGKRRVFACSGQVTARLRDLWNLNSILSPEDFKKSRDDHRHHSIDAVAIAAASPRMVQLMALAAKERELRGQRRLILSPPWLGFQEQIADKIGALNVSLRPSRKLAGALHEASIYSAPRMVNGKEFVTIRKPIVDIANPDAIVDPTVRAAWIKKRDEISETSNFNPKLFEGNWPVMPNGVPIRRARIHKRESVVALSAGVKQRFVPTGSNHHAAVFEVKKKNGKLAYEVEVVSLLEANDRYRRKLDVVSRVTSQEKRFLFSISAGDIVWANNPGMPDIQLWRVRSMRSNGVMVVHDLRDARLKKDISLWQPTLSAAVAQGMRKVVISQLGEVLKAND

SEQ ID NO: 9248 - protein, 1039 aa, unidentified
  REGION 1..1039: note = Description of Unknown: Cas Enzyme sequence
MERKYRLGLDLGTNSIGWAMLELDAEERPSAIRRLGVRIFTDGRDPKSGQTLAADRTLIRGQRTRRDRATRRRNQLLLNLCRLGLLPQDTETARKLVTLDPYELRAAALERPLHPFHLGRALMHLAKRRGFQSNRRTPAREAEGNTKEAMRRLNELLAGQTLGQFLLAQIRSGFGARFRPSAESLGKPKKSFPVYPERAMYVAEFAAIRASQQPHQKLVSDDWEKLHRLIFFQRDLKVPERGRCRFVAGEARAPIALPSFQQFRLLSDANHLGFRASPFATLSFLSADQRAIVLALTRNQKSVGFGKLRAKLGLGEDARFNLESDKRDKLVGDPVAALLGAKGLFGPRWQELSLGVRDAIVTAILELEDREALRRVGESHGLAGERLEKFSDLSPDDLPRGTARFSAKALRSLVPQLETGMKYSEAVAACGWSDFANAEDGSEALLPYYGKAMPDSVLPSPKSKGKVKDEYLYGRFPNPTVHIALNQLRLVVNALIVRYGKPAEINLELARDLKMSRREKEDLSRQQTENTHNNAVRDKFIDDLNQAHGTSLVANYENRLRIRLWEELSKDVNARCCPYSGRRITPAKLFSDEFEVDHILPFGATCDDSPANKILCAREANRAKRKRSPHEAFGHSPGGYAYDSILSRASLLPGSKRWRFQADAMDKFRDEQGFQARQLTDTQHLGRAARRYLSCIVSPNRVRVSPGRITALIRHHLGLETILAPAGAAGRVGKNRDDHRHHAIDALVISLLDHRLLHSIRQANADEELNRIMVAPPWRDFRSETVHKLGEIIVSHRQDHNPAGRLHEDTAYGEILQDRARRRPNQLWEIDEGYNLAVRKPVAGLKSGDLERVRDVSLRQKLASTLAGLSESKKTEWASALSRFSSETGAKSLRLVTKDKSARRVIHGGGRFSRLLIPGDIHAIRFWMLPSGKTAATSMSVWDANLTSTAWTRPHPAARKLFQVSKGDILSTVHKGERKLVRVVRLQPSESNRNVVCVPAQSATEDGKFTIQFSRILATQTRLVFVSPIGDLLGPRSLI

SEQ ID NO: 9249 - protein, 1126 aa, unidentified
  REGION 1..1126: note = Description of Unknown: Cas Enzyme sequence
KNIMKEAWKAVSDGFPGLPKMTRGIKKAAPFRLQLDAPWGSACECFVFVAERLAGTDRLDFRQCTADLLHCQPIASKIMARVLGLDIGTNSIGWAIVEVDVENHPTALIAMGTRVFPEGVDRDTSGAEKSKNESRRIARGMRRQIARRARRRKAMRRALVEAELFPATSEEQIVLMQMDPYQLRNDALVRQLHTFEIGRILLHMAQRRGFLSNRKTDRGKSAENKGLLKEISELAAQIGEKTLGQFFHEQRESNPQERVRGNHTRRQMYMDELQRIWDFQSQFYPDLLTDALRFGHRGETNYPREPEPLRNRREKTLLQEFGLHGILFFQRSMYWPASIVGRCELEPSEKRCRRADRLAQRFRLLQEVNNLRIIPEFAEPRELRPEERSTVLKQLETSDKRSFDDLRSSLGLLRSDSFNLERGDRKNLQGLPIDHALANKKYFGKAWARLAEKTRNDIVRSLLDDEAEAVLNKAINEWGCTEELAVALCAFDPTDLVDGYTSYSQKAMEKLLPHLERGLRMMANDEKDSALHAAGYLRPDEKVVRQSDRLPGVPESIVNPIVRQAMYEVRKLVHAVIRVHGKPDRIHIELAREASGNAEQRSKQISEMRQREKRRDDAAHQIREWGHNVTGNNIDLYTLWLEQGKECVYSGRPISPHQLFGGEVDVDHILPRSRSLDNSLMNRVVVFRSENSAKGQRTPYEWLADTNPEKYGRVLQSARKLPMPKRRRFAQKELKLDDFLNRHLTDTAYITTCVRQYLLTLGCDIVCTKGQSTADLRRIWGLNTVLRNDGLNLKPRGDHRHHAIDALVIALTSRSILQTLARVYSGREAKFPQFWPTFRSDVEESVASINVSHRVSRGITGALHEDTIYGRTQKKDRSDAIESQRPHSEGWVESEGVFVIRKSLESLTPPMIDEIRDPNVKRIIIDRLHSLGVDDYRRLKKLPGDWYKEPLFMSRKKGRLTKAPNVIKSVRVFRKDLTIQPIRRGSACVKPGNTHHISIFEMPGSTPENPKRDVVAVTMLEVAHLQHLARQRHRIEPLINRIHPTSPDAKFLFSLSLNEAVVGTFAGIDGVFIYNTTASTTKQMRFYLHTDARKKSEARGFTAKPNSMQFRKVTVNLLGDIRDAND

SEQ ID NO: 9250 - protein, 1067 aa, unidentified
  REGION 1..1067: note = Description of Unknown: Cas Enzyme sequence
MPAKEYSLQRSGSAENAPPPHHVWAFDLGKGSIGEAVRVGTVFKHKASLLIPGDFAETRTARDRRRMWRTRQAHHAREQWLREVFQAIGLPVLCGRNHDTKTGEWKPGEPGDPRLEREFPTAGDDTCYTSCLLRIKLLRGEKLEPWQLFKAFHSAIQRRGYDPDIPWKTREAKKTKEADGEDDDAKTGERMKKFEEELAKMAPGQADYQFPAYFDAWKMGLWNPAQPADLKLRVDCHAESTRNQIVPRRLVEAEIRRMVEGAAKHYKALAGKANYLLFGPAQKPYASYNANPSKPPYLREGAATDWQGVLGQKIPRFDNRIIAKCALIPRLNVCKLREGGKGEPHPKSLVAVEVVFLMKLKNLRFQRGNKQEALSAAEIRSILEDPKRTKWAITKAAWKKQCAAIGAIPLPGHEEVESPRLSGRSRFCRPALEILKRLILSGQKPSDFLREELARLDGNKDPHKGLLAADLKFLGDMAARKDTWEGLYIPNQQLDALVQSTVGPDEAIQRLIGQQNDPIVRHRLDTFAKRLKALNVHGQPDHVVLEFVREDFMGKRAKMELSKFMKQRAEERIKAREEAAKAGATERSAGLKLELLRAQGGHCLYTDVGLDPSRLDEYEIEHIVPRSRSGPDAVFNYVLTTHAVNEEKGDRTPYEWLSSTGGWDAYVNRVRSRLLALRNKKVQLLISPNAEELTERYTALAETAWIAKLAQTIVGLHFGWRNGVDEQGRKRVSVISGGLTGRIRRKYGLNRILNPNVQDEEEAEKKNRDDDRHHALDAMVISFIPGWARDAKKEGFFRFPEGVSCEFFAKEIADVIPQNLCFEKPALAETIYGARRNDGERVIVQRVDLFKLAMKGIAPGKTKFDLDYLANQIKAVRDGHIERKLAELHATSPDETKWKSFCDNFRLTGKNGSLGSRVRRVLMDVGESSEYKDLSKDGSGAYRKALKGHRGQIVYVETSSDKKGKSKETVRVRPIYAFESPSIVREQLQAELGGRCRVVGFFQSGCLVEVSGEVQHAKVPLPPGRYMLNSLRTDCNVKLTTADGRTYPTIPFYHLSKLISAGFRRAD

SEQ ID NO: 9251 - protein, 1436 aa, unidentified
  REGION 1..1436: note = Description of Unknown: Cas Enzyme sequence
MKKILGLDLGTNSIGWAVVNEAENVDEQSSIVKIGVRVNPLTVDEQTNFEKGKPITTNADRTLKRSMRRNLQRYKLRRNFLIEVLKKNGFIDDETILSENGNHTTFQTLRLRAKAATEEISLIEFARVLLNINKKRGYKSSRKAKSTEEGQLIDGMEIAKKLYNEHLTPGQLSLQLLKEGKRHLPDFYRSDLQDEFDRIWKTQNAFYPNLLTNELKEELKGKNKKQTWAICATPFQIVGVKRQTKANSIEQKIENYQWRSDALCKQLDLEQLAIVLQEINGQVSNASGYLGNISDRSKALYFNNQTVGQYQMAQIESNPHHSLKNQVFYRQDYLNEFETIWETQAKFHKELTPELKKEIRDIIIFYQRPLKSQKGLISFCEFESHQIEVEIDGKKKTKTIGLRVCPKSSPLFQEFKIWQRLNDVQVTGKVIPNQQTDLFGYEETLKHGKRFLYQEEKEKLFAELNYKEKLSKTDAIKLLFGNEKGMDLNFKELDGNHTQAELFKAYQAIVEMSGHGEYDFAKLPAEKSFGIVSDVFETLGINVDILKFDSCIEGKAFEQQPMFKLWHLLYSYEGDKSELGNEKLIDKLRDRFGFDKEYATVLASVVFPDDYGSLSSKAMRKILPHMKDGLDYSVACEYAGYRHSKNSLTKEEIENKVLKDRLELLPRNSLRNPVVEKILNQMVNVVNGVIEEYGKPDEIRIELARELKKSAKEREEMTKSTSETTRLHEGYVKILQDAPFHLEHVSRNDIIRYKLYEELQFNGYKTLYSNTYIPREKLFSKEFDIEHIIPQAKLFDDSFSNKTLEVRQVNLEKGNLTAFDFVSGKYGEQELREYENRVEGLFKNQKISKTKRDKLLMREADIPSGFINRDLRDSQYIAKKAREILEGIVRFVVPTTGSITDRLREDWQLVDVMQELNWDKYNRLGLTEIIEGRDGQRIRRIKDWTKRNDHRHHAMDALTIAFTKRSFIQYLNNLNARVQKGVDDYFDLDLVEWSKLSKEERTSAVYGIEKKELHRDSHGKLRFNSPMPLDEFRAEAKRQLENVLVSIKAKNKVVTQNINVSKKKVGKNKKVQLTPRGQLHLETVFGSSKRYVTKEEKINASFDANKIKTVANKRFREAILARLQEFGGDAKKAFTGKNALDKNPIWLDEAHNNKVPEKVKTVTYETIYTIRKEVTPDLKIEKVVDVHIRQILQNRLDEYGGDAKKALSNLDENPIWLNHEKGIAIKRVTITGISSAESLHDKRDKDDQLILDDNGNTQPVDFVNTGNNHHVAIYRKPKLDKNGQQLLDDNGEPQFELDEHIVSFYEATSRAIQGLPIIDKEYMKAEGWQFLFTMKQNEYFVFPRYDEEGNITFNPLDYDEAWYKNPENYATISPNLFRVQKMTNKDYFFRHHLETTVQDIPSLKGITWKRCGLNGIDNILKVRVNHVGKIVSIGEY

SEQ ID NO: 9252 - protein, 1425 aa, unidentified
  REGION 1..1425: note = Description of Unknown: Cas Enzyme sequence
MDKNYVIGIDPGIGSLSINLRDTTEDNLFNQLKYTSDDIIRSGVIEKGVNKYTSFAAERRVFRNNRARYRHRRSRKQVTLKLLLDDAILSDKIKYPLCPLSKEELEKWIRYDKEKGFFREYPIHATEFTHWLMQDFNNDGKADMNMNGEKYLSPYQLREELMIRQFDFSKKEDCYKLGRALYHMAQRRGFRSSKGDSADNEELSALEELSAEESDNALEYSEKKKSKSLHDYMDANGYKTIGCALAALEREGVRLRDSEYQVIRKDLRKEIDAIFDFQEQLSTDSYLYKHLVSEKKGKGTIFYQRPLKSQKGNVGKCTHEQLRKRCKVSHPEFEKYRAWSFINNIRVRLPEESEFHLLPLEIRAALYDKISEKVSKSHDFISIRRFIEKKYGLCENTLSWENKTINYKDDYSVSGCPSIGRLRNVLGVDWASWALPIDKERKRTSKSVGSHKITYNAINLWQICTDAESEVFVKEFVANKINFSDKHFSEQQIKELVRLHKNASDEYSNLSVCALQKINRFLTRGFNNYEATLLANVPTIIGEEKWQVYGEEIESHLLDIISKNRELKRHINITNRLIADYLSLDEDEKNAQGKAHNYKYVLNKSDQEAIVEKIKDVLGKRYWELKSSEEQEYWKSRIATLYQQFFNSQARTYLKAPIDAECFRDYLIEQWGANCNLKRNKLYTPYDSKYYPPAERTEEGYQLCSPVKGANRNPAAMRILYLLRKRINSLLKDKSLGITQENTRVVVELPREMNDANRRRAIDMYDRRREKENALFKYLIGESQEVSEDQLQKVRLLIEQCPEYVVADFNEEFQDVKKHPNAYNEKIEYAARYYKIWLRDRCIDLYSGREIPFSGLFDDNRYDIEHTVPRSMVLNNGLENKTITEAYFNRRVKGRLLPTQLSNYKEDILPNLQPWQERVKRLEERVSFWVKERKRASDPEWKDYCIVQNHVWQMELDYWSSKLELFTIREVKADFVSKQLSDTRVISKYVFYYLKSFFNRVDMQYGCTTAIFRDIFGLPKKDRSRHIHHAIDAMMLSFIPTTVQRDKMMRLFFQIDEAIKAGQTSDAEGLRIQLEYEKNLCLYGYQPRNKQNISLASLAQHLEETVLVNHANRDQTLTPAKKNGRIKKKGVSINVVHTGNCIRGKIHGEHFFGAITQWKVNEQKELIKNENNQPIVDESRIKYVVRIPLKKGEGMNGFKDWGDLEKRIVDKRLYRVLKDMHQEGTSFGQACTDGFYVQRKVNEAIVLNRIRHVRCYVTSNQGHVQVKQHITPNQKPYRQWVYAGRGDLSYACEYKGEKEVKYELYRISDITRHRKEDKEDIPQTIAGKKELLHLTRVIKAGEMVLLYNESPEELNALDNREKSKRLYRIASFEKASTRVKLVKHSVAKVEDKDFRSCDIFNDRITMPALKMSLYKVKFVTYKPIL

SEQ ID NO: 9253 - protein, 1367 aa, unidentified
  REGION 1..1367: note = Description of Unknown: Cas Enzyme sequence
MKRILGLDLGVSSIGWALVNEAENENEKSNIIKLGVRVNPLTVDEQTNFEKGKSITTNADRTLKRGMRRSLQRYKMRRAELIRKLQEAGIINDSSILYEEGNRSTFETYRLRAKAATEEITLEEFARVLIMINKKRGYKSNRKAKGEDEGNLVDGMEVAKRLYDEGLTPGQYSLSLIEQGKKYLPEYYQSDLQSELSRIWEKQRAFYPDILTDDFWKTLQGKSKTSSNKIFMARYQIYSPPQKRDEARRQLLQWRVEGLSKQLPIEVVSAVVSELNGQINGTSGYLGKISDRSKELYFTKQTVGQYMMAVLDKNPNASLRNMVFYRQDYLDEFNKIWETQARFHPELSQQLKHDIGNITIFYQRPLRSQKGLIATCELEQKQVDTIVDGKSKTITIGPKVCPKSSPLFQEFRIWQRLNDLRIVSDDLFGNRNLDLEEKQLLAYELSTHAKLTKTQALKILFGKAPKDIDLNFKELDGNTTQATLFKAYQDIIEMSGHGEYDFSKMSAGEAYDIVESVFSALGYNTEPLHFDATLEGKALEKQPYYQLWHLLYSYEGDKSKTGDEALIKKISEIFNFDNNDYAKVISQITFQPDYGSLSAKAIRNLLPHMYQGLQYSDACEACGYRHSARSLTKEELESKELKDHLDLLPRNSLRNPVVEKILNQMINVVNSVVETYGPLDEVRIELARDLKQSAQEREDATNDINKAKKDNEEYRKILQQPPFNIQHPSRNDLIRYKLYLELKDNGFHTLYSNTYIQKENLFTNDFDIEHIIPQATAFDDSFSNKTLELRSVNLKKGDKTAYDFIKDEYGDEAASEFKTRVDDLLKRKSISSKKHENLLKTAADVTGGFINRDLRDTQYISRKAREILEGLVRVVTPTTGKITDKLRNDWGLVNIMKELNWDKYEAAGQVDPIRHEIKDWTKRNDHRHHAMDALTIAFTRHSIVQYYNNMNARADKTSDIYGIEQKDMERHNGHLRFKVPVEGMREEAKRQLQQILVSIKSKTKVATQNVNRSKSKKAEGGENRKVQLTPRTRLHQETIYGCHQRYETTYEKVGSTFDEAKISTVANKTIREALAQRLAIYGAPQKAFTGKNSLEKNPIWLNADHSRAVPLKVKCVVLTNIFTIRKPIDANLTVDKVVDPRIKSILKKRIEESGGDVKKAFSNLDENPIWLDEERGISIKRVTINAGLSDPVPIHEKRDRKGNLILDKAGKPIASDFVQTGNNHHVAIFEDAEGKLQEHIVSYYEAMARLSQGLPVVDHNYNAELGWKFRFTMKQNEYFVFPSYDFNPSEIDLMNPDNYALISDHLFRVQKLASKYYVFRHHLETTVEDRKELQNRTWIRIRNCEGLRGIIKVRVNHIGQIVAVGEY

SEQ ID NO: 9254 - protein, 1386 aa, unidentified
  REGION 1..1386: note = Description of Unknown: Cas Enzyme sequence
MIQKTLGIDLGTSSLGLAVRNTDLGGNIIDQLEYYGSIIFKSGVGNGKTGEYSYAAERTKYRSTRRLYQARKYRIWATLRLLIAHGCCPLTDEQLDRWAKYDKAKGLKRQYPFDVTEFEQWVRLDFDCDGKPEYSSPYQLRAELTKHQLDWSNQTDRYKFGRAMYHIAQRRGFKSSKGETLKDANENDDVSSIDISTEMKKSEEKKSKNLNEYMELLHLSTIGCAFYQMECDGIRVRDNSEYQAVQSQYQKEVKHICNFQHIDTIAPALYTGLISTKQGEGTIFYRRPLRSQKSNVGKCTLEPNHRRCPQSHPDFEEFRALSFINNIKYRTDPTGEWVSLTDSERMELFEKLFTHSKATFKFEDIRKWLENRYSGIRFSYDEHTINYRDHTTVAGCPVISRLRKILGAEWRTTTISTSKTRLNLKTGEVHSVSYNYVDLWHLAYSSDDYEQLSEFAKVQMHLDDKQTGELTRMWSAIQEGYTSLSLKAIRNILPLLRQGLIYSEAVALAKIPDIIGQDRWESAKDKLLSEYTQLTEHANRARLAYNIANTLIANYKSRTINEQQGFKDIHYTLDETDFNEVNKCIINMLSEKRWNDMPVEKQRRLQQDIAQLYQQFFASSERDYYKVPRWGDTLKQHLAVLFPDIPAQNWDKLYHHSQIDKFPQQHDSNNNLTLGTPDIGSIKNPVALRALHVLRRAVNGLLQEGIIDESTRVVVETAREMNDANWRWAIENYQKLREKENQSIAEIIKEYRPNYTDDDIEKGRLLFEQSIIQASTRQEREKAESFALDMQKYKLWKEQKFQCLYSGKYINVKDLFDNNVTQIEHTVPRSISFDNSLTNKTVCLTQANREKNNRIPSELPHYDEILNRIKPWQEYLNHIKAQIELWKGKSRTATTVERKNACIRQKHLWELERDYWQAKVRTFTIQKDEIGQGFLNSQLVDTRIITKYAFHYLKSVFSRVDVEKGSVTADFRKILGIQSTDEKKDRSKHSHHAIDAAVLTMIPVSAQRDRMIELFYQCDETKGWERDLMRSKLNKEIAACHIGSINGLVETIENNILINHITKDQTLSPAKKPRYINNKRKVGQWNQGDCIRGQINEATFLGAIKTADSSIAMVVRKPLKSLTENNLITIVDQRLRSQIERQVHKWMEEENIPFAKAIEKDIYMLDKDGNQITHDKNGRRISPIRHVRCKTANAEPITLKKQTYLSRAKHKQYYYTVNGGNAYAGIYWDGIIGHPKTFEIRTLLDITEIIGTTNSITPQDCFPATKDNIKLYGIIRPGCRVLIFDKNELKKGESIDDLIIKLHDTEIYTLKNRLYIVRSFEKNGTTVLVFHNEARNDNELGRGSSKIDISAPNPKDRVSINTRYMLIEGFHFNIDNIGKLKFITHK

SEQ ID NO: 9255 - protein, 1204 aa, unidentified
  REGION 1..1204: note = Description of Unknown: Cas Enzyme sequence
MERILGIDTGTNSLGWAIVDKDENQYHLVANGTNIFSEGVKIEKGIESSKAAERTEHRSVRKHYWRRKIRKIRLLSILSDNDFCPRLNQEQLRLWRLKKVYPTDDAFMDWQRTEDKAQVNPYKFRYICLTQKLDLTDITQRFILGRALYHLNQRRGFLSNRKESTKESDGAVCEGISSLSKEIKDADCEYLGEYFYKLYQNGAKIRNHYTARKEHYLKEFKAICAKQELDEVLVEKLEKAIFDQRPLKSQKGQVGTCTFEKGKSRCPSSHPLYEDFRMYSFINSIKVQVNTLYEKGERSLTDEEKLLIIPLFKRKSKRTFPFEDIAKKIAGKKNYCYIKSEEEKPYKFNYQMDTQVSGSPVNAQLEEIFGEDWLSGVCEVYTLSNNKTRFQIMNDVWHALFFYDDEDKLKEFAKNRLQLDDEIAEKFSKISIPTDYAALSLKAIRKIIPYLRNYGLIYSEAVFLANLVDVLPQHVWGVKEMREAAIENIIDVMHLYDKNNIDGITLEVCIKTFLKERYQVNDDDLKKLYHPSMLDPYPRQRPNDEGVFQLGSPRISSVKNPMAMHSLFRLRKVVNLMLKRGYITPDTKIHIEFSRDLNDANKRWAIQAQQREYEKERERCRKEIEKYISAPSDTDILKYQLWEEQNHKCLYTGEEIRITDFLGDNPRYDIEHTIPRSAGGDSTKMNLTLCSSRFNRDEKQTKLPSELANHDEILERIKDWKQRYEELDKQIRKISTKGVSSKEEKDGKIRRRHYLILQRDYWRGKYQRFTMTEVPEGFSRRQGTDISVISRYARMYLKSVFKQVYIVKGIATSDFRKMWGIQEEYAKKERVNHVHHCIDAITIACIGKAEYDKLAEYRHQYDDYLFKGKTKPTFDKPWPSFVIDIKHIQDELLIAHYAKDNLEKFTKKNIRGKDGRIIRDKFGNKLQMKGDTSRNSLHNDKFYGAINHEGAIKYVYRTNIDALDAKSIGNIVDPTVRSIIESSIAVHGSLKEAINKGIWMNEEKHIPIKKVRVFRNDVKKPIELKDQRDLSDKDYKQHYYVTNDGNYMMLIFSKLNNKGREIRQHVVINSLEAAEVIKSHKRTQEGKVVWDSYYTKEGFDLIYKLKSGTMVLLYENDRNEIWDLDKRNLQKRLYIITKMKYDGRIYMMHHQEAREKKDLEEKSGSFRINEEYRPIIVNSYNQFNALVQGVDFEINDLGEIRRLI

SEQ ID NO: 9256 - protein, 1204 aa, unidentified
  REGION 1..1204: note = Description of Unknown: Cas Enzyme sequence
MERILGIDTGTNSLGWAIVDKDDNEYHLVAKGTNIFSEGVKIEKGIESSKASERTGYRSVRKHYWRRKIRKIRLLTILSENNLCPPLKKEQLRLWRLKKVYPVDDDFMGWQRTEDKANVNPYKFRYICLTEKLDLTNVTQRYILGRALYHLNQRRGFLSNRKDSTKESEGAVKEGISSLSDDMKASGCEYLGEYFYQLYQKGEKIRNHYTARKEHYLKEFHAICEKQELDAFFVEKLEKAIFDQRPLKSQKGQVGTCTFEKGKPRCPSSHPLYEDFRMYSFLNNIKVQVNTLYEKGERYLTAEEKRQIIPLFKRKSKRTFPFEDIAKKLAGKNNYCYYKDEEEKPYRFNYQMDTQVSGSPVNAQLEELFGEDWLSGVCEVYTLAKDKTRFQIMNDVWHALFFYDDEDKLREFAQNRLQLDEAQAVKFSKISVPNDYAALSLKAIRKILPYMRHYGLIYSEAVFLANLVDVLPGYVWGVKEMREAAIENVIDVMHSYDKKNIDGITLEACVKGFLKERYQVDDDTLKKLYHPSMLDLYPRQRANQDGIYQLGSPRISSVKNPMAMHSLFRLRKVVNLMLKKGYITPETKIHIEFSRDLNDANMRWAIQTWQRENEKDRERCRKEIEKYVATPTEKDILKYQLWEEQNHKCLYTGEEISLTDFLGKDPRYDIEHTIPRSAGGDSTKMNLTLCSNSYNRDIKKTKLPSQLAAHEEILERIKAWKEKYEELDHIFRKLKGSSASTKEEKDRIIRKKNLLKLQRDYWRGKYERFTMTEVPEGFSRRQGTDISVISRYARMYLKSVFKQVYIVKGIATSDFRKLWGIQEDYARKERVNHVHHCIDAITIACIGKAEYDKLAQYYHETDEYKLGKGKKPDFEKPWPSFVLDIRHIQDELLIAHYSKDNLPKQAKRYVRDSKGGKILTQGDTARTSLHNETYYGAIEVDGDVKYVVRKSLDSLDEKDIKNIVDAEVRSKVEKAVQSSGSLKKAVEKTIWMNEEKQIPINKVRVFAGSVTRPIHIRQQRDQSKHEYKRQYHVQNDRNYMMAIYVGQDKKGKEKREFELVNNITAVNFYRRSNDKVPTDNQLVPQFSKSGYELRYKLKIGTMVLLYENSPEEIWDLDRANLQKRLYKVTGLSSMVIQGKYEFGTIEMIHHQNAKPSTEIKKVNGEFKHDEEFRPGIKMLHSQIKALVQGVDFEINDLGEIRRLI

SEQ ID NO: 9257 - protein, 1346 aa, unidentified
  REGION 1..1346: note = Description of Unknown: Cas Enzyme sequence
MNGQSYYLGIDGGTSSVGWAVSAPDYKIIKKGGRALWGTRLFEEAETGEKRRTNRIARRRRGRQVNRKKLLRELFSHEIAKVDPAFYLRLDESKFWEEDKKTPTKYCLFADKDWTDRDYYKKYPTIYHLRLELMEKTDPHDVRLVYLAISHIISHRGHFLYAGQQFSSTPDFAPLWMETVQCLKDALDLEVSCDTNALQDALSEQMKIAQKQKVLAGIFENSKDERIKCITELLSGKKSDISKLLGIKPDKEDLSSLKISFHEDAMDSDETLDTILSYSEEGIAVLEHLKGVYDWGILNHLLGCSNTFSAAQKAIYEKHSRDLKRLKMVIRRVSPENYSRVFRKTDKEGNYALYSGHYNRTDKNPDSKYKSQEELYKTLKKILGKSEDKDAKDIMAEIDRGSFLPKQHTKANSVIPYQLHLNELRKILDNASAYLPFLNEKDEDGYSVREKIESLVTFRIPYYVGPLDHHGDTLGKHWAVKKRNARVLPWNFDLIVDKKASAEAFMDQLTNTCTYLTGETVLPKDSIRYSRFMVLNELNNVRIHGEKMSAACKQNVFLELFCKKQKVTFKALCDYLEKNGYIEKGERDSVTGTDGDFKASLRSEIRMMQIFGDHLPDVDVMEDLIRAVLLLKQEPVMLQDRIRTIMPDITDEQMRKVCRMSFSGWGRLSKAFLCDIKSEVCAGSGSQLNILEALWQTDNNLMQLLSSRFSYTKRIDEHNRELAGEAALTYKTVENLAVSPATRRTIWQTLKIVKEIEHIMGCAPKKVFIEVARGAENGGRTVSRRLQLMDCYKKLSEEVRGDRDWLGEFESRSDADFRRDALYLYYTQMGRCMYTGEPIDLNDLMNKKRFDALYDIDHIWPQSKIKDDSIENRVLVKKMANQNKKDRYPIEADIRHARFLFWKSLYDNGLIGKKKWERLIRSKPFEEEELAGFISRQLVETRQSTKAIAAILKEALPDTNIVYVKAGNVSDFRHLFDFVKVRELNDLHHAKDAYLNIVVGNVFDTKFTANPLNFIKSNEKYSLRPEVLFREWNVERNGEQAWIKGEHGSIETVQAVMRKNNIMVTRQTVRKNSGQNGGLFDQNPKRGGVIPLKGSEPRLQNTERYGGYNGDTGAYMTFVEHTVRKKRVRSFVPVYLRFAEKIDKDPEKMIWYCEEILGLQDVRILVKEMKYNTLLNLRGFSIYVTGRTDNRLIGQQEFQLVLSPEMERYVKKVLKVAQRRKAAGADIAVSEQYDGVTLDMNQKLYEELLHKHDASVYQHRPSSQKSTMEKGKDKFAQLSISKQCEVLEQILQLFYGRGQADLSDIGGSPYAGKVVLTGSLDGKNGAKMILSSVTGFYRKEIDLMKL

SEQ ID NO: 9258 - protein, 992 aa, unidentified
  REGION 1..992: note = Description of Unknown: Cas Enzyme sequence
MTQKTLGIDLGTNSLGLAIRNIDAGSNIIEQLEYYTSIIFKSGVGNGQKGEYSYAAERTKYRSSRRLYQARKYRIWATLEVLIDNGCCPLTHEQLKKWSVYDKAKGLKRQYPTDAFEFEQWVRLDFDNDGIPEYRSPYQLRAELVTKHLDWNSQTDRYKFGRAMYHIAQRRGFKSSKGETLKESSENEDIETIEVSTAMKKSENKKSQILNEYMVRNNLPTAGCAFAKLELDGIRVRGSEYQAVQSQLLDEVKQICTFQKIDQLAPELFIKLTSTKKNEGTIFFRRPLRSQKSLIGNCTLEPTHKRCPISHPDYELFRAFAFINNIKFRTDHQGEWQSLNNKEREDLFKELFTRTKATFKFKDIREWIEKKHKCDHLSYNNHTINYNDNATVAGCPIISRLKKILGDEWNNSTIKTDRTRINRNTGDIYTVEYSYIDIWHIAFCCDDFEELSEFSTLRMGFDERQASEYVRLWSSIQDGYASLSLKAIHNILPFLQKGFIYNEAVAFAKIPDIIGAERWNNDCDKLITSLQGCNADCDRIRLAYSITNTLISRYKARSLDEQPAYRNTEYKLDDADRNDILNCIIETISEHRWKTMDENIRISIKDSIEANYQKFFADSKRDYYKLPNKTSQIREFLEKSYPDVDPTKWDSLYHHSQISLFPLQTPQNIRTDKGNFVYVCQLGTPDIGSIKNPVALRALHTLRRAINYMLMQGMIDEETRVVVETARDLNDANWRKAIERYQKEREKENEAIASIIKEFRPGYSDTDIEKGRLLFEQNILDCESRNEKAKAERFAADMQKYRLWKEQKFQCLYTGQFINISELFDENRIDIEHTIPRSISFDDSLKNKTVCVASFNRNIKGNNIPSDLSNYSDILLRIRPWQERVDHIKDQIELWRGKSRTATTLERKNECIQQRHLWELELDYWQTKLNTFTIKKDELDIGFRNRQLSDTRIITKYAFHYLKSVFSRVDVQKGRVTADFRKILGIQSADDK

SEQ ID NO: 9259 - protein, 1102 aa, unidentified
  REGION 1..1102: note = Description of Unknown: Cas Enzyme sequence
MSKKFTGDYYLGLDIGTDSVGWAVTDDQYNVLKFNGKSMWGIRLFDAAQTAAERRGFRTARRRLERRRWRLDLLQELFQDEIDKKDPEFFQRMKDSALYPEDSKTGKPFALFRDKELNDKLYYKQYPTIYHLRKALLTEKEKFDIRLIYLAIHHILKHRGHFLFNGEFANVTKFSYAFEQLQDCLANELDLELECNDVQRLSVIIKDKHMGKNDKVNAAASLFPNVADKKQLKAIIGLACGAKKKLADIFCDETLNDSELSSISIAEKPYEELRPDLEAVLAEKCCVIDYIKSVYDWGILADMLEGGEWENHSYLSVARVRQYEKHHSDLKNLKQIIRKYCPADYKSFFSKDGTDNYCAYIGDDIETKERKSVKKCKQEDFYKRVKALLKKAVEKGCPEKTVAAIFQDIDAQAFLPLQVTKDNGVIPHQVHEMELVQILKNAEKYYPFLQEKDSDGNITSDKILQLFKFRIPYYVGPLNSNVGKNSWIVRRAEGKIYPWNFEEKVDLDKSEEGFIRRMTNPCTYMLGADVLPKYSLLYSEFMVLNELNNVKVCGEKLPVELKQKIVKELFMKIRRVTVRKLCDKLKAEGFIPKNQNHKNVLIQSNDITGIDGDFKASLVSYIEMQKIFGKELEKYSVQQMCERIIFLLTIHHDDKKRLQNRIRSEYTKEQISDEQLQKVIRLSYQGWGRLSAEFLTGLNGADIETGEVFTIIKALRQTNDNLMQLLSGRYTFAEALEEHNNKKRKNISALTYDNIMENIIASPAIKRSAWQSISIAIELRKVMGREPKRIFIEVARGPEEKKRTVSRKNQLLELYKSIKDESRDWKKELENTAESDFRSVKLFLYYTQMGRCMYTGEPIELGQLANTTVYDRDHIYPQSLTKDDSLNNLVLVKRVENAKKGNGLISADIQKRMRGFWSILKESGLISNEKFNRLIRTTPLSDEELAGFINRQLVETRQSSKIVADLFQQIYPSTQVVYVKAKTVSDFRHETLDMVKVRSLNDLHHAKDAYLNIVVGNVYHEKFTGNPLTWLKKNQDRNYSLNQMFNFDQIRKTKDGNLYIWKKGNAGSIATVRKTMLRNDILYTRQATENKNGGLFDQNIVS

SEQ ID NO: 9260 - protein, 1015 aa, unidentified
  REGION 1..1015: note = Description of Unknown: Cas Enzyme sequence
MNKEQLGIHFDVGHASIGWAVTSFRPTEEDFLRILGTGVVLFPADDCLANHRRAFRRQRRHVRATRQRIARMKTLLLAKGVLSERELDANTTASPWKLAAAALRGRVLSWIELWSVLRWYAHNRGYDGNALSCLRSGRGVDLEDIKKNEAARAAMARFGTSSMAETMCAVFEIDPEQAKSSTTKRFKGLNLSFDRSIVEAETVRILESHVGRLPGLDRDLVHLLTASPVTEPACLRGRHDLPFRVPARFWGGVLFGQLAPRFDNRLIGSCPVSGEKLPLKATPEFLLFRWAMMLANTRVGETNRPLSPAERAAMTERVRAVGGFAKGAYKKAIAETTGEKLSNIDALLLAPEADKSLVCYPGLYALHQKGLDEWLDPSDSKKLAHRLFRGKTFRVRDIAALVPAERKSAFEDWFSGAASKGRGKKKTDEERWNAPVAADLPSGRAPFAREVLAKAASEALAGIDPRERGGVLYRDATKEDALPESEIDRETNNHLVRHRVKILLRLLKDIVHDYAENNPARVSQVTIEMARDLKDLSGKTNKEIESEMALRTAQHNRVARNLAEFLGQDSARVSAGLIRKARVAEDLAYTCPYTGAVYDLQDVVSRNVDLDHILPRSQRATDSLDSMALTFTEVNRMKGARSGLEFIRDCGGQRVPGRENLVVLREEEYRKRIEELRSARSTTFPEDRRRQERRKENLLRLRAADTGMTEGMLTRTSYITALAMKAVRGYFAACGRMPRLVSVPGRVTAFFRMQWKLLGLLARTDPRVLDEAGELRLKSEIRDITHMHHAVDAITLGLAATLLPADGTFWATVCKRRVTAAEEAALRKLRVFRFSANHEPQLVDLPGFLSDSIVRALVEKRVVVHQPQERRGLLLEQNAWGVVREEGDKVVIRQRARNEKGNRIPPKIKTVQRSAVFGLEPEGGRGKLKAIKGVLVRSGNFGVALSPTPTVIPVFKVWKTLGKMKNGQRLPAIVRNGCLISVPKGTYQGVWRVKSVKNNQSGVALDLVVPQAIAP

SEQ ID NO: 9261 - protein, 983 aa, unidentified
  REGION 1..983: note = Description of Unknown: Cas Enzyme sequence
ALPICEQPLETPAAVRRAARMARRMKFRRKMRKWMLLKVLIDNGMCPMSHQELDAWRKSGKYPSDNKPFIDWLKSTDTSNPYADRAAAANGKVPPLVLGRALYHIVQRRGFKSSRKDAGEDGGNDKELGAVKGDIAALTKEITDAGCRTLGQYFAKRIEDEKNSVAKTRIRKRYTGRVEHYMTEFAVIMSSQGIDHDSDLYKSLYKAIFLQRPLRSQKHLVGKCPLEPNSPRAQIGHPDFEEFRMRAFVNNLSFIRDDDEPDDGKERIPLTPADQELACSAFLKDSPTMKFSAISKLFKKKLREEGLKFRYYHSDDTVATCCTRHKMQSAFGDIAFDEQMVFDAISFFDDDDKLKDWFRKHYPSLSEEGITRLCAIHPKEGNAEYSLKAIRKILRFLRKGHDLFMARLLAKMPDVVPDFDKREDEIVLHMTELAIKCRRLRDESWSSASSTLRGKPPRLMDLYKDYFLNEVGIDENAWKKLYLRGDSAYAVDPARPDRLPAVKLGMIRNPLVQRSMTTLRRLVNYLRDHGKIDADTTIRIELARGVNDFATRHAIQLWQKDRESLRAKARAELGDRATEELVDRYILWEEQGRKCLYTNKTISLADLVSGSAFDIEHTIPRSLSGDDSLANKTLCDAKYNRQVKRGMVPTDCPNYETEIYTNLAPWREKVADLEKNYRSQTRAARGVTDPGARSRARIKAIRTRLELNYWRDKLRRFEIPSDKLADPVNGISGFKRRQLVDTGIMSSHAVEFLRSVYPCVHSVNGAATAFARKAWGIQGDEAKDRTEHTHHAKDAMVIAALTPGRFNAICTALKDDGKGAGIRPCDVCEPPYDGFADKVRAAAGEILVKHVLRQTTLRQSSKRNALAKVHPLKSDPSKTVKYVLSRGDTVRGQLHKDTFYGCIERPDTGEKAFVVRKPLDGPIADAEKTADKIVDPAIRQIVKDTLSSLKSKGVTKIEPGMVKMPSGVPVNKVRIYAHTTNPM

SEQ ID NO: 9262 - protein, 1066 aa, unidentified
  REGION 1..1066: note = Description of Unknown: Cas Enzyme sequence
MKRILGLDLGTTSIGWALVNEKENDSEQSSIVRLGVRVNPLTVDEKSNFEKGKSITTNADRRLKRSMHRNLQRYKLRRKNLIECLIENGIISKDTPLFELGNKTTFNTYKARAKAVEEEISLEDFARVLLMINKKRGYKSSRKIKETEEGELVDGMEIAKKLYQEDITPGQLLLELYQQGKRNKPAFYRSDLQAEFNKIWDVQSKFYPAILSPEFKKTVTGFNKTQTSGAFYSVKNVSTAKVSGKEAYAQILRWRTDALSKQLDIEETAYVLAEINGAINNSSKRLAMISDRSKELYFNHLTVGQYLMKSLEQNPQASLKNIIFYRQDYLDEFETIWEKQAQFHHELTPELKKEIRDIVIFYQRSLKSCKNLVSYCELEHQEKEVVIDGKKQTIFTGCKVCPKSSPLFQDFKIWQMLNNLEVSVVGHKSKKAKDRSQAMLFGDAEMGSLRRFLEQDEKELLFKELSIKEKMSKKDVLKLLFDNPQNLDLNYKEVEGNRTNAAFFKAYQEIISFTGNGEYDFSKMSADEVLALTTEIFQGLGYQTDFLTFNSLLEGKAFEQQPFYRLWHLLYSYTGDNSATGNEALLKKIGEICGFEKEYANILANIALPLDYSSLSAKAIRKILPHMMDGYEYSKACEMAGYRHSARSLTKQELDAKTYKDHLDLLKRNSLRNPVVEKILNQMINVVNEIVNTYGKPDEIRIELARELKKSQEERALLDEAIRKTTAESEKYKKELETEFGIQHVTKNDILRYRLYLELKPNGFKTPYSNTYIPREELFGNRFDIEHIIPKARLFDDSFSNKTLETSKINKDKGKMTAFDYVSEKYDEQGVAEYESRVEELYAQKAISRTKRNKLLMKEADIPADFLERDLRDSQYIAKKAREILEEMVPFVVTTTGTVTSRLREDWQLVNLMRELNWKKYDALGLTETYTDKTGEQVKRIKNWTKRNDHRHHAMDALTIAFTKRSIVQYLNNLNARSDKGSSIYGIEQKELHRNDKGHMVFNAPMPLNEFRAEARKHLESILVSIKAKNKVVTKNVNRAKKKGGHQEKVQLTPRGALHNETVYGK

SEQ ID NO: 9263 - protein, 1494 aa, unidentified
  REGION 1..1494: note = Description of Unknown: Cas Enzyme sequence
MKRILGLDLGTNSIGWALVNGDDNAIIKAGSRIIPMDAATLGNFQKGNLKSQASERTNFRGTRRLYERAILRRERLLRVLNILDFLPEHFKKQIDFEIHPGKFINHSEPLLPYRKTAEGKNEFIFKDSFNEMIADFMEKQSELVANGKKIPYDWTLYYLRKKALRKPIRRDELAWIILNFNTKRGYYQLRGHEDETQTAENEEYKVLRVTNVERMDEDKKRKGIYWYTITYENGATQRKSGKVAPRNVGDMVEVIVKTTYDKDGNIKVDKEGNPQISISTPQPDEWKLLKKKSEKAITESDKTVGEYIYDEILSNPNTKIRGKLIRVIDRPFYKDELICILKKQSEFISELKDKELYEKCVRELYQQNESHVQSIISKDFTTLFVEDIIFYQRPLKSKKSEISDCPYEHYTYFDKEVGEFKQKSIKCIPKSHPLFQEFRLWQFIQNLKIYAKEKEVNGKLKTDVDVTSDFIASPDDITALFEWLNERKEINQKDFLKYKPFNLGKATEQYRWNYVEDKVYPCNSTHYKIAKRLLDVKGQPCLNSSQELALWHILYSVDDLIELRKALDSFAIKNSIDRESFVENFIHIEPFDDDYGAYSEKAIKKLLPLMRIGKFWKEDAIDSKTRERIDNIIDGIADESISTRVREKAIRLSDIDSFQYLPLWLACYVVYDRHSESSDTGKWQSPEDIDRFLQNEFKQHSLRNPIVEMVLGEAIRVVRDIWKTYGDISEVHVEMGRDLKKNNQERRDETIRILNNERRNLRIRLLLQEFVNPEYKIEGVRPHSPSQQEILKIYEENALANIGNDDEAEDIQLIADNLGNSTKHVSKSEIMRYRLWLEQKYKSPYTGNIIPLSKLFTPLYEIEHVIPQSRYFDDSLSNKVICESEVNKLKDRMLGYEFITKHAGEIIQGQKGVQIKVFDKVQYEDFVKTHYANNRGKMKKLLMEDIPDQFIERQLNDSRYIARKTIEILSHLVREENETEATSKNVIATNGSITDKLKREWGINEVWNDIIFPRFQRLNDLTNTNDYGKWVENNGKRYFQINIPMEISQGFNKKRIDHRHHAMDAIVIACTTRDHINYLNNQAALSSEKDRRHDLQHKLCTKVKTDDKGNYIWQFNKPWKTFTQDVRNELQGIVVSFKQNLRVINKMTNFYWHYENGKKVLARQTRGDGWAIRKSLHKATVSGAVRIQTKKTVKLSEALDNWHMIADKELRKDIKRLIEAYHKFDKKTILRYYKDRQNKLGEKDISKVEVYYTPAVPDLSATRVTLDTSFDKKKIESITDSGIRKILLRHLENNENDPKIAFTPEGIANMNRHIKALNDGKDHKPILKVRKTESFGLKFPVGEVNNKRRKFVEADKGTNLFFAIYVDEDGKRSFESIPFNVAVERMKNGEHVAPGVDENGNKLLFTLSPGDLVYVPEDGEHVDEIKDTNKIWKFVSCSTNRSFYILANIATPISNGKEFGPLNKMELTDEKISIKGVCLKLQVNRLGIITKIYK

SEQ ID NO: 9264 - protein, 1533 aa, unidentified
  REGION 1..1533: note = Description of Unknown: Cas Enzyme sequence
MKKILGLDLGTNSIGWAIVESDNHNGRIIKSGSRIIPMGAATLGDFASGNTKSQTKERTAKRTARRMRERFLLRRERLHRLLHILGFLPEHYDKAIGWDLENDCKHYGTFLNDEEPKIAWKKNPFHKYEFIFTSSFQEMLEDFKKQHPTLISDGKRIPYDWTLYYLRQKALSQPVSKEELAWIILNFNQKRGYNQLRDEVLESDGDKKEEYLSLIVSSVTPDEDSKGKDVWYNIRFENSDIIYRRKSKYPLEWVGKKRNLIVTTKLDENGQPKLKKDGSIDYSVKSPNDDDWALQKIKTEQDLKASQQTVGQYIYAALLSNPSEKIRGGLVRTIERDFYKDELKQILNAQSAFHPELRNRELYERCIHELYANNQSHRNNIAHNDFTYLILEDVLFYQRPLKIKKSLIDDCPYESHKGIDKETGEIRTYPLKCIAKSNPYFQEYRVWKFISDLRIIANAKEINGHIQSDVDVTDAFIPDNQSWSDLFLWLNDKGHIEQNELLTHLGIKKKEQANYRWNFVADKKYPMNTTRHALLSKMQANEVLKRDTEQALWNLLYSTKSKAEIDKSLSPSEKSHCIYNTLMKAGLSESTIEKIKTTKFPDEGYGAYSEKAIKKLLPLMRCGTCWSEDGIHTQTLQRIQQYQQGQEMDNFSDNVRLRISSMTDTHSFQRLPEWLACHITYGRHSEAQDIAKWSSPDDIDRYLNNFKQHSLRNPIVECVILETLRVVRDIWKRYGDIDEIHIELGRDLKNPSDKRARMTQRILQNENTNLRIKALLAEMAAEEFEVQNVRPHSPSQQELLRIYEEDVLVHNEPDEEIRNIMNDLSNPTKQPARSQVIRYKCWLDQKYCSPYTGQPIPLSRLFTSDYEIEHIIPQSRYFDDSFSNKVICEAEVNKLKDNQLGYEFIKQHHGQTLKLASGRMARILEVEQYEQLVKDNFTQDKRRKLLMDDIPAEFIQRQLNDSRYISKVVKALLSNIVRTVDGDGNLEREAISKNAITCNGSITTRLKRDWGLGEVWNAIVLPRFQRLNELTGRDCFTSLNSHGQPIPTIPLELQKGFSIKRIDHRHHALDAIVIACTTREHVNLLNNESALPKNKEMKHALSHKLRNCQEVVINGNKRTVYKEFIMPWASFKHDALQSLQDIVVSFKQNLRVLTQATNLYTAYENGKKVQKSQHGADHYAIRKSLHKDTVFGHVNLQRITIVKLKEALKDVNRIVDKRLKKRIKELISQHFNEKQLLVYFKEHGYEWKGYDFNKVSVFYYTDEKEMMVATRFCNDLVSVFSGKSKRKDIEKAIEQITDTGIQRILTNYLNANSDNIEFAFSAEGLEKMNENIAEYNNGKQHKPIYKVRIFQPKGNKFQIGVKGHNDSKYVVADAGTNLFFATYCNNENQRKYKTLPLEEIIERMKQGLHPVNETDEYGNILLFHISPNDLIYLPTNEELINGNIDYDKLCTDRIYRFVDSSGTTANFVPNTVANVIYHLKKEDAEIFCKGKIIQDELGKGSPQSKNQKAMTGEMIKETCVPLIVDRLGNVMKK

SEQ ID NO: 9265 - protein, 995 aa, unidentified
  REGION 1..995: note = Description of Unknown: Cas Enzyme sequence
MKKILGLDLGTTSIGWALVNEAESAEEKSSIIRMGVRLVPLDNFKNSEGKDIKQKKEDAFCAGISMSTRAARRNARSARINNERYKQRREELKKIFRSAGWIENDTPLCEDGKGSTYELLRLRAKAVSEEVSLAELSRILLAINKKRGYKSNRKLKAADEGEAIDGMTLARELYDKGLTPGQYVYRQFLDGKKYVPQFYPSDLKSELEKIWNTHVPAFPQLTVDIWDDLLGKNGKATWAILDEALQLEGIKKPDRQKLYEWRASAVTTPLDKEQFATVVQMINTEISNTSGYLGEISDRSKLLYFKHQTIGQHLWSIIQDNPHTSLKCKVFYREDYMDEFEHIWETQCKFHPELTEELKRQIRDCCIFYQRPLKSQKGTLDFCTFERHEKKKTIHGKEVTVVEGLKVCPKSSPIYQEFRIWQVLNNLELIDKRAYTVRPLTQDEKEIIFAQLNMSDKMTKNEVLKLIVSTPRKYDLNYEELPGNTTRTRMYEAFVKMLPVTGHDEIDLKKARAKDVEAVVRGVFETVGFNTAILDFDATLEGEEFQQQPSYRLWHLLYSSEGKNLKENISDLCGMGEYDECAKILSKISFVNDYGSLSTKAIRKILPRMKAGMKYDEACEKAGYRHSPRSLTREERDRRVLPDQLPQYRNGSLRNPVVDKVLAQMTNVVNAIIREYGKPDEVRVEMAREMKRNASERRKMSDAIQENTKEAKRISKLLKDEFGIQNATRNQILRWRLYEELAFNGYHTLYSNQHIPQEKVLTKEIEIEHIIPQARYFDDSFANKTLEYASVNLEKGADTAYDYICGKYDQEKVEEYEKRINDAFVDKKISKRKRDYLLMKQENIPDDFVQRDLRETQYITRKALEMLESVIPSVVATCGSITDYLRKEWQLIGVLKELNADKIKISGLQDTWTKRADNRHHAMDALTVAYTKRGFVQYLNKLNAHYNEGKPRKITSPMPVGELRHSALLHLGNILISARISKKVATAHYNKKTGQ

SEQ ID NO: 9266 - protein, 1000 aa, unidentified
  REGION 1..1000: note = Description of Unknown: Cas Enzyme sequence
MAEPYLVLGLDPGISSCGFALLDMSNHKILEMGSHLFDAPQDSQTKVSLAVGRRNARSARRNNLRTKNRQKHCMELLQEAGLVPQGVTKQWFQSTKGDRPLLELRFAALERPLTNREFAQVLYALSARRGYIPHGEGRISKLSDMDTSGSSDAEAGKVLRAIGENNKLMAQGRFRTVGEMLYDQGKSRNKGGSYERCVLNSQIVDEVHIVFQSQRTQQNTTATQELEAEYIQNLTWEKRTLDHDAKVHALVGKCSYFPDEFRAARADLSSELCNAYERLKHLRIVNADGDEVALAPEQVETYIAILFSPEPLKGKKEKVTYARIRKDLDLSAHLFFKGIDPEDEKDHEPYAPKAWRAMRKVLSTELMERLRSDRTLADAVGEALTYASSEDSLVYQLDNLDLRDEERNQILALPFSGKIFKGYGSRSLKALDMLVDAFEESEVTTLAEAEESSGLFGLRMSDSGARYPLLPSYSNYDKENRNPVVLRAMGRMRRIVNAIIRIYGVPDEIHVELGRDLKRSKHEKDLINKRNRENERKNKQWRAQIAEEQGIDPDEVRPKLLRKIALWEEQDNFDIYTGHKIEFDRMISDDKYCEIDHVLPYSRTCDDSRNNKVLVLAKSNQDKRERTPYEWMTQDARKGTPNWDEYQARVIANHHISPRKRRYLLNNNLGPDQESDFLSRNLNDDRYMSREVKSYLEDTLIFPEDGRVKHVIAVSGGATGSLRHVWGLNFGANNSKDRSDNRHHAVDACVIAACSESTLQAVAKARKLGAETYKRMRKDRLKDTQPWPTFADEVIARREFVIPTHMVSHGVTGRAFEDTNYRFDGITNDTKKLGILYGNGKTTKKGNFVIGSDGNAHLVDGMAFLRLWLDPTARKGKGKWYAEPVYYADIPAIKNGTYKPRAAKAHVARVAWEPVPENALASAPVVLFSDSVIKVGSAIARYSRFDIGNAALVLENLKTGEECKKFPTLGRWDNELVPIIINEDCLGHCYKELVPNILEG

SEQ ID NO: 9267 - protein, 1510 aa, unidentified
  REGION 1..1510: note = Description of Unknown: Cas Enzyme sequence
MAKILGLDLGTNSIGWAVIDDEIKQIVSAGSRIIPMEAGRLGDFEKGNSVSFTAERTQSRGMRRLHERFLLRRERLIRVLRIMGFLPDHFSSQLSRYGKLPEDRELKLAWREGPDGQMEFLFKAAFEEMVADFHRAGVDTKIPYDWTIYYLRQKALTQPISQQELAWILLQFNQKRGYHQLRGKADEGLDDSKEKNEEKSYHELQVIKVEDTHEPLKGGRSWYNITLENGWVYKCLSLVKPDWEGKTKSFIATFQLDKDGNRKSDQPKLRSPQGDDWGLRKIKTEHDIEQSGLTIGAYIYQSLLHHPDQKIIGGHVQTVDRKLYLSELRSILDQQKKHIPELNDHGLYLRCLEELYPNNEAYRNSIANRDFTYLLADDILFYQRPLKSKRSLIDNCPFETRHDKPIKCIAKSHPLFQEFRIWQFISNLHIFESYNDVTPIFLPDHEAYANLFDFLSSIKSIDQKGLFRYLKIPKNDASKYHWNYVQDKDYPVGETRAILLEGLRKANIPNTFLTPEKEEHLWHILYSVDDPTQYRTALRTFAKHQGWDDRLTDSFAQAFDRLTVYKEKEYGAYSAKAISRLLPLMRRGKYWNPSAIDKDTLSRIEHIITGESDPTLTPFVRDKFSHLHDIAQCQGLGTWQACYLVYNRHSEAIDTAKWNKPEDIDIFLNQFRHNSLNNPVVEQIVTECLRVVRDIWRQVGHPDEIHIELGRELKKTKAERERLTKIITEGENTNQRIRLLLLELLNPDFQVDDVRPQSPSQQEKLKIYEEGVFQSGIEIPDDIQDIQKRFTSPKNKPTHAEVIRYKLWLDQKYISPYTGKPIPLSKLFTTAYQIEHIIPQSRWFDDSYSNKVICESEVNQLKDRELGHEFIVHHAGEEVPLNLGGTVKIFTADQYEEHIKTTFASNPKKMRNLMLDEIPEDFTSRQMNDSRYISRLMMQLLSNIVRTEDEEGNVENAATSKNVIACNGAVTDRLKHDWGLDDVWNRIILPRFERLNIITDTTDYTDTTPNGHTIPSVPVDLRPGFNKKRIDHRHHAMDAIVIACTTRNHVNLLSNEAAKSNKRYDLQHTLRQTEYYQDPQGNKHERFTLFYKPWPSFTQDAYQALQSIVVSFKQNLRVINKTSNRYTIIQDGKHITVKQTKGDNWAIRKPLHKETVFGEVNLQLTKKVRIKEALKGPNSIVDRELKAKIKEQKALHYTDKQIIEYLNKHKDIWSEAADGKIEVYYYTKDTSDRYFATRYNHELSKYLGSCSNKTEAIDRISKITDTGIQKILLAHLYFEQEKPSIAFSPEGIERLNKNIKELNNGKQHQPIKKVRVWTKGEKFTLTEKGPKSKKYYNGDDGKNTHYVIYTLGNSKKRNFLVIELPVSIECQKRYGKHWKDRIEDFLKSYGKNTEKTKNGLLPENAHIVQILSTGDTVYMPDSDTHITSRPIDPSRLYQIRSFDENHFYCMPINVANIILKGKEFGSQDKTQKEIHYPNNNSLGEKNSDNMIRDFCIPIQVDRLGNITKIG

SEQ ID NO: 9268 - protein, 1372 aa, unidentified
  REGION 1..1372: note = Description of Unknown: Cas Enzyme sequence
MKKVLGLDLGTASIGWAMVNSADNSDEKSEILGCGSRVIPISAEEKDSFEKGKSITTNANRTLKRSMRRTLQRRKQRRDRLLQLLMEESWIQPGEILSEKGKGSTYETLRLRAQAAQSEISLSELARVLLSINNKRGYKSSRKLDFAEEGKLIDGMSIAKQLAESGQTPAQYALEISQNGKYTQLEFYRSDLEAERDRVWMVQQNYHPDILTDDFKRKVEHLSKAGTSKEFLKRYGVYTADNKGKDKKKVSLEWRVKALSENLEIEVLAYVISDLQGEIQGASGYLGSISDRSKELFFRSETVGQYLYRNLKEQPGYSTRNKVFYRQDYIKEFWRIWSVQSQYHPELSTELAKKIADTILFYQRPLKSQKALIAFCEFESHPIQVVIDGKTKMRTSGSRVAPKSSLLFQEFKIWQILNQLSVTDRTVDETFGLSQEQKEHLALLLSVREKLSATEVLKYLQLSPRRYELNYKEIEGNKTFSKIYEKLFAIVRESGHGEYELNKLSYEDAVRVLREVLPVLGCSVDVFSFDSSLPKEEYEQQTVFKLWHLLYSYEGDNSPTGEVALVRRIEQLTGLEEPWAKMLAGVHFQDDYASLSHKAMTKILPYLKRGDLYSEACAKAGYNHSHSLTREERDSRTLVSRLEQIPKGALRNPVVEKVINQMINVVNAADAAYGKPDEVHIELARDLKMSAKEREKATNGIQENNKRNASITKILQEEFHIASVRKSDILRYRLYEELKENGYKTLYSNRYIPKSAIFSKDIDIEHIIPQALMFDDSFANKTLEYNDVNIEKGRRTALSYVEDKYSEDEVMQFRLRVDDLCKRGSISPKKKQYLLMREKDIPDGFVERDLRNSQYIAKKAREILESYVHLVMPTTGSVTARLREDWQLVDIMKEINLTKYQRADRTYEETCLDGRTVLKIKDWSKREDHRHHAMDAITIAFTQPRHIHILNNLRAKLGSEDFQDFFRENTTDTGKKRIFTPPMPLNELRKEVRTHLGAALVSIKTKNKVVTKNINKIQTANGVLRQEELTPRGALHKETVYGQRKVYEVFYLPVNAKMTEEVLMNVASAAERRALKERLDAYGGDAKKAFAGKNSPKNTPIFVDAARQVIVPEKVKCVRFKYVYSIRKNVAPDLSIDKILDKCAKAKIEERVREFGGDVKAALSNLDINPIWLDDAKTIPIKRVTITENFDLVALHNKKDKNGQLITDLENAPQPCDFVNLRNNHHIALYKDADGQIQERLVSLFDALQRVNMHLPVVDKQHYADLGWTFLYSMKINEMFVFPEPENGFFPDELDLLDPANAAIISPHLFRVQKLSSKDYCFRHHLETSVRNEEKELRDITWKRVTSIQSMEKVVKVRINHLGRIVAVGEYD

SEQ ID NO: 9269 - protein, 1279 aa, unidentified
  REGION 1..1279: note = Description of Unknown: Cas Enzyme sequence
MGKQLSFSFDIGITSIGIAVAEDKNLKYLGVRMFDQAKESKDSRLARSARRNTKRKQWRKKQLRNAFADFGLLSEEELKTPNFGSFTAKSDAFPTPKDRTVYHLRKRALSEQITLRELYLCLLNMLHARGHFNMEMYDFTKETITYEEFADKFYSACEPYFQVKETEKKAFEDEYLKVLFKESVPATLIRKVSKEAYVPEEQNDAFIEILSLLAGKKAKLNKVDPDLNLTKDSYNMNDLKASEEELDDFLLECIDLFDMAKIAQILSKYSFLCEKAVAELDEYERIITTYGKDSKEYAEKVKEIKGISKGSHPRAWRNIENNYPNGLYVKEASAILNQQQNYYPQLITSDFIEAVIAIIKARIPYYIGPLSNTGKNAWISRNDAIPFKYSYEYTQKHSNGTAVNEPISIKAWKERMISHCTYLPEEYALPKGSFLGETFNILNELNILSAYSNTGDSYYLTLDDKTKVFDTLFLKNKSVKYKDVAELLDLKSYGPVKSGTKEPVFNNTYTLYLSIAKIIPELKLNSIMDVFDEPDKIQKIEDIILAANLYDEEKSKIDYFTNEMSYSKDIAAKLAKLKSTSFYSFSKKFIYEQPIDGAHGTLLSKLFEDNTSKYTNEQMPLITMAIDSDGKPLNFIANKYIQKLKTTNGELSIDLLLDNGKPVIPTSRPVIRALNECMKVYSELVNVYGVPDRVIIETARDFKDFNENKTITESHFKSMEKLYDKLMSDIKENHLYDGKKNIEGWDEIKQYLEKNKTKIELYIRQNGTDLLTGEKIDIHRLNDYEIDHILPRGFGDDSKDDKMLISRLANAKKGDRLPLQFIESGEMIGTLKTTSSEYEKRVKSLFDCKLISEQKFKRLMLATTSELEGFINQNLVDTRYIIREFMSILRAYSTVHKYSTHIVALKSAYTKTYRRAFNMDKERDFGDQHHAHDAAILLIADKTLSAMYPHYDERKSSKGKNSSFKSYEDFMKDMNDAHGNDDKAREKAKELNTFIRNAYYKAFGEDYKSPNSFLSQVKATVPFYSKKVEKNYKGKFFEATVLPHKQFSEDAPLTIVGVNDDTKIFSGVECAAVDFYKFTNSKGKKEHLAIHIPKVIISSDGVIDQDKYIALILKHYKKPELIDENGNLKTYYFRFRAFRNDIIYDTAANTPTLFNIGSIVNKKLEKKFINVFSYNDIYTRSHYIAECLTKQFNLKTRSNKSGNNFSDISNSSMVQYTYKHIWHNETISDAHVQNITKYVDKVKNVYELADLLSYYELLLSRPDVPPTVTGRHLPVANYA

SEQ ID NO: 9270 - protein, 992 aa, unidentified
  REGION 1..992: note = Description of Unknown: Cas Enzyme sequence
MKKILGLDLGTNSIGWAVVNADEVTRDDGSRYLKPNGISAAGSRIIPMSADILGDFEKGNSISQTAERTRMRMARRLHERALLRRERLLRVLNLLDFLPKHFADKIDRYGKFTDDSEPKLAWCKNTEGKYEFIFQDAFNEMLAEFKDKRPEIVEEGKKIPYDWTIYYLRKKALEKALSKEELSWLLLQFNQKRGYYQLRGEEEEIPQDKKIEYLAQKIVKVEATDQKKGDDVWYNVYLENGMIYRRTSKAPLDWEGKIKEFIVTTDLEKDGTPKKDKEGNIKRSFRAPQEDDWTLLKKKTEADIEKSRKTVGCYIYDSLLNNPKQKIIGKLVRTVERKFYKDELTQILKKQVEFIPELRDDNLYKQCIEELYPINEAHRNTIAKTDFANLFINDILFYQRPLKSKKSQIDNCPYEERIFIDSKTGEKKKVPVKCIAKSNPLFQEFRLWQFIQNLRIYQREKEIDGKLLTDIDITSECLKSEEDYVRLFDWLNDRETIEQEDLLKHLFNTKKSKNKENPYRWNYVEDKVYPCNETRATILKGLSKCGINESVLSPEMEMALWHILYSVEDKKEIEKALTHFAQKQGWNDDFAKVFSKVKPFKKDYGAYSEKAIKKLLSLMRMGKYWNQDNIDKNTLDRIDKIINGEFDEKISNRVRDNAINLKVVSDFRGLPVWLACYIVYGRHSEAKDCTKWNSPEDIDSYLKEFKQHSLRNPIVEQVVTETLRTVRDIWKQEGQIDEIHLELGRDLKNPADKRKKMSENILKNENTNLRIKAMLMEFKNPSMGIENVRPYSPNQQDILRIYEENALDNLTKDDKDFDFISKISKQAQPSKSDIVRYKCWLEQKYRSPYTGKTISLSKLFTSAYEIEHIIPQSRYFDDSFSNKVICEAEVNKLKDRQLGYEFIAEHHGEKVQLSQGEVVEIFSVDAYEKFVKDNYANNRVKMKKLLMENIPDEFIERQLNDSRYISKVVKRVLSNIVREKIDEENYEPEATS

SEQ ID NO: 9271 - protein, 1410 aa, unidentified
  REGION 1..1410: note = Description of Unknown: Cas Enzyme sequence
MAQKILGIDLGTNSIGLALRNPDSSNEQLEYYSSIVFPSGVGNGQSGEYSYAADRRKYRSARRLYQARKYRIWATLELLINHQCCPLTIDDLDRWRKYDKTKGLKRQYPIDAIPFEQWVRLDFNGNGIPDYSSPYQLREELILKPIDWDSQIDRYKFGRAMYHIAQRRGFKSSKGETLKDSKESEDYSNIEISTSMKKSEEKKSKCLKDYMESHNLKTVGCAFAQLEREGIRVRNSEFQAVQSQYLDEVREVCLFQHIDTLDHTLFTGLTSTKAKEGTIFYRRPLRSQKGTVGKCVLEPSLRRCPTSHPDYEEFRALSFINNIKFRYNNQEEWKSLSPSERVNLYNDCFTRTKPTFKFEEIRKWLEKSYPGNQFSYDNHTINYRDYTTVAGCPVICRLKKIMGEDWRTHIFATNRTRTNYHTGETHSIAYNYEDIWHLAYSSDDYEALAEFAQEAIGFDQKQADELTRLWSAIREGYTSLSLKAIRNILPFLREGMIYSKAVALAKIPDIIGRKCWEEHRDAIMARIDIITTENNYDRCVLGITNTLISNYKSRTIDNQQAYHNTAYKLDSSDKKDVRTCIIDTLSTRRWNNMTHKEQENLQHDVEDLYQQFFSSTKREYYTIPRQSDKLKESLIKQFPEILSKKWDKLYHHSMIDIFPSQKCQNKNTGDRFMNIKQLGTPDIGSIKNPVALRTLHVLRKSINQLLLSGMIDDETRIVVESARDLNDANWRKAIERYQKERDRENSAITEIIKEFRPNYSAEDIEKGRLLFEQIETGTINKEGISSLTNSSHMGKVKATKFATDMQKYKLWSEQKFRCLYTGKYISLTSLFDDNQVDIEHTIPRSISFDNSLANRTVCDPHFNRYSKSNRIPTELPNYEDIKERIKPWEDKVTHIKSQIELWKGYAKTAPTVERKNECIQQRHMWELELNYWQAKLRTFTVQKDDLDLGFRNSQLVDTRIITKYAFHYLKSVFNRVDVQKGSVTADFRKILGIQSVDEKKDREKHSHHAVDAAVLTMIPVAAKRDRMIELFYKGQEAPDSEKGSYLHQLDEEIKTCNVGNISKLVDTIEKNILVNHISKDQTLSQAKKPRYSGKKRIKGQWLQGDSIRGSLHKETFYGAIQNNNTVRLVVRKEPRSLGIKNNKRIKDYDEQRINLIVDKKIRADIAYQVKYYMQEENLTFADALEKDFYCLDKNMKAIKLDKNGRPISHIRHVRCFATSGQGELQYDTALCIKTQTYPSRCKYKNNYYVQNDDNYLCLYYNNEEKEHKAFRLISYYDVAQLHIRNVNALFLEPEFATLKKGNRKHGATEDIRLKAIIKKGTRILLYNNYPEEVRDYDKEKLSNNLYVVYKFNYINKPYIYIYLKHHLEAREEKKTRKEENSYLRFTANKFKALIEHVDFEVDPLGNITFK

SEQ ID NO: 9272 - protein, 1335 aa, unidentified
  REGION 1..1335: note = Description of Unknown: Cas Enzyme sequence
MGEITLGLDIGVGSVGWALINQEQNHLIDMGVRIFNQATPAQESRLARGARRNQRRRKWRERQLLDAFCDFHIVSKEEISQPDYLSYTVNSDIFHRPKDDTVYHLRKRALSEEVSTRELILCLYNICKTRGHFLMETVNFEKESITFPLFVEKFHELIDSYVDFDDQQGFDETVLKKLFEQRKIGQSEIKRYITHGNYGKTERDDSALKEVCNLLNEYKAKLQVLDENLDLEKTVNINDLLKRDDLSDLEQGLIELHDLIRIAQTLKSHNYLCEIAVEKLDKMKDIYALETSDPEEYKKVKDDIQGRMNLSDKKKKQGCKSLKVVKNLTNNYPNGLYVKEARAILQQQQKYNPKISNSFIDICLDIIKARIPYYVGPLSEDGKNAWIKKTGKFKYSYQYSEKQAVDLEDTITAWKQRMISRCTYLPDEYALPKGSLLAEVFSIANEMNNLMASDKNGDTYYLTQKDKVVLFDKLFLVKKQVTFKDVCGALDLDAFGTNMPSNIKRFNNSITLYQSIVKLIPKLKLDSVMEIFENSSKIDEIEQIILYINLYDEELTKREYFEKLYENKDLASKLARLQSKGFYSFSKQFIFKEVMDVNGNTLLEKLFSDNKKDVKNEQMTIITNATDINGKPRNFLSNKYIKKLQKDNRLGIDLLMEDGKPVIPVARPVIRSLNECLKVYSGILDIYGVPDRVVIETARDFDNENKGKMTTNHHDQMKKLYDDLMKQIHEDKKHRLHPNKQLSEWDTIESYLSKNRQKVELYIRQNGRDLLSGDPIDINRLENYEIDHVLPRGFGDNSMGNLMLITHEHNAKKSNRLPLQYIESGECRDESGHIVTSKEYEQRIKELYELKLINELKRERCLLADTDSLEGFINRNLVDTRYIIKEFMSILRAYNQVNEFKTHIVALQSKYTKVYRRAFNMNKTRSLGDQHHAHDAAMLAIADHVLSNYYPNYDRRPNFKAYQKFMAQMSKRDRDEIMTTNHWVRVMYENTYNEYVNDKDSLIAQIKSCVPLYSLKAEKNFKGAFFNATIYPQSDKKEKGVLELLGINNDKHVFSSIECAAVDFYKLKDKKGKAKHVAIHIPKVIIDPDGNINKEKYIKLVRDYYKESDLIDEKGDIKTYYFRFRAFRNDIIYDTCTQMPQKFNIGSIVNQKLELKHIYNFSYNEIYGDMLANKKMIEEQFNLKNKYNNALNARLFKDIVPDQMIDYCLDNLIVIEDRKRLEASVRKFLKTHMNNFWEYLESLAFVGLVINRPCTPKEFYGQYKPVVNNLNIKPKDIHDSKNDTEYVKLKYSILGIRYWKTKDGLQIAGPNRAVNQYSKIRKEKFSWQICREVIK

SEQ ID NO: 9273 - protein, 1359 aa, unidentified
  REGION 1..1359: note = Description of Unknown: Cas Enzyme sequence
MGKDYYLGLDVGTNSVGYAVTDSNYKLIKFKGEPMWGAHVFDDASNCDSRRGFRTARRRLARRKQRIELVREIFASEIAKVDERFFVRLKEAALWRDDVAATDKHILFCDKDFTDKDYFHQYPTIHHLIYELMNSDVPHDVRLVYLAVAWLVAHRGHFLNEMKKDDVESVVQFDMIYADVRQYMRQNDMSEWQEEKADALQKLLPQRQNITAKEKALIEILYEGKKPKAADEELINLAMSVKLLAGGKVDAVKLFPQSGYDDSIKLSFSDKEENFVSAVAQLNEEAQWVLLLRRMYDWALLKDAIKDGDSVSAGKVKVYEQHRRDLRGLKSFIRKYMPKKYGEIFRRVGSNNYVSYSYNVKSVKGDISKIKKATAVDFCDYLRKQVKDIKVEAVDQSFYEDMLARLEAHTFMPKQVNGENRVIPYQLYYHELVCLLNKAESYLPFLQAKDKDGVSNRDKLLSIFTFRIPYFVGPINEKSAFSWIKRRGEGKIYPWNFAQQVDLDKSEEAFIRRMTNKCTYMPGEDVLPLNSMLYQRYMVLNEINPLKVNGRPIDVAAKQKVYELFVQKRRVTSKAIAKCLHDNGYMQKDDILSGVDKNLNASLKSYHDFHSLLERKVLTTDDVERIIERLTYSEDKRRMNNYLAREFPQLDESDRKYVAKLKYADFGRLSKKFLVGFKGINQKTRENATIMDFLWETNDNLMQLLAEDSYTFYTELEAIRKEYYASGEGHLSEMLDDMRIANSVRRSIYRTLDIVKDVCKAQGNPPKKIFLEMARGGGDKGVRTVSRREQIQKLYKEIDKEYANDVKVLSAKLASVSDNRLQSEVLYLYFLQLGRSMYSGQPINIENLKDTTLYNVDHIYPRCFVKDDSLDNKVLVTSNENGAKGDSFPIKDEIRKKMAGLWKKYLQCGLISEKKYNRLMRSTAFSDDERMGFIQRQLVETRQSTKALAAIFKRWYPDTELIYVKAGLVSDFRHEFNMLKCRSINDLHHAKDAYLNIVVGNVYHSKFNRQWFKPSDTYSLKTSTLFGREVKAGSQLVWHGSDDIGRVQQVLQKNNIHYTKYAYKKHGELFKQQPLRKNSGLFPRKGGLDTKKYGGYTGVTTTYFLLVRYVIKEKKTKTELMLLPVTLIDDFRIKNNLISDTDYVKMSIAQITGKDIGMVSDITYPVGLRPIKINGTLMIDGFRVCIAGKSDDNVILKSFMPLIASKDIENYLKKLESFKRKWNINSDLEVNPKYDDITYDKNSELYNWFMDKMTSNPYKKLDILAKFPELMVKNKNKFLSLSLKEQITVLLSIMSLFQIGKTSEFKYDVTLIGGDKSMPKFRKSIKFSNWKKFARDVRIIDISASGLYVSKSPNLLEFL

SEQ ID NO: 9274 - protein, 1367 aa, unidentified
  REGION 1..1367: note = Description of Unknown: Cas Enzyme sequence
VANEKIYLGLDIGTNSVGWAVTNESYKLKKFKNNLMWGVNLFDEAQQSAERRSFRTARRRLDRRKQRVFLLQELFADEILKTDPKFFMRLKESALLPEDSEHREHNIFFDDKNYGDKEYFKEYPTIHHLICELMSNDAPHDIRMVYYACAYILAHRGHFLFSVSKDNIDKITEFKDIYDDFYTALSELCDIPVFDKNAAGMSEILKKHISVKEKTKEIEQLLFGKKSPKADDGDVIAYDKLVSFISGGTVKLSDMFCKEEYKDLEKNSICVKNADLSDTLEMLTGQIDELHLELLVKVKAMYDWSLLVDILNGHKMISKSKVEIFDKHKKDLSDLKYFVRTYLDKKSYDEIFRVISDKANYVSYVYNAPSDSGREKYKRCSQEDFCKFLKPFIEKMQPKEKDQAWYGALLEKCINNDLCPKQVTTDNRVIPYQLYYAELKKILENASKYLPFLNERDSYGTVADKILSIMEFRVPYYVGPLVDAKKSRFAWMIRKNEGKIYPWNFSEMIDEEASENEFIRNMTCKCTYMAGEDVLPKYSLLYSKFNVLNEINNIKVNGEPISVEIKQRLYQDKFVSSRAKVTKKRIAEYFMSIGEFSDKIEITGIDDNVKSSLSSYHDFKRMLEQRILSENDAESIIERITVTNDKKRLKKWLKDNFIKLSYDDISYLSKLKYKDYGRLSRKFLEELHDVDPDSGEVLSESNIISRLWETNDNLMKLLSSKYKYSDSLEAYNRFYYDQPQNKMSLDERLKDMYLAPAVRRSVIRTLDIVKELKSILKRSPDKVFIEMARGEGETPKGKRTISRKEQLSAFLADIDAEDRDVLKKRLDDCDDGKLRSEKYYLYFMQLGKCAYTGKTISFEELEDNHKWNIDHIWPQAKIKDDSLENKVLVDSNANGLKGDKYPIDPEIRKKMSPFWKSLHEKKMMGDKKYNRLMRTTAFTEDELSGFIARQLVETRQSTKAVATVLKELLPETDIVYVKAGLVSEFRQEMDMLKCREVNDLHHAKDAYLNIVMGNIYNTRFTKDPLNFVRKERNYSIKLTTLISKKIERNGEVAWDPSTYFETVRKMMSKNSIRYVRYTYKRKGGLFNQLPERRKEGLVPRKHELAAIKYGGYNNTTASFFSLIKVKDDIVFIPINLMDSRNFQLFDKNSVNIAFSAIKEFYPERKLKNISESDISFPLNHRIIKINTLIEIDGFRVNLCSKDSKGKYISVSSAVSFVVDKEQYDYIKKIESFKKKHDENKKLEVSPYIGITEKSNIELYDLITEKCGKAPFSRWNKFKEAGKILKDGKERFNKENITDQALDLLKAVNILKTGRTGNCDLQFAGGVANFNTVRFNSVLDSKKFKEIYIIDQSPTGLFEKRSENLLEL

SEQ ID NO: 9275 - protein, 1375 aa, unidentified
  REGION 1..1375: note = Description of Unknown: Cas Enzyme sequence
MVSRQLKCTIQWRCCQVQNYSIGLDIGTSSVGWAVIDNDTNKVIKRKKTYYAENGKEKKQTISLWGSRLFDEATPAADRRTKRSQRRRYARRRARIKLLRSLFQEEINKVDNSFFDKLDESFYKENDLENKKHKLSEADKKFIKNYQKKYKTIYHLRKELIDSKERQDIRLIYLAIHHIIKYRGNFNYPGKAENFKVEAIETRNLLQQILEEYKDNLEELDLSYDYYDDKFINEINDTFKIQIKSDRNKKIKDILGRTNTDKAFTGSFASALSGYNFDASKLLALDTNDKLTIKFSDANFDENIEKNSSILGEKVELLLDLKDLYDKVQLKNIFGEYNAKSISDLKLKMYKTHGTNLNKLKKIFKSNIASFNKLFNSSECSYYKYVTNKIDYSEFKKDLDKESIKLTDSFHEKYNNLNNELENDEFLPRITSTDNGQYPYQLNEVELIEIIENQMKYYPFLGDKQNGTYKIAKLLEFKIPYYVGPLNNTTCTKNIKNKNSWLIRNENNENTTINPFNFDEIVNKDATAEEFIKRMISHDTYLLEEEALPNNSILYSEYKVLNELKQISYSDNTHTNKLSAAEIHKIYKELFLKNKNVTKRTFENYIRSNKNISGDIDYKIEGYSSDKGFANNMTSYIDFFGSDGILVNTKYDNNDAEKIIEWITIFEDKDILKSKVQKAYPELTEERIKKITKLKYSGWGRLSRKLLSGILADEDSHYPKKTIIEIMRESNENFMQILNNKEYKFLDTINNLNSSDMSDDLDYSLVENLATSPANKRGIWQALKIVREIVDYLGKERLDSIYLEMARGEGQKVRSTRRKDILKKFINNNTDIFENYKELTNELESFNDKDITERVYLYFMQGGKSLYSKTTIFIEDIFNKDIYEVDHIIPRSLIKDDSLDNKALVLREENQVKGGAFVLPKDFRTGSNYVWWQQLRDRKLISEKKFKSLTRSEMDDKTISGFINRQIVETRQISIHVANILKKTYGESKNISFINANLSHNYREATELFKYRDLNDYHHAKDAYLAVVLGKYKDKMIDKNDVKNSKIIKKLKEQNIDYNKMKYGMLINSLIEKEQSKNYKTGEVIDNKELNNIIKYQMYNNDVLVTKKTEIRTGTLFDETKYSVKDVKGSIKIKNNLSLDYGGYSSLKPSYICLVKYTKKSKEEQKLVGIPIMYANSSENTQINYLKSLLKIDEKANLEILKSNIPFYSILNWNGQICSIVGATDKIEVCNAIEFKFDSKSEEKWKYSLNRLFNNKINSINDEDYDNELSDIINYVYKKIENVYKLYNNLLNELKVNMCLDDLNKIDISTKENILREIFKLLKFNSVNANFKFLDNIYPDKKHSSAFGKKNDRIVNHATIINNSVTGIKTSYYEF

SEQ ID NO: 9276 - protein, 1344 aa, unidentified
  REGION 1..1344: note = Description of Unknown: Cas Enzyme sequence
MSQNNNKIYNIGLDIGDASVGWAVVDEHYNLLKRHGKHMWGSRLFTQANTAVERRSSRSTRRRYNKRRERIRLLRGIMEDMVLDVDPTFFIRLANVSFLDQEDKKDYLKENYHSNYNLFIDKDFNDKTYYDKYPTIYHLRKHLCESKEKEDPRLIYLALHHIVKYRGNFLYEGQKFSMDVSNIEDKMIDVLRQFNEINLFEYVEDRKKIDEVLNVLKEPLSKKHKADKAFALFDTTKDNKAAYKELCAALAGNKFNVTKMLKEAELHDEDEKDISFKFSDATFDDAFVEKQPLLGDCVEFIDLLHDIYSWVELQNILGSAHTSEPSISAAMIQRYEDHKNDLKLLKDVIRKYLPKKYFEVFRDEKSKKNNYCNYINHPSKTPVDEFYKYIKKLIEKIDDPDVKTILNKIELESFMLKQNSRTNGAVPYQMQLDELNKILENQSVYYSDLKDNEDKIRSILTFRIPYYFGPLNITKDRQFDWIIKKEGKENERILPWNANEIVDVDKTADEFIKRMRNFCTYFPDEPVMAKNSLTVSKYEVLNEINKLRINDHLIKRDMKDKMLHTLFMDHKSISANAMKKWLVKNQYFSNTDDIKIEGFQKENACSTSLTPWIDFTKIFGKINESNYDFIEKIIYDVTVFEDKKILRRRLKKEYDLDEEKIKKILKLKYSGWSRLSKKLLSGIKTKYKDSTRTPETVLEVMERTNMNLMQVINDEKLGFKKTIDDANSTSVSGKFSYAEVQELAGSPAIKRGIWQALLIVDEIKKIMKHEPAHVYIEFARNEDEKERKDSFVNQMLKLYKDYDFEDETEKEANKHLKGEDAKSKIRSERLKLYYTQMGKCMYTGKSLDIDRLDTYQVDHIVPQSLLKDDSIDNKVLVLSSENQRKLDDLVIPEMIRNKMFGFWNKLYENKIISPKKFYSLIKSEYSDKDKERFINRQIVETRQITKHVAQIISNHYEATKVVTVRADLSHAFRERYNIYKNRDINDFHHAHDAYIATILGTYIGHRFESLDAKYIYGEYQKIFRNNKNKDKEFNKNKDGFILNSMRNLYEDKDTGEVVWDPEWISRIKKCFYYKDCFVTKKLEENNGTFFNVTVLPNDTNSDKDNTLATVPVNKYRSNVNKYGGFSGVNSFIVAIKGKKKKGKKVIEVNKLTGIPLMYKNADEETKINYLKQAEDLEEVQIGKEILKNQLIEKDGGLYYIVAPTEIINAKQLILNESQTKLVCEIYKAMKYKNYDNLDSEKIIDLYRLLINKMELYYPEYRKQLVKKFEDRYEQLKVISIEEKCNIIKQILATLHCNSSIGKIMYSDFKISTTIGRLNGRTISLDDISFIAESPTGMYSKKYKL

SEQ ID NO: 9277 - protein, 1134 aa, unidentified
  REGION 1..1134: note = Description of Unknown: Cas Enzyme sequence
MEKVNYRIGLDLGIASVGWAAILTDSRGEPQHIIDLGVRVFDKAEVPKTGASLAATRRMARSTRRVIRRRRHRLDRIKLLLQSEGLIQLDAFMSRYNMPGLPDVYKLRYEALDRVLTPDEFAQVLIHLAKHRGFKSNRKSETKSKENGKVLAALNKNKEVFEEKNYRTIGEMIYCDKSFYTEDPSANEGVIFTPRNKAGNYQHMILRSMIEDEVHIIFERQRQLCNKYATKDFEEMYTGILTSQRSFDLGPGKQANGKPSPYAISGFGDRAGICEFEKDEKRAPRATFTAELFVALQRINNLRISCDDGSYRYLNDKERGMLLRELLSRKEITYQQLRSMLSMSEQQRFNLLNYSTKDDTAASVQKTEKAAFIKMTYFYAFSKVFGNKFEELPSVETQDFYDSVATILTEYKNDDSRTERLEKLGINIEQIDALLSMNPSKYQHLSIKAMRKIIPSLLEGYTYDKACERAGYDFRGDSVSKKLHILKGQVITDAINDITNPVVKRSVSQAVKVLNAIILRYGSPMAVNIELSREMAKTYKDREQIKKDNDSRFAENEKIKAELRSNGLISPTGQDIVKYRLWQEQNHICPYSGKMIPYEDLFKPGFEIDHIIPYSITFDDSYRNKVLVYAKENQRKGNRTPYEYLSSDEIEWQKFVARLSICTRDSKKRQKLLKHHVSPAEKAEFKQRNLNDTKYITRMFYNLIRENLELAPMEGKKKQVWAVNGAVTAYLRKRWGFSVKDRSTDKHHALDAVVIACCTDGMIRKISNYSQGRELRYARGFQFVDEETGEVFDRDNFTRDQWDDMFGIRIPKPWQAFTEELEIRMSDNPREILQKDKVLSRKIDYPSWIYNGEQEDGQDILRPIFVSRMPNHKVSGAANEATIQSPRHIDKRIMLTKVPLTQLKLDKTTKEIVNYYNKGSDRLLYNALKMRLVEFNGNAKEAFKTEFRKPKSDGTLGPIVKKVKVEEKTDAGRAINDGHGFAKNDKMVRIDIYNKDGKYYVIPIYVADTVYSELPNKAVKARASEKDWRVMNDEDFLFSLYQNDLLYIESEKGINLWKNKKNGDSTKDKKVEHCLLAYYNSMNRSNAGIAGETSDGAFMFENLGIKNLKRLEKRQVDILGYVTEVGKERRMRFK

SEQ ID NO: 9278 - protein, 1037 aa, unidentified
  REGION 1..1037: note = Description of Unknown: Cas Enzyme sequence
RIKEQVLPRIAYEEEFNKIMEVQKVYYPDLLTNEQIKEFFNFIFYQRELKSCKHLVSICEIEKHIHITPDGKEMVIGPKVAPKSSPISQICKIWETVNNLKISNRYNDILYIDKEKKQEIVAYMNAHFSLKVTDLYKILGISKRDGWWAGKAVGKGLQGNVTRLKIEEALEDLPKNEREDLLKFEVSEEEIIDKETGEIRRIISDKIIHEPLYKLWHMIYSIKDKEELRNALIKSGISNDKTLDKLCELDFVKDGYANKSVKAMRRILPYLMDGELYSDACLSAGFRHSDYHTKEETLAIKLKSSLPQIKKNELRQPVVEKVLNQMINIVNAILSEYGMIDEIRVELARELKQSREERNEAWTAINHNERKNNEIAKRIKEEYGIIPTRNRILKYKMWEETNHFCIYCNKPVGVVEFLKGADYEKEHIIPKSILFDNSFSNQTCSCHDCNHEKGNRTAYDYIKDKYPTTGLETYIDNVNKLYEKKQISKTKRDHLLASYVEYCNRKAKGKETAEDKNLWENFIDRQLRQSQFIATKAVEILHQVCHTVTTTTGSVTDYIRHIWGYDEILHDLNFERFKAVGLTEFVTTVSNGEKKTRERIVNWSKRIDNRHHAIDALAVALTSQGMIQRLNTLNAQRDSMKEEVKDSAIEWEEKSSLLEKWIFAQPHPSYESVKGKVGEILISVKSGQRVTTRGKRYEYKHGKRILKQEGIIVPRKALHDQYVYGQIMQYTKDGDRYVLQPAFVKRYNLGIGAQGFLFTGKETYKETEKKDKNGQIRIIVEDKILDTVNKVVDQKIRRLIINRLNEGFAEGMDYRSNPKKALENLKNLNSNPIYFDEEKTMPIRTVRKYVSSSTMVPVRYDKEGKAISFVEPGRNHSVTIYKMPNGEYKENIITMWQAVERKLNNLNVIIEKPSEVWDEVANRDDIVEEIMRALPPAEGVYITSMQINDAFILGLDNNAVECAINHKDYALLADHLYIVQNLSSMNYRFRRHVESQFDKKDMNTDDKRFYNISSIPALMALNPVKVNISIMGEIKKI

SEQ ID NO: 9279 - protein, 1016 aa, unidentified
  REGION 1..1016: note = Description of Unknown: Cas Enzyme sequence
IRRYIKNHDSKKKHNKEPDELYKNIKSILEPFKGDPDVDAILTRIENEVFLRKQLTSSNGIIPNQVYVMEMKAILENAENYIPFLKEKDSNGLTVSERILMLFRFRLPYFVGPLGGINNKDGNKWAVRVSGEPINPWNIDKVIDMGETQKNFIENLIRHCTYLADEKVIPKNSLLYEKFMVLNELNGINIAGNPIDVELKQDIYNELFMKGKQITRKKLAEYLVKKGKLEKGAENLIGGIDDRFNSYLSSVGKFNGVFKKPYLDHQHIEMIEDIILLGTIYKDSKKTLREQIEKLYGKDSDATLKLTDSQIDKISGFKFKDWGRFSRAFLELEGCSRDDGVVRTIIDALWETNDNLVQLLSQDKYTYTDSLNSRITRGSKSFSEWDIEDLDDMYLSAPVKRMVWQTLKILSEIVEIMGYAPKRVFVEMIRENRVKGEKPKSRKEKLIARYKDSDLKDKKKWIAELNNLTEGDLKSKKLYLYYCQMGMDMYTVKPIDKEQLTNDNIYDIDHIYPRHFVKDDSLENNLVLVDKRVNSKKDDDYPLAHIIRTKCSGLWENLLKNNLISKEKYRRLVRTEKFTLDERVDFVQRQLVETGQGTKAITQILKEALPESSDIVFSKAGVVSQFRKDFDIPKCRSVNEFHHAQDAYLNIVVGNVYFTKFTKSPRNFIKKSMADPKDARYKYHLGKMFEYTVRRGSETSWIHEENGQHNTIDLVKDQVSKTTPLITRRSFIYTGSITNKDTVYGKQKAEKKYLPVKTSDPRLSDVTKYGGRQGVSTAAYTLISYKEGGKEIRSIEPIPVLLFKKDELDIDADVLLKYIENKISSDSRKPCSDFRILHKVIKFYSLLKVDGYYYYIGGCNGNNYYLYNAVPLKLPSNVVFYVKKMDKAIKTEDFSEVDENEKVIITAEKNMELYDILVNKLNSGIYLNRRSNLAATLSSKRDVFKSLTIPDQCKVLQNLIASWGANTQGVDLTLIGKAKTAGRMLLPKNIGNLKECELINLSATGLYEHTVDLLKL

SEQ ID NO: 9280 - protein, 1151 aa, unidentified
  REGION 1..1151: note = Description of Unknown: Cas Enzyme sequence
MKKKILGLDLGVGSVGWALIETEDNQPKKILGMGSRIVPISKDDNDQFSKGQAITKNADRTQRRTARKGYNRYQMRRALLTQVLRDNNMLPERLDENVIDLWKQRSDAATEGHQLTLSQIGRVLYHINQKRGYKHSKADDNGDSKQTKYVEEVNKRYKEIQEAHQTIGQHFYLELLRSKIERANGPYYTYRIKDKVFPRAAYIAEFDQIMKVQRVYYPEILTDELIDTLRNRIIFYQRPLKSCKHLVSLCEFEARPYKTKEGKIVYGGPKCAPRTSPLAQLCAMWETANNITLTNRNNEKYDFTLEQRKQIVDFLCHNKELKVSHLQKILGIGRNDGWYGGKAIGKGIKGNATLNQLREALQGKYDQWLEMPIKHIDVVDATTGEVFWAVSPEVEETPLFRLWHAVYSLQNAEELAKTLREKFQITDVSVIEALCKIDFVKSGYANKSHKFIRRLLPYLMDGMMYSEACERININHSNSMTREEREQRPLKEHIQLLQKNQLRQPVVEKVLNQMINIVNSLKDQYGEIDEARVELARELKQSRDERESAYRAMGQNERRNKDIAAKIAEFGIRPSRSRIQKYKMWEESLHQCFYCGKTIDLAEFLNGADVEIEHIIPRSILFDDSFSNKVCACRRCNQEKGNQTAMEYMETKPAGDLEAYKRRVDEAFTAKRISKTKRDHLLWRKADIPTDFIERQLRQSQYIAVKAVEVLQDGIRQVWTSGGSVTDFLRHQWGYDEILHTLNLPRYRQVEGLTEFVDYEHAGQKHTEERIKNWTKRIDHRHHAIDALTVALTQQGYIQRLNTLEASHDFMEKQVKEAGIHYNEKKSILEKWINEQPHFSVEEVTNAVDGILVSFRAGKRVTTPARRAIYKGGKRMIVQRGIEVPRGALTEETIYGKLGDKFTVKYPLDHPSMKPENIVDPTIRALVQKRVAERGKDAFKEPLYSAEDMEIKSVRCYTSLSENGVVPVKYNEAGEPIGYAKKGNNHHIAIYQDKDGQYQEMVVSFWDAVERKRYGVPVVITNPHKVWDSLLNKDLPQEFLAKLPNDNWQFVLSMQENEMFVLGMEDDEFNDALERQDYITLNKHLYRVQKLTYGDYCFRYHTETKVDDKYEGIEKGRNASLDLGALISIRSFGSLFVKYPHKVKIDILGQI

SEQ ID NO: 9281 - protein, 922 aa, unidentified
  REGION 1..922: note = Description of Unknown: Cas Enzyme sequence
KCKQEDFYARIKNELKDIPDEIKRDILVDIDTNTFLPKQLTNENGVIPYQLHLAELKKILENASEYLEFLNDVDDRGISNKEKIIQLFKFRIPYYVGPLYMDANKKTNAWVVRKEDGKVYPWNFDEKIDKKLSAEIFIERMVRHCTYLNDESALPKDSLKYERFRVLNELNNLRINGERVSPDLKQRIFNELFKTSKKRITKSMLSNYLRSNGIVDKDVELTGFDGTFANALLSYAKFKDLFGIETLTDKQEAAAENIIKWSTVYGDSKKFLKEKIEENYGPESETPLLDKKQIDKVLGYKFKEWGNLSREFLNIEGADKDTGEILPLINRMWEENYNLMELLSNKFTYRDAIAEKAGGIQKSLTEIEYEDLEDLYISSPVKRMTWQTLLILKEIYQVMGYAPKKIFVEMAREEEEKTNGRGARRSSRKKRLEELYKNCKKDSKELSDGITNCDEAQLRSKKLYLYYMQKGKCMYSGKTIDLEKLFTNDYDIDHIYPQSVVKDDSLDNNMVLVDRNYNNKKSDTYPIFSDWQMKMRPFWNILKDEGFLNEEKYKRLTRSDELSDDELANFVNRQLVETRQATKVIAELIKNSFASTDSKVVYAKAGNVSDFRHKFSMKYDRDLGKSKVIHPELVKCRIINDFHHANDAYLNIVVGNVYDVKFTQNPYNYIKEYKKQQANKEQTEREKYHMDKVFDFDVKRGNEVAWVKSGSNNSLETVLKVMRKNTPLVTRMNFEAHGAIANQTIWSADKAKNGIGYISSNTSDERLDPNRYGGYSTLTTTYFFLVEHTKKGKRIRTIEAMPLYLKDKLNTKEKLEEWCADKENGLGLEEPSVRLAKIKMYSRIRIDGFDLCVTGRTGNSLMTSNEIQAKLDPFWGYYIKKLSEYPEKGKDIIGEEYNKKLYDIILDKTINGIYSKRPNPIG

SEQ ID NO: 9282 - protein, 921 aa, unidentified
  REGION 1..921: note = Description of Unknown: Cas Enzyme sequence
SADILGDFDKGNSISQTAERTRLRMMRRLLERNHLRRERLLRVLKVMEFLPEHYDAKVSRYGKFTDSSEPKLPWHKNEGGKTEFLFQDSFNEMLSDFKEHQPQLLADEKKVPYDWTIYYLRKKALTHTITKEELAWILLQFNQKRGYYQLRGEEEEEKANETIEIISAKILSVEKKEKDKKYEKYWYEMRLDNGMTYRATFYNDVTSWEGETKDFVLKRTTLKDGSTKDELSFLPTTEEIDRMDPQRKAKMYAKIKLRTEKEIENSHKTVGCYIYDSLLQNPNQKIIGKLVRTVERKFYKDELIKILEVQQELIPELKDEALYQQCIEELYMTNEAHRRSLSKPDYVNLFVNDILFYQRPLKSKKSLIDDCPYEYHVSKDGKQYPIKCIAKSNPFFQEFRLWQFVQNLRIYQRERTITDGQLDLFTNTTTGKLQTDVDVTSEILRTEDDYVKLFNWLNDRSSIKQDTLLSSYFKVKKEKGKDKYPYRWNYVEEKEYPCNETRAAILSGLTKCNISADFLTHEIEKSLWHILYSIEDKAELYKALKKFAQKHQLEENFAEELSKTKPFKKDYGSYSEKAIKKLLPLMRMGSYWKEEQIDAHTRERIEKIIDGEYDENIKNRVREKAMSLTNIRHFRGLPVWLACYIVYDRHSEAKEIEKWEKPEDIDHYLRNFKQHSLRNPIVEQVITETLRTVRDIWKQEGRIDEIHVELGREMKNPADKRRQMTERIQQNENTNLRIKAMLMEFMNPDMGIENVRPHSPSQQDILRIYEENALDNLSKDDKDYDFVSKISKVAQPSKSDIIRYKCWLEQKYQSPYTGKMIPLSKLFTPAYEIEHVIPQSRYFDDSFSNKVICEAEVNKLKDRQLGFEFIKNHAGEIVQLSQGGTVTIMSVEAYEKFVKDYYSSNRTKMKKLLMEDIPDGF

SEQ ID NO: 9283 - protein, 1365 aa, unidentified
  REGION 1..1365: note = Description of Unknown: Cas Enzyme sequence
MRMYSVGLDLGRYGVGWSVVDYNGKLIRHGKHHHLWGIAMFDLAESAQKRRQYRNIRRRIARRKYRIMLLQTLLQEDMNTVDPVFYARIKESALIREDRTVGNLFLSLPEQLFLDGDSPVKSQKSRSKSIPIYEIRRRLIEEDRPADLRYVYLAMEHILKHRGHFYFENMEPAEAEMEARHAVCEILDYYREKEAIPVPEDDETIQLVVEAICNKDYGANELTEALLALFRSGVRMDAACKAISGLLCGQTVQMKNLLVCHDADSDSRISFANEDVREIMDAQPEEESEMLYNIHFLYEWRQAGLISTEGVSLSAEMDALYKQHSEDLKQLKAWVRKYAGRDVYRTLFHDDYQPCNYNAYTGVHTDQDKYQKENWLRCTQKDFYSYLETILTQDYTDADEKSRQERINEAQSILNRMFTGDGQIRSNGFLPLQRTEQNRMISNQRQMQDLQAIVDHQAKYWPSVAKNRDKILILGSFRVPYYVGPLRQDSKSPFKPWIRYRERGEGHITPWNFEQRINLEETAEAFVEDRVSHCSFIPSELVLPRHSLLYQEYEVLDELNRIRVNGKLIKPTWKRALIDEVYCRYRHVTPGLIRKWFAEHTDLGEKIELSTTGGQVRRIRASLSTRIDMENIFGHKIVPDDPLCQDIEKIVRWSTIFQEKSLYLRILRKNYEGVFTPQQIQALANCRYHGWGRLSRMFLDGVQGKRGETPVTIIEVMRSSNQNLMKAYYSRKYGFAEAIKKLQQRDISDEITYDEIDALPCGPSVKRGIWMAIRVLREIEEVMKEKPASIFVRNMRDDNARRRQDERMEKGRYQRIRQMYQDYERLTGNTIEKALKDELSDRKRSMTDKEYLYFSQMGKCMYSGRRIRLEHTEEYSVDYIVPLSLLADMTMDNQVLVLNSENHRGEKDAMDDRVIQAMSSFWSDLQRAGLISGTKLHRLQMRSYDPELIRDYLMRQLLETSRISMTFTDVLKRHYITSHIYGINARLTQSIRNTEGLTAITDLNDMTQVFDAFLTAHMGAFADRYLANVTDESTRQSVLLDIWKRTHGGDKNGIILSAYNQDQEDEGMFHPEGLSASLRKEYVRSVYYWKDAFFTYMPVVYDGKFYRETIYRPGSHEGVPHRQELPADTYGVHINASTAWIAMVKYTYKDRQVKELISVPVHVAYNVKNNSQAVLDYAREKLEMTEEKGFRGLRIIKDRIRLNQEILIQGTPYYMISASEIIPARQLFLPRELLPVAGSILLRDADEIQEDADNGRITKEELDGLMTHLIDKMLSWHPVYKGICKQLYLQRDQILQVSPHDKAIIIRCLIYCMGTKRRHITPYLKMLHEKILKGENRILGRHITGETITLMDRSVTGIHSKRTVY

SEQ ID NO: 9284 - protein, 1111 aa, unidentified
  REGION 1..1111: note = Description of Unknown: Cas Enzyme sequence
MKYNLALDIGVSSIGTALIELDQNNNRLRLIDAGVRIFEVSEEAETRRTNRTARKNSKRTAKRLKLLSNKLFENGLWVTPDPAGTKKMRVTSPYQIRRNALYEKLENPNYVGRAILHMAKHRGAGWLSEDNQSKDEITEDQTNRKKSVSPFDKLYAGMKNSDAQTVGEYLWMRLQKHKAIRQKTKYNPVDYRIPRYLLKEEFNRIWDKQAEYFEQMRIDGLKDEIFSILFFERPSVPYAIGKCIYYTEEDRLSKIHLLSEMRRIYEEVNNLRVTNIIAQKRPLTIEERDKIVNELLMRGENAGKRNIKKILNIEIDIDKPIKAFLYSTPDFQNIDYVRHCSEEDLARFSEFLTNPVNPNDKEGRLYTEDELIQALKSEYKIGTEQEIGKLLSKLPKSGRGSLGKTATIKILEKLKAKVISHREATEELKEIDEHFRAVDELFREKQGKYTQLPYYGEILRSYTQPIPPFILKNNNNLNEDEKKFGKIANPGVHRILNQIRLVVNEIVKRYGKPYSINIELGRDVGLSEEQKKSLEKRQKDNEKLNEEAKSYLKERNMKITSDNILKYKLAKEQNFIDIYTATVMSQNFEGMEIDHIIPREKGGSDTFNNLCLVNSNNNVEKGNLFPYRYFMTKKSDEEFREIMKKIREIYKKNPGKLWRFEEDTEKKFKNEGDSDETNRYLADTRYVTKLTQQYLRAILDYEHNDDVVHTRILPVRGKETARLRKYWNLEGLEYELMGLDVPKYLDNDKKEHNKEWFSKPRIDHRHHAMDAIVLSCATLSLLQKMQRGDEIKVTSPLGEVESIGGFRKKVIETLLGIKVSHKPERSKSGELHKATKRTVVHKDDKSIFTVYRRSFDCLKSVKDLDKLIVKDKILDEWNPEIAVDREKQFVLKQSILDYMDRSKQLLEEENEKKASEGRTSEKITEAKIVKKAINMLIDEGKCKERSFKCYEESNALIFIERHNVAYESGNNYCMYFFEKSDGKVGWELINRFNANNPDYIPEWRRHKGNKPLWYVCTSDMLELDTPKEWQKYTDQARCLARVKKMSDGRLAIDYMSDARMTSPPKKEIKYFHVDTLDRGLKFFTDHNARKIELTPFGKVKRKHKKLWSGKK

SEQ ID NO: 9285 - protein, 913 aa, unidentified
  REGION 1..913: note = Description of Unknown: Cas Enzyme sequence
KIRKIALLKKLSEAGLCPPLSNEELQAWRVSGVYPLQNEAFMGWQRTDEEKGLNPYAARCKCVEMTLNMDNPAERYIIGRALYHIDQRRGFLSNRKNQTDDKETGVVKDGIKDLTLKIHDAGCEYLCQYFYQLYQRGERIRNCYTDRKEHYEKEFEAICKKQNLDKKLIADLYKIIFVPRPLKSQRCGVAKCPFEPSKHCAPISHPLFEEFRMWSFIRNIKIQTPADNEIRMLNDEEISKILHLWFRKSKPNFSFEDIAKTIAGKGKYCYFRSTDDKPYRFNYHMDTSVAGCSVSAKLNEVFGEAILANREDIDKIWQALDFYDDDQKLREWGIRHYGLSEEQADKFAEIHLPQGYASLSLRAMENIVPLIRDHRMIYPNATLVAKLRDLTKNYSFEKDFDDDVEAYLKADIEEYLSNPIDENGKPLQSREERREDLEYKWRRHYHLSDNDLKKLYHPSMIEEYRHVDHTTNGVYQLGSPRISALKNPMAMRSLFRLKAVVNQLLKDKTIDEDTIVHIEFARELNDANRRTALRHYQTALRKEREEAAEAIKDMIPNPSNDDIQKYLLWMDQGGKCVYTGKSISLSALYNGTEFDIEHTIPRSMGGETIRENLTICDAKFNRAIKQNCLPSQLSEQAQEVLLANIKPWKEKYEELDKQLRRMKNSASGLSTKDARDRVVAKKRLLEMQRDFWRNKYNAFIIEEKDVKGFTRRQGTDISVISRYGRLYLQSLFGRVDVVKGSMTDAFRKIWGIQSAYEKKNRENHVHHCIDAITIACMGKREYDELSAYYHAAEENKYHSSNIVMPKPWKTFTEDIKDIEQEILVAHYTSNPMGKQTKKKLRDSKGHIIRDDQKQALYAQGSTARGALHNDMIYGMITNSQDIDDKHPAGKQCAVKRIPLKEVDVKQVIDPIVK

SEQ ID NO: 9286 - protein, 1209 aa, unidentified
  REGION 1..1209: note = Description of Unknown: Cas Enzyme sequence
KVDPKFFVRIKASALHQEDKKLMDDALVDDTNCIFSDENWGDREFHKKYPTIHHLIVDLMDLDDKNEPRDIRLYYLACAWFVAHRGHFLSEIDGDNIEKLTDIKPLYEDFMNWFTDRGFGQPWNCDAEIFGSVLNEKIRISDKEKKLAESIFGGKAPKDDAEKDVISKAALLKLFAGGETQVKKVFIGEEEFADNTDKISMRMDEENLEAVLATLGDYAEMIVLMKRIYDCAILKDLQHGEQYISKAKVGVYEKHKTDLANLKHIIKTYKPEKYDDIFRNATENSYSAYVGNYKSAPSDAKLPKTAKRDDFYKNIKGILSTIKTDNLSDEDKSLLDSMLSDIDLGVFMPKQVNGDNRVIPKQLYYAEMKRVLEKASNQYSFLTKEDEDGLTVSKKLLSIFNFRVPYFVGPLNEHSNHAWLERRADGKILPWNIEDKVDYEKSEAAFINRMTNSCTYLPGKDVLPRWSLLYTRYTVLNEINNLTIDGKKISVDLKQSIYENVFKKTKKVTVKTLRNYLQCNVQGFGKDSVLGGIDININSSLKPWVEFRNLMDNKTLSADDVERIISMSTYTEDKARFRSWLNENYSLSEADLKYVSGLKYKDFGRLSEEFLNGIEGTSNETGEIGTVMYFLWNTNDNLMQIIADSEKYTFAELIAEERKKAFSTKMSLNDRLDEMGISNAVKRPITRTLDVVKDIVKAQKHAPKKIFIEMARGATEEQKNKRTTSRHNQLLELYKEIKDDDSKQLIKELENLGVEANNKLQSQKLFLYFLQRGRCMYCGKSINLSDLSDNRYCDIDHIWPRSYIKDDSILNNKVLVHTEENAAKGDKYPIPKSLITLEGKQLWESLRKAKSNNFALLNDEKYSRLVRNTGFSENEKTGFINRQLVETQQSTKAIADIMKNKFGDSTEIVFVKASLVSEFRRDYGSIKEKALGLHLTDSDKKGLEMVKCRSINDIHHAKDAYLNIVAGNVYNTKFTKRFFDVSKDTYSLNNRIVFGTPTKDKTSWIPDKHVPIVEKTMSNNHAHLTKYQTIQKGALFDIQPVKASRNGLIPLKSSVVCSKKINLDPNKYGGYSGSKTALFVLVKCNINNKPQLIVLPVDKISYGDFFGNKSKADAYVQKHISNAKDIVFPLGKRLLKINTVISLDGFNICISGKHDESRITFRSLESCIYSKEIELYIKKIEKALEKLKNNKDYVIDEKYDGISAKNNNK

SEQ ID NO: 9287 - protein, 1081 aa, unidentified
  REGION 1..1081: note = Description of Unknown: Cas Enzyme sequence
VRSTQVDDLKKFLFELVVIIQRDLDSNTILYIKGVFVNMKENREYYIGLDIGTDSVGYAVTDTRYNLIKYKGEPMWGSHLFDPAKQSAERRGFRTARRRLDRRQQRVCLVDEIFASEVGKIDENFYIRKQEAALQKEDKSYSDEVYLYFNDNGYTDSLYHKEFPTIHHLICELMNDKERVFDIRLINIAVDWLVAHRGHFLNDIGIDNVDKVREFDSTYESFMEYFELNDIDKPWDKVDPNAFGEILKIRGVNNKKAAFKKLLYNDSIPNDEYFMNKKELIAFLSGGKVRACKLFYDSDFEDDISMSISDDMEELLGKLGDYSDIVARMAAMYDWSVLSDILGDSASISEAKVKQYEQHKKDLRNLKRFVRKYAPDKYNEIFKEASEKVANYTKYSYNMKNVHSNADLPKRKAEKEDFYAFIKKTLKLDKIKVDSREDEILVEDMINRMNDGTYMPKQVNTDNRVIPYQLYFYELKKILENSSKHYSFLLNKDSDGYSNIDKIESIFTFKIPYYVGPLRTDNGKYGWMIRKAEGKIYPWNFEDKVDLEKSENAFIDRMTNMCTYLPGESVIPKCSLLYSKYTVLNEINNIKSNEKKISVEAKKGIYNDLFCKYAKVTPKRIKEYLVSRGYIEKDDSITGIDENINASLKSRYGFKNIIEKGVLSEEDIERIIARSTYSEDKNRYKKWLKREYPTLSDEDYKYVSKLKYKDFGRLSREFLCVIEGADKVTGEKGTIIHFLWETNDNLMQLLSDRYTFMEQIGEIRKSYYSENPMTITDIMDGLGISNAVKRPVKRTLAVVDDVVSTMKYPPKKIFVEMARGTDEVKQRTKSRKDQILELYKVVDADTRELERQLEEMGDYANNNLQSDALFLYYMQLGKCMYSGKPIDITQLKSTKYNIDHIYPQSMVKDDSVLNNKVLVISEINGEKKDVYPIDSSIRANMHSTWKMMVDNGLITKEKYARLVRSTPFTEEEKYGFINRQLVETRQSMKAVTQILNNIYPDTEIVYVKAKLASDFRHDFDLTPKSRLINDLHHAKDAYLNVVVGNVYNERFTKKWFSITDKYTLNSKKLFQKEIIHGEEII

SEQ ID NO: 9288 - protein, 1186 aa, unidentified
  REGION 1..1186: note = Description of Unknown: Cas Enzyme sequence
IVGLSDSYSIPWKEEDSEALRKVLPMSLTPTIKYKELKALLFPDGKLPKDIPEEQFPISCEIMLKALCGSKIAAKDLFNSSAYEDIESFSLSSDDETIAGIIAELGDDGELVIRLKAIYDWSVLIDVLNGNSVSSAKDRENEMSISAAKVKIYQQHAKDLKILKYLVRKYLPSKYNEIFRSEKEGSYTAYAKHQKNEKRIPKKWASKTVFSEYLKSILKNLSVEKEDELMYADMMERLNTNTFLPKQRDTDNRVIPYQLYWYELNMILKNARSYLPFLMDKDENGSTVSEKILSVLSFKIPYYVGPLNSNSEHAWIVKKGSGRIYPWNFEQVVDLDKSEDEFIRRMVNGCSYLADGKCLPKESLLYRKYMVLNEINNIKINGIKISVQLKQSIYNDLFCSYRKVTRKRIEDYLLSNGHIEKREELSGIDIKINANLSSYHDFKLLLKEGKLSEEDVERIIERRTYSEDKPRYIKWLKDKYPILSEDDIRYLAKLRYKEFGRLSKDFLNQLEGEDDQGNKLTIMSALWNTNNNLMELLSNSFTFGKVIEDHNTEYYSEHPSSVEKRLDDMYISNAVKRPVLRTLEVMKEVTKALGKTPDKVFIEMARGASQDQKHKRTRTRKQQLIEYYKNIDTEDVRLLRKELEDMGDMADNRLQSDQLYLYFMQLGRSMYSGERIDIKRLGSKLYDIDHIYPQRMVKDDSLLNNKVLCLSEENGSIKKDRYPVPAEWRKKQKFFWKMLKDKHLITEEKYKRLMRGAEFSDDEKLGFINRQLTETSQSSKAVASLLKEFYPGIEIIYVKARLTSEFRSEFKMFKSRSFNDLHHAKDAYLNIVTGNVYNTRFSKKWFSLREDYSLNTKAIFGKRLWYDPNGDMVWGGYPMLGAIRETVEKNNAHLTQYAFCRHGKYFDQNPVKKGADLIPRKAGLSTEKYGGYNKTTASFFMLVKYKAGKKQDIVVLPIELLFVDQCMKNHDYADQYVKEQIEKIYNVKVDKIEFPLGDRKLKINTIFAIDGFRFALSSKENRGKNIIASPMMAFSGNGSWQNYLHHIDSFSSKHKENNNIVYDEKHDKVRKDKNIELYDMYINKLKSSVYAKRPRNPLKILEDGRETFCKLEIVEQIEIIQSIHQVFGRASGGVNLLGIGGKKSSGKTSLSAALSNLGKNYKEVYIIDPSVTGLWEKRSENLLDML

SEQ ID NO: 9289 - protein, 1575 aa, unidentified
  REGION 1..1575: note = Description of Unknown: Cas Enzyme sequence
LWQNNQKTINMKKILGLDLGTNSIGWAVVNAEETKRDNDTTYLKPIGINSAGSRILPMSADILGEFERGNSISQTSERTRLRMVRRIHERCILRRERMLRTLKTLGFLPAHFADQIDEYGKYINSNEPKIAWIIREDGERDFLFQDSFKEMLDDFALNQPQIVANGKKVPYDWTIYYLRKKALTHRITKEELAWILLQFNQKRGYYQLRGEEEEEKSNEKTEIITAKILSVERKEKDKKYDKYWYEMSLDNGLVYRSTFYNDVSNWQGESKDFVLKTTILKDGSSKNELSFLPTMDEIERMDPQRKAKMYAKIKLRTEKDIENSKETVGCHIYNNLLHHPDQKIIGKFIRTIERKFYKEELIQILHAQQELMPELRDSGLYKKCIENLYPSNDTHRNNISKVDFVNLFVNDILFYQRPLKTKKSLIANCPYEFHKDKDGNLRPVKCIAKSNPLFQEFRLWQFVQNLRIFQRERIVSDGQLDLFDNSTTGKLQTDVDVTSEFLKTEEDYVKLFEWLNDRNSIKQDTLLNSFFKVKKEKGKDQYPYRWNYVEDKEYPCNETRAAMIGGLEKSGISKDILTHETEMALWHILYSVEDKQEIGKALKTFANKNNLGDNFAEVFCKIKPYKKDYGSYSEKAIRKLLPLIRIGRYWSKDDIDAKTLERIEKIVTGEYDETIKNRVREKAINLTEIEHFKGLPIWLACYIVYDRHSEAKEIEKWETPDDIDRYLRSFKQHSLHNPIVEQVITETLRTVRDIWKKEGNIDEIHVELGRDMKNPADKRKRMTERILQNESTNLRIKAMLMEFLNPEMGIENVRPYSPSQQEILKIYEENALDNLTKEDKNFEFVSKMAKTAQPSKSDIIRYKCWLEQKYKSPYTGRMIPLSKLFTTDYEIEHIIPQSRYFDDSLSNKVICEAEVNKLKDRQLGYEFIKNCAGQKVSLNFGDTAEILSLEKYESLVKDVYAGNRTKMKKLLMEDIPDDFIERQMNDSRYISKVVKGLLSNIVREKQENGEYEQEAVSKNLISCNGNIIDHLKRDWGMNDVWNNIVLPRFQRLNDLTGTKNFTTLNHEGHEIPNMPFELQRGFNKKRIDHRHHAMDAIVIACTTRDHVNLLNNEAALSKNNKNRQQLQNKLRHFITLTINGKERRFAQYFLKPWDSFTNDAYQVLQNIIVSFKQNLRVINKTTNSYIHYDESGKKKFVKQIHGDSWAIRKSMHKDTVFGEVNLRRKKTVSLNEALNNPKNIVNKDFKKKLIELLDEGRDAKFIKKYIEENKDIWSDINTSKIEVYYFTQDEKKRNGEPKERYFATRKTLDTSFDKKKISESVTDTGIQKILIAHLEKKDNNPEQAFSPDGIEEMNRNIVALNNGRFHQPILKVRVYEKADKFSVGQTGNKSKKFVEAAKGTNLFFAIIGRESINEESGEKEIVRSYLTIPLQLMIECQKKYKAHWNNKIDKFLQEKELISVDENLLFILSPNDLVYLPTKENMKEERIKIDKQRIYKFIDPGMNTGNFIPFIAAKTIFSVKTTDQKKIGVSYPIQDEFGMGSQASKSPRALTGEMIKETCLPIKVDRLGNIIKIGY

SEQ ID NO: 9290 - protein, 1344 aa, unidentified
  REGION 1..1344: note = Description of Unknown: Cas Enzyme sequence
MGQKRQYGDYYLGLDIGTESVGWAVTNPDYRLLKFGPKAMWGSRLFPLAKTSVERRTYRIARRRTQRKNQRLGLLQDLFKDEICKIDPQFFVRLNESMLHEEHKSVKDKNSLFADAGFDDKAYHKAYPTIYHLRKELLHSCEPHDIRLVYLAIHHIIKYRGHFLFQGTLDSATDFESMIQSLNDDLINNLDKDLSCSSYDEMKNILSNRSMTKTDKQKKLFSLCGCTQKSPVGMLLKLITGSKVGIWDIFPGENMPADSEEDIKVDFESDEYEQNSSKFEALLSDDYIILEKAKAIHDWMLLEGILHDQEYLSDAKIDIYEQHAKDLAQLKKIIRQYKPDAYNQIFKNPSVKNNYCAYAGVAKVKRKKVSIEKRCTQADFNKYVQSILRDVTATDPELEAVKTRLAAGTFMPKLRTKDNGIIPNQLQFKELKQILKNASEYLPFLQETDQDGISVSSKIEQILTFRIPYYVGPLNDRDPNANNTWVVRRSHEKVYPWNFDEIVDREQSATRFITRMTAQCTYLINQPVLPQNSLVYSRFMVLNELNNMRIDGEQIPVKLKQDIYTDCFEKGKKVTMNALLNYLKSRGYNISKDQITGIDGGFHTSLKMWSDMRSLLGDKFQISIAETIIRLSTVLGEDKAMFRRQLKMELGNALSEEVISKAANIRCTGWGRLSEKLLTQIYDRYSYNDALEPRNIITALWETNENLMQLLGGDHGYAQEIEKYNAQLEGVSDFTYNTVRDLYVSPSVKRSIWQALQLVKEIRKITGHDPQKVFIEMARGGGEKNVRKESRKTNLVALFKACRDETRDWISELNAHDDSEYRSDKLYLYYTQMGKCMYTGEEIDLNRLFDQNVYDIDHIYPRSKIKDDSLDNRVLVRKDVNSKKTDAYPIQKDIREKMHSFWAVLLQKGFISQKKYDRLVRGNELTDDELSDFVARQLVETRQSTKMVADLLKQLLPDTDIVYVKANLVSEFRQNYDMLKCREVNDLHHGKDAYLNIVVGNVYHTKFTKDPRNFFREKDHTYSLNRMFDYPVKRGHCVAWIPGSEGSLHVVQEMMNKNNVLVTEMVQDYSGQLFDVQPVKKQVWEMPLKQKEHFLDREKYGGYKKVKGAYFMLVEHTEKGKVKRSIIEFPLYLANQKTNEEMICKLLADEKGLVNPKVLIPHIGICSVIEIDGCRMYLRGRTGNNLDYTLAHQLILGYENEIYIRNIMKFCDRAAEYKKTHNKGELLAGNNDHISVEENIEMYDLFVQKLKTPIYSVRLSAQITNLLKAREQFIELSIEKQCMVLKQILNLFASNKVTSDLSEIGLGSQLGSIRTSRCITNYTKVYLISQSVTGLFETKRNLLL

SEQ ID NO: 9291 - protein, 1017 aa, unidentified
  REGION 1..1017: note = Description of Unknown: Cas Enzyme sequence
TDSVGWAVTDHDYNVLRFKGKSMWGARLFEAANDASERRAARTSRRRLNRRKQRILILEELFAKEILKKDPNFFVRLHESNLWQEDRTDKNCSYVLFNDPHYTDKDYLREYPTVYHLREDLIHNAQPHDPRLVFLALHHIFKSRGHFLYEGSQNSEEGKTLEESFNDLQLYLSDYDISFAPGDKNSFIQALSDDSPITVKKKKLAVAYGGTEKTEEGIDIASVVELLSGATVKLSKLYGDDSLKNTDVTSISLKDDIDAKYDQLAETLDDDRLELILSAKELFDIARLRQFLGENRYLSEAKVELYEKNRQDLKILKKYIRKNRPQEYKDIFNAKEGVKNYAAYSRYKTKNRCTQEEFCSFLKGKTEGMKNSKDPDEKRIYEEINAKTFLPRLKGSDNGVIPYQLHLKELKAILNNAETYLPFLKEKDDDGITVKEKLISTYTFRIPYFVGPLNRRAKHSWVVRSDEKIYPWNFTKVVDEEKSAQEFMDNLIGRCTYTKEPVLPMNSLLYSEYKVLNELNPMMINGQPVPADVKNKVYEDLFVNSNRKVTKKSIFKYLLANGYVTEQDQLSGIDDTIKSNLKSYHDFKDILAKTKDYEQTERIIRSMVVFSSDKKMLRKWLDKNTHGLSEEDKKKIVRLNYKEWGNLSKEFLTDIYSPDENGEVMNIIEKLRSSNLNLMKLLSKDFEYRDQVNKYLADHGYVSDSIHTYLDELYIAPAVKRSIWQTLRIVDEIVDIQKCAPEKIFIEMARPDAKTVKKERTESRKDALVKLYKSCGEQASNLREKLEQETDQSLRRDKLYLYYTQMGRCMYSGEPIDLEAMLKDNTTYDIDHIYPRSRIKDDSLTNRVLVKSSLNREKTNTYPIKEDIRANMQSFWSLLKDKKLISEEKYRRLTRSYELTSDELASFVARQITVTQQSTKALAQVLEHQYGNTRIVYSKAGNVTDFRHKYGFVKMREVNDLHHAKDAYLNVVVGNVYDTKFTTKFFNNITKEIYSLNKVFDFNTPGAWNKDGSTLKN

SEQ ID NO: 9292 - protein, 1368 aa, unidentified
  REGION 1..1368: note = Description of Unknown: Cas Enzyme sequence
ERLNRVLTILGFLPEHYTGELNRYGQLNQGAEPKLAWEMVDGKYTFLFKDSFLEMVHEFAQVHPELLVNGRNIAYDWTIYYLRKKALTQAITKQELAWILHQFNQKRGYNQARGEEEETKSNERKELITQKVVSVRNTGEESKGRTWYEVTLENGMVYRRQSAYPLDWEGKVRDFIVTTKLNEDGSEAKDKEGNVKRSISAPQDDDWGLRKIKTQHDIDASHKTVGEFIYAALLHNPDQKIIGQLVRVVDRKYYMDELKRILDTQKQFIPELQNKELYAECINALYPQNDAYRNSIAGKDFTYLLLNDIIFYQRPLKSKKSLINECPYEYHIYKDKEGAWQRQYLKCISKSHPLYEEFRLWQFVENLHIYREATNGIGKEDCTSEYIPNKAELVSWLLTQKEVTEASLLTHVAGKQKKGLSWNYVSEKDKKYPAAPVTSTISSILQEAGGEVSTNTIEHIWHILYSVSDKQQLVAALKHYAEANHLSDVFVEKLSKQKPFAADYGAYSEKATRKLLSLMRSGEYWSEEAIDANTKSRIEHILTGEVDDAISERVREKLDTMNEIKDFQGLPLWLAEYVVYDVRKNDTKWETPEDIDKYLQSFRLHSLNNPIVEQVVMESLRTVRDIWKQEGQIDEIHIELGRDLKQNAEQRKKTQQRQQENEKANIDAEQRLLEFIEHPSLKDIQKYRIWLEQKSISPYTGEIIPLAKLFTPAYQIEHVIPQSRFFDDSMSNKVICEAEVNARKDRMLGHEFIVKCGGEKITLSGGKVVAILSPEAYEDTIRKNFAGDPRKQEKLMLDDIPEKFVARQMNDSRYISRLMMQLLSNIVREKISNTEYEPEAVSKNLIVCNGATTTRLKKDWGINDVWNKIILPRFERLNQIKNTTVFTAKTANGHIIPNMPLELRQGFEKKRIDHRHHAMDAIIIAFTTRNHVALLSNESALDKDERARYDLQTLLRKREVWRSADGKEHYKFTDFIAPYDGFQEDVQETLENIIVSFKQNLRVINKSNNRSVRFVDGKKQMVRQTKGDNWAIRKSLHKATVFGEVNLRKKKFVNLTYALQHVEDIVEKDLRTKLRELLQEGKDEKQIKKYFVSEPDVWADVNLKRIEVFYYTKDTNDHYYAVRTALDDTFTADYIRDKVTSEAIQKILLAHLTRCNNDPKLAFSPDGIEQMNVDILQLNNGVPHKPIYKVRKYEESKKKFAVGQIGSKSKKFVEAADGTKLYTFVYEKTNPDYSKSRKLVELSLVDVIAAQKEYGKHWKQEIDKKLHLQGSVAAEYSFAFSISPGNLVYVPTEEEIQRQKYDFSANRIYKVVSLDGENPNFIPSNIASMIVDSVEYTRHNKTSRDAYGRLIKEICVPIKVDRLGNIIE

SEQ ID NO: 9293 - protein, 1507 aa, unidentified
  REGION 1..1507: note = Description of Unknown: Cas Enzyme sequence
MKKILGLDLGTNSIGWALIEKSESGGRIIKAGSRIIPMDASELSDFANGNTKSKTSERTQNRIARRMRERFLLRRERLHRILKIIGYLPKHYEERIGWDIDNDKKHSGTFLDGDEPKINWRPNAEGKNEFLFKESFNEMIKDIKAKNPDLKSIPYDWTLYFIRQKALREPISKEELAWVILNFNQKRGYNQLRDEVLDTQDEKKSEYKRLIVKSVTPDENAKGKDIWYTITFENSDIIYRRKSKYPLDWVGKVRDLIITTKIDKDGNPVKKKNGETDYSIKSPSDSDWGLQKIRTEQEIEQAGLTVGQFIYNTLLNNPSQKIRGGLVRVIERDFYKHELKLILQKQSEFHPELKDRKLYDECIQELYRNNISHRNSIKSNDFIYLFLEDVLFYQRPLRTKKFLIDNCPYEYHNGLDKETGEIIKYPNKCIAKSNPFYQEYRVLCFISNLRIIANTFEKDGHILSDVDVTDTFITDKEKLFKWLNSRGEIDQASLLQYVGIKKKEQPRFHWNYVEDKKYPMNKTQHAIRTRITEEVELSNSLLYDLWNLLYSTKTKTEIDKSLSPSQKSEDSIYQRLIKEGVSKNDIEKIKNIKLSDEGYGAYSEKAIKKILSLMRFGSYWSTDKISDSTKERINQFLNGNNIDNFPEKVWKRIKSIASIYDFQGLPEWLACYVIYGTHSEATDFQIWETPHDIDVYLNNFKQHSLRNPIVESVILETLRVVRDLLGKYGKFDEIHVELGREIKNPADKRARITQKILENENTNLRIKALISEFVNEEFHISNVRPFSPSQQEILKIYEDAVLNNYEPEDEIKDIIRDLSNPTKQPSKSAVLRYKCWLDQKYISPYTGRTIPLSQLFTSDYEIEHIIPQSIYFDDSFSNKVICETEVNKLKDNRLAYNFIKEFHGYTLPNGIRILEVEEYEQHVKNIYSSRNSEAKRKRLLMDEIPTDFIERQLNDSRYISKVIKSLLSNLVREKDENGNFENEAISKNIVVCSGKITSTLKRDWGLNDVWNSIILPRFKRLNELTGRSCFTTLNQHGDEIPSMPLEMQRGFNPKRIDHRHHALDAIIIACTTREHVNLLNNEASLPQNKEMKYALSHKLRRYQKELVNGTMRNVPKEFIMPWATFKYDCAEAIKSIVVSFKRNIRVLNKATNKYKAFNEDGKKTIREQKGEEHYAIRKPLHKATVYGHVNLRLIKTVGLKEAIKLPERIVDKEIKRKVKELKRNKFSDKQIFEFFKNNAYTFKQINLKKIEVYQFTDESTPLVATRYGNDIVSIFSGKLKRIDIEKVINKITDTGIRKILINYLEENKDDIEFAFSAEGIETLNSNITKYNNGKRHKPIKKVRLFETLGGKFSVGESLGKQKKYAEAAKGTNLFFGIYINDDGKRSYSTIPLNEVLERLKQKLSPVPEININGDKLLFYISPGDLVYVSENEEKLDDREQLDSNNIYRLISCTENEAHFIPANISNPILQTIELGSNNKAQRAWSGKMIKETCMPLTINRIGDYILK

SEQ ID NO: 9294 - protein, 1202 aa, unidentified
  REGION 1..1202: note = Description of Unknown: Cas Enzyme sequence
MERVLGIDTGTNSLGWAIIDKENGLSRLVAKGTNIFSEGVKIEKGIESSKAAERTDHRSVRKHYWRRKVRKIRLLTILVNHGMCPQLDHESLRQWRLKKIYPDSDAFMAWQRTEDKEDLNPYRFRYICLTQKLDLTDMAQRYILGRALYHLNQRRGFLSNRKEETMESEGVVKESISTLSEEMAAAGCKYLGEYFYHLYQKGEKIRNHYTARKEHYLNEFNAICEKQQLDKKLAEDLKEVIFSQRPLKSQKGQVGACTFEKRKTRCPSSHPLYEDFRMYSFLNNIKVRIRTLYEDAERGLTDEEKQQVIPLFKRKSKRTFLFEDIAKTLAGKNNYAFFGDTDDKAYLFNFPMDTQVAGSVVNAQLEEIFGENWLDGVCEVYTLAGDKSRFDIMNDIWHALSFFDDEDKLKQFGMSRLQLNEEQADKFSKISLPNDYSSLSLKAIRKILPYLKDYGLLYSEAVFLGNLEEVLPRHVWGIREMRRAAIENVIRVMHGYDKSNVDGITLEQCIKSFLQDRYNIDDKTLKKLYHPSMLEIYPREHPNEDGVFQLGSPRISSVKNPMAMHSLFRLRKVVNLLLKEGYVTPETKVNIEFSRDLNDANRRWAIHVWQRENEKDRERCRKEIEKYIQAPTDTDILKYQLWEEQNHKCIYTGEEISITDFLGANPRYDIEHTVPQSAGGDTTKMNLTLCSSRFNRDVKKTKLPAELEIHALILERIQGWKEKYEDLERQIRKISTRGAVTKADKDNKIRRRHLLSLQRDYWRGKYQRFTMTEVPEGFSRRQGTDISVISRYARRYLQSVFRQVYIVKGIATADFRKMWGIQDEYAKKERVNHVHHCIDAITIACIDKGEYDKLAQFYHQSDEFKFGRGQKPRFEKPWPSFVSDIKQIQEELLIAHYSKDLMPKQAKRYVRDSKGHRLLTQGDAARASLHNDTYYGAIEVDGQIKYVVRKSLDGLDEKDVKNIVDAEVRSKVEEAISQHGSLRKAVEATIWMNEQKQIPIKKVRLFANSVTRPINIRKQRDLSRHDYKRQYHVQNDRNYMMAIYVGQNAKGKEKRAFELVNNLTAANFYRRSNDRVPTDNQIVPLAKDGLPLCYRLKIGTMVILYENSPEEVWDLDKKNLQKRLYKVTGLSSMVVSGNAYGTIEMIHHQEARPSTEIAKKNGAFRLGEDFRPGIKLLHTQFRALVQGVDFTINDLGAIKRLI

SEQ ID NO: 9295 - protein, 908 aa, unidentified
  REGION 1..908: note = Description of Unknown: Cas Enzyme sequence
MTRGKIEKSELGIHLDVGHDSIGWCVTRTFPGNERFLAIPGTGVVLFPADDCLANSRREFRRQRRHIRATRQRIARMKSMILALGVMTEAELSKNLTAAPWKLAAEVLSCSKLLSWPELWCVLRWYAHNRGYDGNILASAKNRQEGDADDIKKNAASHDMMARFGTSTMAETMCRFLGVDPQGDKISSREYFKGNRVSFDRSVVVNEVTRILEAHKGKLQGLTDDFIHTLVADPLTDKNFLRFQPGLPFHIQNRYWGGVLFGQLAPRFDNRIIGHCPVSGKKLPSKSSAEFLAFRWAMMLANVRVGDDGRGLTPDEIARLNKEVARVGGFTKGEFKKLLKDVTGELVGNVDALLTTPEADASLVRFPGVYALAKRGLRGVLDDKTFRKLANTLFRGKRLTIAKIAASVEDDATRNSILALADPKSQKGNAKKKSREVLLGEIIKADLPTGRAPFAKDIMAEAVKAVYSGKDPREKGGVLYRDCTKEDVVKEQDIDKETNNHLIRHRVKILLRLLKDIVHDYAENNPAQVAQITIEMARDLKDLSGMTNKQIESDMRDRTRQHQIAAKKIAKHLGIEERLVSPGLIRKVRIAEDMGWKCPYTGVAYDIQDIVSKSDGEPGCVDKDHILPRSERATDSLDSLVLTYREVNEMKGARTGLQFIRDCAGMRVPGRENLVVQNESAYKNFVEGLKVFGHDDDRKRQKRRKLNLLRLKSDDAGMTEGMLTRTSYITTLAMKAIRGYFAGCGRMPEIVAIPGRVTAMLRNQWNILGILAEVDERVKDEDGRLRLKQDIRGITHMHHAVDAITLGLAATFIPRNGTFWATMCKRRVKNDEKGMLGSTGIFRFSTHNEPQLVELPPYLRVAIRDALSEQRVVVHQPRKKAGLKIEQNTWGVERVEGKWAFVHKRERD

SEQ ID NO: 9296 - protein, 1356 aa, unidentified
  REGION 1..1356: note = Description of Unknown: Cas Enzyme sequence
MKQQEYYLGLDCGTDSVGYAVTDTEYTPLRFRGDPMMGIMTFDAASLSADRRVNRTNRRRLHRRQQRVQLLQEVFAKPVKEIDPRFFTRIRESALWREDKSDSTDTNVLFNDDGFTDKDYHKKYPTIHHLICDLMQSTQKHDVRLVYIACAWLVAHRGHFLSPAKEDNVREAVDIAIPYRALMDWFDEVKPWDADPASFGSLLKKQRSVRDKEKEFYALLYEGKKPTDLNSNPDDPDAFVVSRVMMLRLLCGGKVAPKDLFPYKADRYADLSSFSLGGKDEELEDVLLGLEEDGELVIRLKALYDWAVLSEVLRGEISISAAKVKTYEQHKQDLKWLKAFVKKYIPDQYDIVFTAAREGNYPAYTDHPSDSKTRTKNASKAEFSDFLKKIVKDIHIDEADRQKYDDMMGRLEANTFLPKQKDTDNRVIPYQLYAVELRDILKQASSYLPFLSEKDESGWSVADKILQIFRFRIPYYVGPLNNKSDRAWLSRKEGRITPWNFEKMVDLDASENAFIRNMTGRCTYLPGEPVVPANALCYARFTVLNELNTLKINNVPITVEQKQAIYNDVFCKYKKPTMKALRNYCICEGFMTADDVLSGIDTEGGIKSSLAPFFSFRNLMESGVLTEEQVERIIERITCTEDQMRLRRWIDAQFPQLSEEDRKYVSRLKFKDFGRMSRRFLCELQGVNKQTGEVCTVLHAMWETNDNLMQVLDSGKYTFADVIREELREYYREQPSSLDKRMDELFLSNAVRRPIYRTIDIVKDVVKATGHAPKKIFVEMARGGAEDTKGKRTKSRRSQLQELYRNCAESDVRELAELLETKSDNELQSEKLYLYFMQLGKCMYSGKPIDLEHLNDNKYYDVDHIYPQCRVKDDSILNNKVLVLSKYNGDKSDTYPVPAEWRQTMYGYWQMLRKNNLITEEKFRRLIRATPFTDAEKYGFIDRQLVETRQSTKAIATLLQERYPDTEIVYVKAGLVSEFRHEYDLLKSRTVNDLHHAKDAYLNIVVGNIYHERFNRNFFRIDQEYSLNTKQVFGRPVYVNGTCFWKGESDLGRIKKIVQQNHIHVTRYAFCRKGQFFDQMPLKAAENSELLPRKKDLPVERYGGYRKPTASFFVLVKYFAGKKSDIMIAPVELLCEKAFEKDPKSVAKEAVEKVLGKTVDRIELPIGARKLKVNTVFSVDGFRFVLAGKSGGGRQLGISPLASLKIDADSELYLKRLESFVNKKAKNRELKIQQAYDRISAEENIKIYDLFQSKLSSYPFSKRPASISDAVEKGKERFESLSLEDQVAVLEQILLSFGRTGGGSDLKLIGGVAKAGVPTLSSSLSNWKKNYSDVRIIDQSASGLYEKQSVNLLDLL

SEQ ID NO: 9297 - protein, 1371 aa, unidentified
  REGION 1..1371: note = Description of Unknown: Cas Enzyme sequence
MKKVLGLDLGSASIGWAVVNTADNNGEHSEILGCGSRVIPISAEEKDCFEKGKAISTNADRTLKRCMRRNLQRRAQRRDNLRQLFIEHGWIGADDSLSENGKGSTYETLRLRSIAVNEEVSLRDLARIFLSINNKRGYKSSRKVNSGEEGLAIDGMDIAIELENTGKTPAEYALTAFQNGQNKKMEFYRSDLEKEFERIWDYQKTFYPELLTDEFHKQLCRSNKTSASKIFFAKYNITTAENKGKDRKAKGLDWRATALKERLDKETLAYVICDLRGLIENSSGYLGNISDRSKELFFNKETVGQYLYRRICFEKGFSTRNQVFYRQDYIDEFNKIWSTQARFHPELSEDIRHKVADQILFYQRPLKSQKGLVSFCEFESRPIKVIIDGKETMRTTGSKVAPKSSILFQEFKVLQTLNNLRIKDRRTDESRPLSQEERELLATTLSIRERMKGSEVLKTIGLDARRHELNFKEIDGNTTLFALFTKYVEIVNTVGNSELELQKMAYPKALEVVQEVFAKLGCHVNIFSFDSTLEKEEYEQQPLFKLWHLLYSFEGDNSITGTASLINRIADLTGLDETYAKTISEVSFERDYASLSHKAIKKILPYLKDGYKYSEACAFAGYNHSHSQTKEDIDNKVLLDTLSQLPKGALRNPVVEKVINQMINVVNATSLAYGKPDEIHIELARELKSSSKEREQATNSIQSNNKKNLEIENILKTEFGFQHVRKNDILKYRLYEELKENGYKTLYSNKYVPAQAIFSKDIDIEHIIPQALLFDDSFANKTLEYKDINIEKGRTTANDFVKAKYSDEGYASYRQRIDYLFEKGAISSSKRRYLLMTEAEIPSGFVDRDLRNSQYIAAKAKEILEKYVKIVVPTTGSVTAKLREEWQLVDVLKEINFDKYRIAGKTYYTTNPDGREEEKIKDWTKRNDHRHHAMDAITIAFTKPQHIQILNNLRAKCDNNDAFLRLLDSQTVDLGRKRIFTPPMPLGELRAEVKKHLNATLVSIKAKNRVVTRNVNKIKIHDGFLRKTELTPRGALHKEQVYGKRKIYEVFYMPVNAKMTEDVIDMVASPKVREALGKRLSEFGGDAKKAFTGKNALAKTPLFLNNSSVQVPSKVKCVRMKDIYSIRKELSADISLDKILDKKARAKIEQRIQEYDGDIKAAFANLDANPIWLDEKKSIPIKRVTIGENFDLTAIRSKRDKDGNLILDKDGNPIPNDYVNLRNNHHVALYLDNLGNVQEVVVPLFEALNRKNMHSPIVDKTYHSDLGWSFLFSMKVNEMFVFPDPENGFFPKEINLLDEKNASIISPHLFRVQKLSSKYYCFRHHLETTIEDDNSLKGITWKRITSIQQMVDAVKVRVDNIGRIVAVGEYD

SEQ ID NO: 9298 - protein, 1396 aa, unidentified
  REGION 1..1396: note = Description of Unknown: Cas Enzyme sequence
MKKILGLDLGTNSIGWAVVNEAEKEGEKSSIVKLGVRTISFDNFVNTASKKTCMDAVADFNGGKSISCNAGRTQSRSMRRNLQRYKLRRDHLRKLLKEHGFIDDSTILAEKGNGTTFETYRLRAKAASEEISLTEFARVLLMINKKRGYKSNRKAKSSDEGSLIDGMAIAEKLYNENLTPGQLVLSLFNQGKRYEPEFYPSDLQTEFDKIWSFQKTFYPDVLTESLKHNVEGKNKSATWAICKTPFNIVGIKRSTKGFDQKKEDYEWRVNALSEKIGLEELAIVLQNINGQKSGTSSYLGNIGDRSKELRINHLTVGQFQMNELAKNPNYSLKNQVFYRQDYLDEFETIWETQVKFHPELTPKLKHEIRDITIFYQRPLKSQKNLISICELEGRKVNRTIDGQTKTVSSGPKVIPASSPIFQEFRIWQVLNNLMLTSKETGEYCALKQDEKEKLFAELNVKEQLSKSDALKVLFNKEYREYDLNFDKLEGNRTQSKLFDAYRRIIEMSGYGEFNFQKMPAKEIFNTVQNSFEKLNIRTDFLSYNSSLTTPELENQPLFKLWHLLYSFQDDKSITGNRNLIAKIGNLCNMEEDYAAILASVTFEDAYGSLSAKAIKKILPFMKQGQMYSDACTSAGYKHSKRSLTREELANKVYKDHLDALPMNSLRNPVVEKILNQMVNVVNSIIDTYGKPDEVRIELARELKKSAKEREEMTNAIKKSTADYDDFRKILINEFGLEHPSKNDLLRYRLYKELESNGFKTLYSDTYIPQEKLFSKEFDIEHIIPQAKRFDDSFANKTLEKRQINIEKSNSTAYDFVLAKYGENGAEQYKSRIDKMYNEGMISKAKYKNLLMHEADIPSGFIERDLRDSQYIAKKAREMLEDVVKFIVPTTGSITDRLREDWKLVDVMQELNWDKYNKQGLTEAFKDKDGRTIHKIIDWTKRNDHRHHAMDALTIAFTKRSYIQYLNNLNARVPKSEQEYIDLADYDLSNINPADVKRIEATIEQKELYRNEKGKLCFIPPIPLDEFRAQAKEQLENTLISIKARNKVVTRNTNISKGKNGKLNQQQTLTPRGQLHNESIYGSYQAENVKSEKIDAKFTAKKIATVCNAKYRDALLERLNAFNGDAKKAFTGKNALTKSPIYLDEMHTTKIPEIVTTKSYETTYTIRKAVSSQNFKDAKSIEKVIDGKIKQILLDRLAEYDNDAKKAFDNLMDNPIWLNKEKGISIKSVTIRAVNNAVALRKGHDFVNTGNNHHVAIFQDADGNLQEHIVSFYEATQRATKRLPIIDKEHNKELGWQFLFTMKQNEFFVFPNQETGFDPQKIDLLDSKNNALISPNLYRVQKFTTRDYFFRHHQETMLNDNKKLLGKTWKRGGLSLLNGIVKVRVNHIGQIVSVGEY

SEQ ID NO: 9299 - protein, 1196 aa, unidentified
  REGION 1..1196: note = Description of Unknown: Cas Enzyme sequence
MLMEKLLGIDTGTNSLGWAIVEHEGDEYRLLDKGTHIFNEGVKIEKGIESSKASERTEHRSVRKHYWRRKIRKIRLLTILRDNKLCPYISTEDLRQWRLKKVYPKVESFIEWQRTDDKDETNPYYYRYLCLTQKLDLTDLNQRFILGRALYHLNQRRGFLSNRKETTKETEGDVKNSIDKLTSEIKESGCNYLGEYFYQLYKKGEKIRQHYTARKEHYLNEFHAICTKQGLEKSLIDQLEKAIFFQRPLKSQKATVGKCTFEKGKSRCPSSHPLYEDFRMYSFLNNIKIQTPHDETLRYLNNEEKEKVLPLFYRKSKRNFPFEDIAKKLSGRNNYCYYKDSIEKPYRFNYQMDVSIPTCIVNAQLKDIFGDDWLTSVAEVYTLAGKKTRFEILNDIWHVLFFFDDEDKLKDFALKKLQLNDMDAEKFSKISMPNDYAALSLKAIRKILPYMKKYGLIYSHAVFLGNLAQVLPHNVWGIEQLREVAIERIIDLMQNYNGKTEPRKLEQCISDFLKEQYGVDNSAIKKLYHSSMIEVYPRQRTNNNGIYQLGSPRTNSVRNPMAMHSMFRLRRVVNMLLKERKIDDETIVHIEFSRDLNDANRRKAIQDFQRENEKDRENCRKKIQETGIQNPSDTDILKYQLWEEQNHKCIYTGEEIRISDFLGADPKYDIEHTIPRSVGGDSTKANLTLCNSKFNREVKKTKLPTELNEHDDILERISMWKEKYEALNKSIRKLKGLSFGTKESKDANIRKRHLLSLERDYWRGKYQRFTMTDVPEGFSRRQGTDISVISRYARMYLKSVFKHVYIVKGIATSDFRKIWGIQEEYTKKERINHVHHCIDAITIACIGVNEYAKLAQYYHDEEEHQWYGLHKGQFPKPWKTFTEDIKSIQDELLVSHYNKTNMSKHTRKHVGQTLVQGDTARASLHNDTYYGAIEIDGKVKYVVRKSLDSIGEKDVENIVDEVVKQKVKVAIEHYGSLKKAVENTIWMNEEKQIPIKKVRLFAGSVTRPIHIRNHRDISRKDYKRQFHVQNDRNYMMAIYIGHDNKGKEKREFELVNNIDAARYFKRSNDIEQGLVPVVSAKKGYPLSYQLYIGTMVLLYEDSPEEVWDSDVNNMQRRLYKVTGFSSMIVSGCEYGTISLIFHQSAKPSSEIKLKNGKYTKGEVFREGIKMLHTQFKALIQGVDFELNELGEIKRLI

SEQ ID NO: 9300 - protein, 1440 aa, unidentified
  REGION 1..1440: note = Description of Unknown: Cas Enzyme sequence
MEPTQSAGSQKSSAYSLIVKSLKRCCKNTKKIRNSTNMNQKILGIDLGTSSLGLALRDLNNGTDLFQQLEYFSSIIFQSGIGTGKSGEFSFASERRKYRSQRRLHQARRYRIWATLELLIEHGCCPLTIEGLDHWRKYVKNSEKKREYPINNTRFEQWVRLDFDGDGKPEYSSPYQLRAELVSRSLDWDIQTDRYKFGRAMYHIAQRRGFKSSKGETLSSASENEDLTSIDISTAMKKSEEKKSKDIKLFMETNNLKTVGCAFALLEKNGTRIRNSQYQAVQSLYITEVNEICKFQKIDTIDPQLYSKLISTKKGDGTIFYRRPLQSQKRLVGRCTLETSKHRCPISHPDFEEFRALSFINNIKFRLDSTEPWRTFSSDERHKLFSDCFTRSKSTFKFEDIRKWIEKEYPGHSFSYIGHTINFQDDTTVPGCPIIHRLKKILDNDWHSQKISTEKKRTVYRTRKTHIIEYNYEDLWHLAYTSDDYEQLAEQAETVMKLSPKKVAEVTCLWSSIQEGYTTLSLKAIRNILPFLKEGTIYSKAVILAKIPEIIGTIRWNENRTTIIKEIEIISNTNAYKRCVFGIANTLIANYYSRSENEKYHFKFSEHKLDSNDKNNIIKCTIDTISEKKWNGLSQADQTKLISDVGELYQRFFSSPKKDYYKIPRLIDVIKDAMTNMFPDIANDSWNKLYHPSQISIFPHQKPIITNDGNCVMEVFQLGSPDLGSIKNPVVLRSLHVLRNSINQLLLKGMINEDTRIVVETARDMNDANWRKAIERYQREREKENEAIITIIKEFRPNYSQTDIEKGRLLFEQIENGYSYNKPSITINTSYIEKEQAMRFAIDMQKYKLWKEQKFRCIYTGNIISLSDLFADNIVDIEHTIPRSISFDNSLKNRTVCNAHYNRTIKGNHIPTELADYNNIKDRIKPWEDKVRHIKSQIELWKGNAKSAPTIERKNECLQQKHMWELELDYWQSKVRTFTIEKDELALGFRNSQLVDTRIITKYAFHYLKTVFSHVDVQKGRITADFRKIIGIQSSSEKKDRSKHSHHAIDAAILTAIPSAARRDHMIELYYQLSETSESEKKNSIKKALNDEIQSCHIGNVSNLVNNIEQKILVNHISKDQTLTPSKRQFRIHNKRYWKQGDSIRGSLHQESFYGAISDQQDNLRLVIRKPLKDLTEKDLNTIVDPALQKAIISQVHQVMTEQNVTFAKAIETPIYMTNKKGEPTKYDKHGNPISPIRHIRCFAKAGRGELKYDTVLKIKQQTYTSKQNYKNVYYAQNDDNYLCLLYEGTIKGSVQRAFRLINYFDIAQLRIHDPNTLFLEPEFATLKKKDNKKPEVIHDYKTMPLRAIIKKGTRVLLYKNHPEEAKDYDNEKMNSHLYIVYKFNIMGTPNIYLRHHLEARKEKECDNPNSYLSLKADNFKALIEHVDFQIDQLGNIYFN

SEQ ID NO: 9301 - protein, 1087 aa, unidentified
  REGION 1..1087: note = Description of Unknown: Cas Enzyme sequence
MIPYAIGLDIGISSVGWAAVALNSQEKPCAILDMGSRIFDAAEQPKTGASLAEPRRNARSSRRRLRRRKHRKERIRNLILTEKLLTEQELSELFQGELEDIYSLRARALDKAINAKEFARILLHLSQRRGFQTNRQNGESKEDGKILEAISDNRRRMEQGGYRTIGEMLYRDEAFRDNKRNKGGEYLTTVPRELVADEVRRIFSAQRSYGNLAYTESFENAYLDILLSQRSFDEGPGGNSPYGGNQIERMIGKCIFFPEEARAARATYSFEYFSLLQKVNHIRLERDGESTALSAEQRRELIELAHKTANLDFSRIRKALDIPEEYRFNMVSYRLDQEGDAEKKEKFQYLKAYHAMRTAIERNGKGRFALLTVEQRDVIGTVLTLYKAKDHVDKELSDAGLEACDREALLTLGGFSKIGHISLKACRKLIPFLEQGMNYNEACEAAGFAFRGHETEDRSQFLHLCEEDLESVTSPVVRRAVSQTVKVINAIIRRYGGSPSFLMIELAREMAKDFNERKSLEKENRENRTRNERILERIRSEYGKTNATGLDLVKLKLYEEQGGVCAYSLKQMSLQRLFEPNYAEVDHIIPYSISFDDSYQNKVLVLTEENRNKGNRLPLQYLTGQRRESFIVWVNSSVRNYRKRQKLLKERLTESDEKQFKERNLQDTKTMARFLMNYINDHLLFAPSELGRKKRVTAVNGVVTSYLRKRWGITKIRENGDLHHAVDAVVIACTTDAMIQQITRYAEYRECRYMQGETGSLAVDERTGEILREFPYPWPQFRRELDLRLSHDPARLQRDIKIPFYEEHGLIPKPLFVSRMPRRKVTGSAHKETVKSPKALDEGIVVVKRPLTDLKLKNGEIENYYHPESDRLLYEALKARLTLFGGDGEKAFAEPFFKPRQDGTPGPLVKKVKLCEPSTLNVSVHGGKGVADNDNMVRIDVFRVEGDGYYFVPIYVADTRKQELPNLACVAHKPYSDWKPMQAKDFLFSLYPNDLLCVTHKRALKLSLANKESSLPSTKEVKTEFLYYVSSDISAASISCRNHDNTYLVRGVGIKTLEKLEKYTVDLLGEYHKVEREHRVHFTQKRS

SEQ ID NO: 9302 - protein, 1157 aa, unidentified
  REGION 1..1157: note = Description of Unknown: Cas Enzyme sequence
MAESQKEYFIGLDIGTGSVGWAVTDTEYHILRAKGKDMWGARLFDEAKPAAERRMNRISRRRREREKARIGILKELLAPEIMKVDPGFFHRLDESKFYADDRTGENAGQKYAIFAKGSTGETEYTDVDYYKQYPTIFHLRDELTKSPDKHDVRLVYLALLNMFKHRGHFLNDSLGTDEDGFSFADGWKELMSSYEELLSMDDSEPSSAFPENIDAAQLKEILLSKDQSKSKILEECAAYLGVAKRNKPEYAILKLVVGLTGEMKAIFGEKEEEETEGPKGICFRKSSFEEDFEALTKMLSEEELAVILAAKAVHDALLLDSIKGSSNYICEARVKAYEEHQKDLQLLKKTIRRLAPQEYDGLFREIGDGSYSAYVGSTCTGKGKKIRRNITNHKTGVNNSEPDALYARIKGVLKNFAQDKDAAEILARIEQEKFLQKQLTSANGIIPNQLYVREMKKILENAETYIPYLKTKDETGLTVSEKILKTFSFQIPYYVGPVGKLNDGAKNKWAVRTSGEKITPWNFDDIIDHKATSQAFIENLIRHCTYLSDEKVLPKRSLLYEKFMVLNELNNLKIAGEKISVELKQKIYNELYMQGKPVTRKKLYEFLVSNGAIKRGEGDLISGIDQDLKNYLSSIGKFNGVFEQPYLDRAHTRMIEDIILLGTIYGDSKRMFRERVKEKYGEGSGAACTLSEAQLKRVCGFKFADWGRCSREFLEMEGGSKKDGVIRPLITAMWETNDNLMQLLAEGDYTYTEVLREKTKRAEKKLSEWTFEDLEGRYLSAPVKRMVWQTVRILQEIEEVMGYAPKRIFVEMTRGDGEKGKRTVSRKNKLLDLYRKSMLKDKEEWIREISNREEGEFRIQKLYLYYMQMGRCMYSGEKIDLERLMDDSLYDRDHIYPRHFVKDDSIENNLVLVNRSKNARKSDDYPIGAEIQRKQGAFWKSLLDSGLITKKKYDRLTRVTEFTPEEKADFIQRQLVETGQGTKAVTEILQEAVGDTDIVFCKASLVSEFRKKYEIFKARSVNDLHHAQDAYLNIVVGNVYYVKFTKNPINFMRQAEKNTNDKRYKYHLDKMFDYTVVRSDECAWINEEGGKNNTIGTVKRQVFRTSPLISRRSYITTGGITKKETIYRVGDAVEGAYYPLKTSDRRLTDVKRYGGKR

SEQ ID NO: 9303 - protein, 956 aa, unidentified
  REGION 1..956: note = Description of Unknown: Cas Enzyme sequence
MVGNYFLGLDIGSDSIGFAATDERYKLIKFKGEPVWGSHLFDPAEQSAQRRAFRTARRRLDRRQHRVTLVDELLSEEIAKVDKNYFVRKKESSLWYEDKSVKEKYLFFVDDEYTDKSFHNDYPTIHHLIYDLIVNKQKKFDIRLIEIALSWLVAHRGHFLSDIKVENSDKLIDISILYNEFMEYFEYNDIQRPWGEVDPVEFGNIIKLKGINNKKQKLKEYLYQNNIPKDSEEDIISKKELVNFIAGGKVACSKLFRNSDFEEDLKISISDDMEEVLPKLGDYADLVALLAKLYDWSILSDILKDSKYISEAKVKIYETHKKDLKDLKRIVRKYFPDKYNKVFKDADKNLDNYVAYSYNLRSVNGKIEIKKVSKESFCDFLKKQLKFDSIEFDDKDKDLICEMSERINNYTFMPKQVDKDNRVIPYQLYCVEYNRIIDDASVHYDFLNEKDEQGVSVADKLKSVFTFKVPYFVGPLRTDNTSNGWMCRAKEGKIYPWNFDTMVDFDKSEMAFIKRMTNNCTYLPESPVLPKHSLLYQKFTVLNEINNIKVNGLPISIDVKKKIYTELFERSAKVSVKRITEFLHSEGIIQKQDTISGIDSTIKSSLKTLYDFRRLLSEKSLSTKDIEDIVEHCTYTEDKSRYKRWLKQKYSYLSPDDIRYISGLKYKDFGRLSKRFLCELKGKNKKTGEIGTIIDFLWNSNDNLMVLLSDEYTFKEEIEKINEEYYKNNPKSISEQIEDMGLSGGVKRPVIRALDVVKDITSSLRKEPSKIFVEMARGEDAVKERKLSRYEQIKALYAKIPEDTFELSMQLEQMGAMVNNRLQSEALYLYYMQLGKSMYSGKPIDISLIGTSVYNVDHIYPQSMVKDDSVLNNKVLVLSTENADKGDKYPIDANVRHKMADYWYYLLKNELITKEKYERLIRSRQFTEEEKLGFINRQLVETRQSMKAVTQLLNRL

SEQ ID NO: 9304 - protein, 1100 aa, unidentified
  REGION 1..1100: note = Description of Unknown: Cas Enzyme sequence
LEKTYVGLDIGTDSIGWAVTDEKYKLKKFHGEPMWGSVLFEAANHKAERRASRISRRLLNRRKQRVQLIQELFAEEINKVDPNFYKRLRESALYREDKNSQYSLFEDEHYTDREYYKKYPTIHHLIVDLMNSDKPHDVRLVYLACAWLVAHRGHFLSEVSKENISAVLDFQAVYRDLTEYILSLSDGYSIPWKEEDSDALRKTLPMSLTPTNKYKELKASLFPDGKLPKDIPEEQFPFSCEIMLKALCGSKISAKDLFRSSAYEDIETFSLSSDDETIAGIIADLGDDGELIIRLKAIYDWSVLIDVLNRNSISSDKEKEMSISAAKVRIYQQHAKDLKNLKYLVRKYLPSKYNEIFRSEKEGSYTAYAKHQKNEKRIPKKWASKTVFSDYLKSIFKNLSVNKEDELIYADMMERLNINTFLPKQRDTDNRVIPYQLSWHELNTILKNARNYLPFLVDKDENGSTVSEKILSVLSFKIPYYVGPLNSNSEHAWIVKKGSGRIYPWNFEQVVDLDKSEDKFIKKMVNGCSYLADGECLPKESLLYHKYMVLNEINNIKINGIKIEVELKQSIYNDLFCCYRKVTRKRIEDYLLSNGHIEKREELSGIDIKINANLSSYHDFKLLLKEGKLSEDDAERIIERRTYSEDKPRYVKWLKEEYPTLSEDDIRYLAKLRYKEFGRLSKAFLNQLEGEDTQGNKLTIMNALWNTNNNLMELLSNSFTFSKVIEEHNAEYYSEHPSSIEKRLDDMYISNAVKRPVLRTLEVMKEVTKALGKTPDKVFIEMARGSSEDQKHKRTKTRKQQLIEFYKNIDTEDVRLLQKELEDMGDMADNRLQSDRLYLYFMQLGRSMYSGERIDIKRLGSKLYDIDHIYPQRMVKDDSLLNNKVLCLSEENGSIKKDRYPVPAEWRKKQKFFWKMLKDKHLITEEKYKRLMRGAEFSDDEKLGFINRQLTETSQSSKAVASLLKEFYPGIEIIYVKARLTSEFRSEFKMFKSRSFNDLHHAKDAYLNIITGNVYNTLFSKKWFSLREDYSLKTKAIFGKRLWYDPNGNMVWGGYPMLGAIRETVGKNNAHLTQYAFCRHGMYFNINPVKKGNDLIPRKA

SEQ ID NO: 9305 - protein, 1015 aa, unidentified
  REGION 1..1015: note = Description of Unknown: Cas Enzyme sequence
PTIGGLDMEQKYYVGLDIGTNSVGWAVTDENYHLLRAKGKDLWGVRLFEKANTSEERRSHRTARRRLNREKLRNTYVKEMFSAAINNIDPGFFQRLQDSKFTADDKTEKQRFTLFCGEGFTDKEYYELFPTVFHLRSELIHNPAPHDVRLVYLAVLNIFKHRGHFLNANLGSNNSGEFSESLESLRDMMQEYLSTELDCTNAQKIEDTLSSKDYSNSRKAEIVAELFSINKRSDKGLMETVKLLCGLKGKIAVIFPEISDDDEHAKLTFSFRDSNFEEKYQEAEDILSEDAIEILATIKQIHDYALLSNIMKEGGKTWDYLSDARISSYNKHKGDLKILKDIIHKYGTSEDFNQMFRVMEDNNYSAYVGSVNSNKTSIKTIRRGAKCTTADFYNKVKKLISGMDDCEEKEYILKEIDKETFLPKQITPSNGVIPYQLHKKELVQILQNASAYLPFLSEVDESGLTVKDRIIAMFEFRIPYYVGPLYNNGEGNAWSVRKEEGRVYPWNINQKIDMEESAALFINRMVKRCSYLNDAQVLPKNSLLYEKFMVLNELNNLKINGVPVSVEWKQELYKELFRKGRKVTQKAIIKWLQAHGSIGKNETVDISGIDKDFTNTLANYAKFAAIFDTEVLSWEQEKIAEKIIFWATVYGDSRDFVKRKIKQELSSVLTENQLKKVLKLKFKDWGRLSKQFLELEGADKQTGEIKTIISRMWDDNYNLMELLSNGFTYVDELEERTARLEENLSEISYTDLEGQYLNAPVKRMVWQTILIMKELTKVLGSEPAKIFVEMARDHELDPKRTISRKKKLEASYKGIKEDKSLLKDLSARDEKELKWKKLYLYYQQRGRCMYTGQIINIEDLSNDNLYDIDHIYPRHFVKDDSLENNLVLVKKEKNAHKSDSYPIEGDIRSSMFYFWKGLYESKLITHEKFNRLIRDTEFTVDEQVGFINRQLVETRQGTKAVAGIFSSVFGKGKAIYVKAGNVSAFRKKFDLIKCREINDLHHAHDAFLNIVVGNT

SEQ ID NO: 9306 - protein, 1178 aa, unidentified
  REGION 1..1178: note = Description of Unknown: Cas Enzyme sequence
LSEGKHLIPDFYRSDLQSELDKIWTFQLAFHPDILTADLRKAIDGMSGRSTSAEFRKRFGIFTMDIKGKKFDRNKALYSLRNDALRRELNKEELATVICDINGQINGSSGYLGAISDRSKELYINHKTIGQKLMESLDKDPNVSLKNQPFYRRDYLDEFEQIWETQAGFHPELTDELKHEIRDVVIFYQRRLKSQKWLVSNCPFENRKVSPKSSPLFQHFRIWQTLNNVVVRTEDGEFPIDEDQKQMLFDELLYKEKISKAEALKILFSKTRGFDLNFATLEGNRTMASLLKAAGSVVELSGHGEWDFSKMPSKDIVSTIQGVFNGLGFDSSWLDFDSTKHGEALDREPQYRLWHLLYSFEGDNSATGDEKLVERLMELLKMPKEYARLFAGVKFEDDYGSLSVKAIQKILPFMAAGHVYSEACALAGYRHSAQSLTRDEIDNRQLKDHLEQLPKNSLRNPVVEKILNQMVNVVNGVIDAYGRPDEVRIELARELKKNAAERKQMDETIRKNTQESERIKVLLQKEFGLTHVSRNDIIRYRLYQELETNGFKTLYSNEYISREDLFSKKIDIEHIIPQARLFDDSFSNKTLEFRDVNIEKGNATAMDYVKDKYGPDGAAAYKARIDAMFQKGAISPAKAKKLKMTVDEIPSDFIERDLRNTQYISRKAQEMLRDIARTVTATTGSITDRLRNDWQLVDIMQELNWDKFERQGLTQVIIGRDGQRIRRIDNWTKRNDHRHHAMDALTIAFTKPAYINYLNHLNARDEDDIRAIERRFLERDGNGHLRFKSPIEPNFRSEAKRHLEMILVSIKAKNKVVTRNTNTTKSKNGNRKKIQLTPRGALHKETVYGCINTLRTKPMTVGSKMTAEEIAKVQNPSYRKALQTRLDAFGGDPKKAFTGKNSLEKNPIWLDEKRSQCVPDTVTIQWYEPQPAIRKPVDKDLKIDKVLDLGVRRLLEDRLNEFGGDAAKAFSNLENNPIWLNREKGIKIKRVTIAENYELEPLHHKHDKDGKMLLDADGKPIPADYVNLRNNHHSAIFIDADGNIQEHLVSFYEAVARVVELGLPVIDREYNKDKGWQFLFTMKQNEYFVFPNPSQGFDPNEIDLLDERNYARISPNLYRVQKMSSKYYVFRHHLETTVEDTKELQGITWKRIQTLNNLNGIVKVRVDHIGRIVKVGEY

SEQ ID NO: 9307 - protein, 1079 aa, unidentified
  REGION 1..1079: note = Description of Unknown: Cas Enzyme sequence
MAKILGLDLGTNSIGWAVLDNERKRIEAANSRIIPMDGERMGKFENGGSVSYTEDRTQARGARRLRERFLLRRERLLRVLNLMGFLPEHYASQLDRYGKLPDEKEPKLAWREVESGKNDFLFKTSFKEMVQEFRDNGIDGNLPCDWTIYYLRKKALTAPLSKEELAWILMQFNQKRGYYQLRGKDDEDNGLSEKSEEKRYYELQVVKVEDTGEQRKGGGTWFNFTLENGWVYKRPCRIAPDWVGKKRGFIATFKIDKDGNRKEGNPSISAPDENSWGLRKIKTENDIKESGKTVGEYIYGLLLSDPQQKIIGEAVRTIDRKHYLDELHRILEKQREYIPELNDHNLYQQCIEALYPGNTAYRNSIANRDFTYLLADNILFYQRPLKSKISLIADCPYEKYIHKNKDNSPRTKDGEQVSKACKCIAKSHPLYQEFRIWQFLSNLRIYQNDVNVTPDFLPDNNAYSKLFDYLSTQKSIDQKGLFKYFNIKRNEASCYRWFKSPDHTEPMGETRAILLGGLHKAGIDDTFLSTEKELELWHILYSIDDTVQYRKALRTFARRQGWDTERIETFVEAFERLTVYKEKDYGAYSAKAISRLLPLMRRGRHWAVDNIDASTRLHIEHLITAEADDVLTDTVREKLSYIKDITQCQGLATWQACYLVYGRHSEAIDAQQWTRPEDIDTYLDTFRHNSLNNPVVEQVVTETLRVVRDIWRQYGKPDEIHIELGRELKKTKAERESMSKAIAENEVTNQRIRLLLTELMNPDCQVENVRPQSPSQHELLKIYEDGVLRSGVEIPDDILDIQKRFTAAKNQPTHAEVLRYKLWLDQKYISPYTGKFIPLGKLFTQAYQIEHIIPQSRWFDDSMSNKVICETEVNLLKGRQLGHEFIVAHHSERVKLSMGGTVDILSVEAYEKLVGDIFATNHSKRRKLMLDDIPEDFTTRQMNDSRYISRLMMHLLSNIVRTKDENGNLEETTVSKNVIPCNGTITYRLKRDWGICDVWNRIILPRFERLNAITGTTLYSATTAEGHTIPQVPLDMRQGFNKKRIDHRHHAMDAIVIACCTRDHVNLLNNEAAKSDKQR

SEQ ID NO: 9308 - protein, 1253 aa, unidentified
  REGION 1..1253: note = Description of Unknown: Cas Enzyme sequence
DIDVVDALKKSEEKKSGKLVEFMKERGLKTVGAAFYELEKTGIRVRNSEYQAVRSQYKEEIKQIFEFQNGLDSESDFYRRLISEKKGEGTIFYKRPLRSQKGSVGNCTLEPGKPRCPISHPEFEKFRALCLINNIRFGDGLKATLTTEQKKRLYNERFLLTRSSFKFEDIQTWIEKEIHKQLSYKDKTINYKGNTNIAGCPVSARLKKLLGDDWESWKIESNETKANKKTGEVKNVTYTALDLWHICFSFDEPDFIEEFAQKKLGFNNEQTKQLVRIYGAIQQGYGLLSLKAIRNINRFLEKGLIYSDAVLLAKLPDIFGDRWAQEEENIIEQLDALIEENRHTKQLYNIANSLIADYKSLDISEQFAYKNQEYKLDQSDYDDIRKATIGNIGEKTWAKKSVEEQESIVAQVADLYQNFFSSQKREYYILPKVSDALAGYLSSKYEYIREKDLRKIYHPSMIEIYPHAKETRIGGRNLTLLGSPVIGALKNPMAMRVLHILRKQINALLKATDENGNALIDENTRIVVETARELNDANMRWAIEAYQRQREAENKEYEKIIREYYPTRNVNDDDIDEVRLLCDQHDIPDLETGFISAKKHKAEKTDTYYKKDITKYRLWLEQGCRCLYTGKLIKIGNLFSSNAFDIEHTIPRSVSFDDSLANLTICDAHFNRTIKKNQMPTQLANYEEIKQRLQPWFEKVERLKENVAFWKAQSKRAQDKDRKDQCIRQRHLWQMELDYWQNKVDRFTMTEVTSGFRNSQLVDTRIITKYAYHYLKTVFNKVEVQKGSVTANFRKMLGVQSIDEKKSRDKHSHHAIDATMLTLVPVAAKRDKMLELFYKIQEKEKQNEDTTWLRQELSKEIGSCGLGGNISEVARFIENNILINHIAKDQTFTPSHKRKRVRGRIVPKRDENGNILYEINEDGSFKLDKLGHKIPQAKEWITGDCIRGKLHGETYYGAITQAQKDENGKILRDENGKIIVGEEKLYVVRRELVYKKDQNSPGFKNWDELKEAVVDKSLFDIIKGQFEGNMSFKDACASGIYMYRRNEKGVMDFSEECKVNRIRHIRCFTSIKKPLQFKKQTYLSDKDYKQYYYAEMGDLYVMCRYESEDKVIKEYRIWSLYDVSNNRKTGLEDIPTTMNSKKKNVALHLNEQLNSGDMLLIYKESPQELYEMDKDSLSQRLYVVRGFENPSLIKLVKHINAQEDKDLGKGESIKNYSNMPEKIRCGISTLKYLIKDKDFYLTPKGIVFKKDKL

SEQ ID NO: 9309 - protein, 1407 aa, unidentified
  REGION 1..1407: note = Description of Unknown: Cas Enzyme sequence
MGFLPEHFSSQLSRYGKLPEDKELKLAWREGPDGQMEFLFKAAFEEMVADFHRAGVDTKIPYDWTIYYLRQKALTQPISQQELAWTLLQFNQKRGYHQLRGKADEGLDDSKEKNEEKSYHELQVIKVEDTHEPLKGGRSWYNITLENGWVYKCPSLVKPDWEGKTKSFIATFQLDKDGNRKSDQPKLRSPQGDDWGLRKIKTEQDIEQSGLTIGAYIYQSLLHHPDQKIIGGHVQTVDRKLYLSELRRILDQQKKYISELNDHELYLRCLEELYPNNEAYRNSIANRDFTYLLADDILFYQRPLKSKRSLIDNCPFETRHDKPIKCIAKSHPLFQEFRIWQFISNLHIFESYNDVTPTFLPDHEAYANLFDFLSSIKSIDQKGLFRYLKISKNDASKYHWNYVQDKDYPVGETRAILLEGLRKANIPNTFLTPEKEEHLWHILYSVDDPTQYRTALRTFAKHQGWDDSQTDSFAQAFDRLTVYKEKEYGAYSAKAISRLLALMRRGKYWNPSAIDKDTLSRIEHIITGESDPTLTPFVRDKFSHLHDIAQCQGLGTWQACYLVYNRHSEAIDTAKWNKPEDIDIFLDQFRHNSLNNPVVEQVVTECLRVVRDIWRQVGHPDEIHIELGRELKKTKAERERLTKIISDGETTNQRIRLLLLELLNPDFQVDDVRPQSPSQQEKLKIYEEGVFQSGIEIPDDIQDIQKRFTSPKNKPTHAEVIRYKLWLDQKYISPYTGKPIPLSKLFTTAYQIEHIIPQSRWFDDSYSNKVICESEVNQLKDRELGHEFIVHHAGEEVPLNLGGTVKIFTADQYEEHIKTTFASNPKKMRNLMLDEIPEDFTSRQMNDSRYISRLMMQLLSNIVRTEDEEGNVENAATSKNVIACNGAVTDRLKHDWGLDEVWNRIILPRFERLNIITDTTDYTDTTPNGHTIPSVPVDLRPGFNKKRFDHRHHAMDAIVIACTTRNHVNLLSNETAKSNKRYDLQHTLRQTEYYQDPQGNKHERFTLFYKPWPSFTQDAYQALQSIVVSFKQNLRVINKTSNRYTIIQDGKHITVKQTKGDNWAIRKPLHKDTVFGEVNLQLTKKVRIKEALKKPNSIVDRELKAKIKEQKALHYTDKQIIEYLNKHKDIWSEAADGKIEVYYYTKDTSDRYFATRKDLLALFEKVSTPPDARKVIDSITDSGIRSILNAHLLNEGNNPDEAFSADGLERMNSNIQALNNGHPHLPIKKVRVYEQANKYSIGDKGQKKTKFVEAAKGTNLFFVIYTDAKGNRGYATVPLNPIIELQKQYEKDWKNHLADRLKADDLQLIPPDANIRYVLSPGDLVYVPTEEEREVEVGNIDAQRIYKMVSCTGKQCHFLPYTVATVILPKIEYQAMDKMERALTGEMIKEVCIPIQVDRLGNITKIG

SEQ ID NO: 9310 - protein, 1226 aa, unidentified
  REGION 1..1226: note = Description of Unknown: Cas Enzyme sequence
NSPEPRDCRLVYMALAWLLAHRGHFLSEISLENVSSFDDVKTVYDDLMEYMARESMSEDGAEYSPMWDCEAEKFGEIIASHTNIAAKKEALYKLLFAGKKPKSDDTKYDRQQLIALLCGSSNIKADKLFKNDEYADVPVFSLEDDNEKLELVVSLLGDDGELVTKAKALYDWAVLKEVRKGARTISEAKVAVYEQHRKDLRGLKEFLRKTDPKLYKKVFVLAGSEKNYTAYVNNHKDVKNKAKKEDFCDWLRKALSGVQPPAEYVGFYADMMERLQTNSFLPKQVDGDNRVIPHQLYQVELRAILDNAKTYLPFLEERDEYGSVADKIESIFAFRVPYFVGPLVSSAAPGGKGKFAWMKRKADGMIRPWNFADLVDLDASEDEFIRRMTGRCTYVPGEDVLPLDSLLYKEFTVLNEINPLKICGASITAGAKNKIVNELFKKHRKVSTKSLSAFLRREGMMKEGDTISGIDETIKSTLSSYHDFKGWLDSGDLAADDVESIILRSACTEDSTRFVTWLKDRFGTKLDEQAVRRIARFKYSEFGRLSKRFLDGIEFECKADGERGTVMDFMRSKNVVLMELLSDKYTLAERLDAMARDFYCSQNMSLEKRLDEMYVSSAVKRQIYRALDIVKTVVKVMGSAPKKVFVEMARGGTPDQKGKRTKSRLDQLNELYRRVRDDDAKAVNDALSNMGDFAQNRLQADALFLWTLQFGKCIYCGRPLPVEDLKSVANIDHIHPQSKVKDDSIMNNKVLCCSACNDRKSDVYPVPDGMRLEGLWRKLHDNGLMTDEKFRRLMRREAFTDEDLQGFINRQLVETRQTTKAIFTLLSEKLPQTEIVTVKAGNVSDFRHEFKFVKSRVINDLHHAKDAYLDIVVGNVYHEKFSKQYFRLSEGYSMKTSTLFGDRSKIIRGGTSVWNGAESLKAVRGVMARNDIHLTKYAFYGKGKLFCLKSSRSGAVPRKKGLCVERYGGYTSPAACGYLPVSYRCGKKPDVMIVPINLLDKRFFDSGREEDAVIVVFRQLESVIGKTVSDISFPLGLKLLKVNTILMLDNYPYILSGKSGGGSDYLLRSMFSLVLCHRAEVYAKRLESLKEKIGKKPYLTIDKKYDKVWNERNLLFYDELVKKMGLAGFAAMPASQYKTVKLGRERFADLGIKDQITVLLNMVQLLKSNRPGGCDLTLIGGSKHAGVMKLSSKVSNWKKTYKDARIVHVDFSGMFKTYSRNLLELV

SEQ ID NO: 9311 - protein, 1372 aa, unidentified
  REGION 1..1372: note = Description of Unknown: Cas Enzyme sequence
VANEKNFLGLDIGSNSVGWAVTDENYKIKKFKGNLMWGVHLFDEAQQSADRRMYRTARRRLDRRQQRIVLLQELFASEILKKDENFFLRLKESALLPEDSENRKHNTFFDDENYGDKEYFNEYPTIHHLIVELMKNDESHDVRLVYYACAYFLAHRGHFLFNVEKDDIEKITDFKPLYKKFYSDLTELSETPAFDENAEIMGEVLKKHISVTSKDKELKQILFGGKVPKDVEMIRYELLTKLICGGTVKMSELFRKEEYAELEKNSICVKSADFSDTLESLEGQLDELHFALIASVKAMYDWSLLVDILHDETMISKSKVEVYDQHKADLKELKHFIKTYLDTIDYNAVFRDVSDKANYVSYVYNAPADDERNKYKKCSQEDFCKFLKSYLDKISPSDDDKERFVKLKKKCEDNELCPKQVTTDNRVIPYQLYYAELKKILENACKYLPFLNEKDEYGTVAEKILKIMEFRIPYYVGPLVGSEKSDNAWLKRKPEGKIYPWNFKDMVDEDASENEFIRRMTCRCTYLAGEDVLPKYSLLYSRFMVLNEINNIKVNGELISVEAKQKLFQEKFVESKARVTKKHIKEFLVSIGEYSGDVEVTGVDDTIKTSLRSYHDFKHLIERGLLKEFDVEKIIERITVTTDTKRLKNWLEEKYPQLSASDVKCISKLKYKDYGRLSRRFLEEIIPVDADTGELLEEKNIITALWEYNENLMQLLSFDRGYSKAIEQFNNYYFDQHPDEKNISKRLKNMYVSPAVRRSIIRTLDIVKELKTILKKAPDKIFIEMARGEGDTPKGSRTKSRRDQITEYLDTSDAENSGELREHLEKTDDGRLRSEKVFLYFMQLGKCAYTGKSISFDELDDNTKWNIDHIWPQAKIKDDSIDNKVLVDSNANGAKGDKYPISSDIRSKMSGFWHALYKKNMMSEKKYQRLMRNTPFTEEELSGFIARQLVETRQSTKAVATILKEIFPESEIVYVKAGIVSEFRQEMDMLKCREINDLHHAKDAYLNIVMGNVYDTKFTKDPLKFIKSGERYSMKLFKKDQSGKESGLLTGVVKRGDNIAWDPETSFDIVRHMMSKNSIKYVRYCYKRKSGQNGGFFDQNPLRKGKGMVSIKKGLPIEKYGGFDNATISFYTIADIRNKGAVLVAIELLYSDRFEKDVDFARKYIAEKLSNDMKTTIKPDEIDFPLKKRIVKINTVLELDGYRVLIAAKQNTSIKFVSIESLILDNKYIQYAKKLFSYLEKSENGKKNNINLYAGINTDSNLALFDVLVKKYRMKPFSKMYKDLGEKISDSKELFIGYTLEKQVTILSNMIELLKTGRKTGVDLSDVGGKSHSGVKTLNTFLFKVKDYKTIRIIDQSPTGLLEKKSVNLLEL

SEQ ID NO: 9312 - protein, 1369 aa, unidentified
  REGION 1..1369: note = Description of Unknown: Cas Enzyme sequence
MKKVLGLDLGSASIGWAVVNVAETKEEKAAILGCGSRVIPISAEEKDSFEKGKAISTNADRTLKRGMRRNLKRYEQRRDDLRRLFIDQGWISDGEPLSESGKNSTYETLYLRSKAAQDEISLKDLARVLLSINKKRGYKSSRKTDSGEDGQLIDGMSIAKELAKTGKTPAEFALESIKSGKSGKFDFYRSDLEKEFDRIWDCQQSSYPELLTDEFKSQLSKMNKTGATKAFFAKYKLTTAENKGKDRLRNSLEWRVSALKEPLDKEKMAYVICELRGAIQSSSGYLGDISDRSKELYFNQETVGQYLYRRIKEEKGFSTRNQVFYRQDYIDEFNTIWATQSAFHPELTDTLKRKIADRILFYQRPLKSQKGLISFCQFESRPIKVIIDGKEKTRTTGSKVAPKSSPLFQEFKVLQILNNVTIKDRRTFDSRGLGKEEKESLAATLRIREKMKGSDALKQLGLDPRRYDLNYKELEGNSTLFSLFSKYIEIVNLEKNSEYELQKMAYEKALEVIRDTFNKLGCHSDIFTFNSDLPKEEYEQQPIFKLWHLLYSYEGDKSVTGTASLVRHIMDISGLPEPQSKIIAGVSFNNNYASLSHKAIKKILPYMKEGHQYSDACAMAGYNHSNSLTKADIENKVLVDSLAQLPKGALRNPVVEKVINQMINVVNAAAEAYGKPDEIHIELARELKSSAKEREQATNGIQAGNKRNQEIEQILKSKFNIQQPSKNDILRYKLYDELKENGFKTLYSNKYIPESALFSKDIDIEHIIPQALMFDDSFSNKTLEYKDINIEKGRTTANDFVKAKYGDEGYAQYCQRIEYLYSKGVISNAKRKYLLMTEADIPTGFVDRDLRNSQYIAVKSREILEDYVKVVVPTTGSVTDRLRQEWQLIDVMKEINFAKFRTAGKTYTAIDSEGRKTEKIKDWTKRNDHRHHAMDAITIAFTKPQHIQILNNLRAKCDSNEEFRQLLDSQTTDTGKKRIFTPPMPLDQLRAEVKKHLDAALVSIKAKNKVVTRNVNKIKQAGGILRKTELTPRGALHKEQVYGKRRVYEVFYSPVNAKMTEEAIAMVASPKEKEALLARLAEFGGDAKKAFTGKNSLDKNPLYVGAEQIPAKVKCVRFKDIYSIRKELSPDLSIDKILDKGVKAKVEERIQEFGGDVKAAFANLDTNPICLDNDKTIPIKRVTIGENFDLTAIRNKHDKDGRLILDKSGNPIPSDYVNLRNNHHIALYIDADGNVQEAVVPMFEALNRINMQIPVVDKNYHSDLGWTFLFSMKINEMFVFPDKNTGFNPKDIDLLDPANSSLISPHLFRVQKLSSKDYYFRHHLETTIGDDNSLRDITWKRIKTIQLMADAVKVRINHIGKIVAVGEYD

SEQ ID NO: 9313 - protein, 1546 aa, unidentified
  REGION 1..1546: note = Description of Unknown: Cas Enzyme sequence
LYFCGKITKKRTIMKKILGLDLGTNSIGWAIVERDDNKGRIIKSGSRIIPMDAATLGDFVSGNTKSQTAERTAKRSARRMRERFLLRRERLHRLLHLLEFLPRHYDERIGWDIETDRKHYGTFLDGEEPKIAWIKEDDKKYVFLFQSSFNEMLEDFIHYHPDIISKGKKIPYDWTLYYLRQKALTQPISKEELAWIILNFNQKRGYNQQRDEVLEASDDKKEEYMCLIVSSITPDEEAKGKDIWYNIRFENSDIVYRRKNKYPLNWVGKKRNIIVTTKLDEEGNPKLKKDGSIDYSVKSPNDDDWALLKIKTEQDLKTSHQTVGQYIYTALLANPSEKIRGGLVRTIERDFYKDELERILQKQREFHNELNDRILYEKCINELYRNNETHRNNIAKNDFTFLILEDVLFYQRPLKSKKSLIDDCPYESHQGIDKETGEICFYPLKCIAKSNPYFQEYRVWKFMSDLRIIANTKEINGHIHTDVDITNELLPDNDSWSNLFVWLNDKGHITQSDLLTYLGIKKKEQSKFRWNYVADKHYPMNATRHAILNRMKEGETLSREMEQAIWHLLYSTTSKAEINKSLSPSNNSKGIYKKMMEAGISEESIEKIKTIKLPDEGYGAYSEKAIKKLLPLMRCGKFWDEGKIPPITLERINEFRKGNNMGDFSERVKMLISSMIDIHSYQRLPEWLACYVVFGKHSEANDIVKWKSPEDINIYLNNFKQHSLRNPIVESVVLETLRVVRDIWKRFGDIDEIHIEMGRDLKNPSDKRAQITQRVLQNENTNLRIKALLAEFLAEEYKIDNVRPHSPSQQELLRIYEEDVLAHNEPDEDIQDIINNLSNPTKQPTRTQVLRYKCWLDQKYCSPYTGQPIPLSRLFTSDYEIEHIIPQSRYFDDSFSNKVICESEVNKLKDNQLGYEFIKQHHGQTVQLASGRMVRVLEIDQYEQLVKDNFAQNKRRKLLMDDIPAEFIQRQLNDSRYISRVVKGLLSNIVRTTDENGTLEREAISKNVITCNGSVTSRLKRDWGLGEVWNAIVLPRFQRLNEITGRNCFTTLNSHGQEIPAMPLELQKGFSIKRIDHRHHALDAIVIACTTRDHVNLLNNESALPENQANKHALSHKLRQCEEIVINGKKRTVYKEFLMPWNSFKYDTLSSLQEIVVSFKQNLRVLTQATNLYTKYEDGEKKQEAQHSIDHYAIRKSLHKDTIYGHVNLQRITTVKLKDALKDVNRIVDRRLKKKIKELRSQHYNEKQLLVYFKDYGYEWKGYDFNKVKVFYYTDEKEMMVATRFCNDLVSVFSGKTKKQDVEKTIEQITDTGIQRILTNYLNANLEQIEYAFSAEGLEKMNENIAIYNNGKQHKPIYKVRLYQPKGNKFQIGQTGNNYKKYVVADAGTNLFFAIYQTTDGARKYKTIPLEEVIARMKQKLHPVNDTDENGNRLLFYISPNDLVYLPTPDEIVDGHINFEKIDVNRIYRFVDSSSTIANFVPSKIANVIYHLKKEQAERFCKSDTIQDELGKGSPQSKNQKAFTGEMVKDYCVPLIVNRIGEIKFK

SEQ ID NO: 9314 - protein, 1141 aa, unidentified
  REGION 1..1141: note = Description of Unknown: Cas Enzyme sequence
MNRNDYYIGLDMGTSSVGWAVTDTSYNLLRAKGKDMWGVRLFPECSTAADRRSHRTSRRNRNRQKVREAILREIFEKEINKVDPGFFERLKESKYYLEDKTNDTPFVLFADTGYTDKDYYEDYPTVFHLISELISDKGIEPHDVRLVYLACLNIFKHRGHFLNEALSGDGIDSIDSLCEEFANSLFDYNQNCEFDEKTEAKDLDKAELVEVFTDILCDKHLSGSSKKREIINRLEISNKNKYIDEMISLICGLEATISNIFVKDTYDEDQKKLKLKFGSSGFDEDIVKVQAMLTEEEYELILTLKKIHDWSVVSIIMGSHKYISEARIELYEKHKNDLAKLKAIYKEYARDKYDDMFREMSENSYSAYVGKVSSDKKTQSGNHKVRLQRRGAKCKQKDFYTRIKKDLEKVPDDVKAEVLADIDANTFLPKQLTNENGVIPYQLHLIELKKILENASNYLAFLNDTDDTGLSIKDKIEMLFSFRIPYYVGPLYKDGKNNGNAWVVRKEEGKVYPWNFEEKIDTKKSAEIFIERMVRRCTYLNDECALPKNSLKYERFRVLNELNNLRINGERVSPELKQRIYNELFKVKKKRITKSMLCEYLYKNGLADKDVELSGFDGTFANALLSYGKFRELFGVDTLTDKQEAAAENIIKWATIYGDSKKFLKEKIEENYGPESDNPILDVKQINRVMGYKFSDWGNLSREFLNMEGADNDTGVILPLITRMWEENYNLMELLSSRFTYKKALEEKTNAIEKSLMDIEYEDLEGMYISAPVKRMTWQTLLILKEIYQIMGYAPKKVFVEMARDEEEKVNGKGARKSSRKRRLEELYNNCKKDSKELANGVKNCDEPSLRSKKLYLYYMQKGKCMYSGKTINLQNINDYDIDHIYPQSITKDDSLDNNMVLVDKAYNNKKSDTYPVFSEWQNNMRSFWNLLKDQGFLNDEKYKRLTRTYELTDDELANFVNRQLVETRQATKVIAELLKSSFGDNDCRIVYAKAGNVSDFRHKFSMKYDKETEKSSVIHPELVKCRIINDFHHANDAYLNIVVGNVYDVKFTQNPLNYIKEFRKQNASNLSEEDREKYHMDKIFNFDVKRNGEVAWVRHGENKSLETVLKVMRKNTPIVTRMNFEAHGAISNQTIWSAEK

SEQ ID NO: 9315 - protein, 1485 aa, unidentified
  REGION 1..1485: note = Description of Unknown: Cas Enzyme sequence
MAKILGLDLGTNSIGWAVIDSEKKCIDSAGSRIIPMDAGRLGDFEKGNSISFTAERTAYRGMRRIHERFLLRRERLLRVLNIMDFLPEHFSSQLDRYGKLPEGSEAKVAWREGRDGEPEFLFRPSFEEMVQEFRNVGHTQNLPYDWTIYYLRKKALTQAITKEELAWVLMQFNQKRGYFQLRGKDDEGDIPAEKGVEKEYIELKVIKVEDSGDKDKKGNSWYNITLENGWVYRRVFKALPEWEGMTRSFIATFKLDKNGCRTEEQPKLSSPDDTSWGLRKIKTENDIQKAGKTVGEYIYSNLLQNPDQKIIGETVRTIDRKFYRDEIMRILDKQREFIPELNDDNLYQQCIDALYPSNDAHRNSIRHRGFTYLLVDDILFYQRPLKTKKGLIADCPYEKRNGKPIKCIAKSHPLYQEFRLWQFIANLRIYRNDNDITNDLIPNEESYVALYDYLSTIKEIDQPALLRHLGINKKEVGQYRWNYVPDRKYPCGETRSVLLGGLGKAGIDDDFLTSDKELQLWHILYSIDDTTQYRKALRTFAAKQNWGDEKSELFTKAFDKLTVYKEKDYGAYSAKALSRIVPLMRRGSYWDANNIDPQIKERIEHLISGEVDNDIPITVRERFRAIDSIEQCKGLNTWQACYLVYGRHSEAADVQKWNRPEDIDTYLQTFRHNSLNNPVVEQVVTESLRVVRDIWKQTGHIDEIHIELGRELKKTKAERERLSQTISQNEATNQRIRMMLVELMNPDCQVENVRPQSPSQQEILKIYEDGVINSGVEMPDDIADIQRRFSAAKNQPTHAEVVRYKLWLDQKYISPYTGRPIPLAKLFTAAYQIEHIIPQSRYFDDSFSNKVICEAEVNQLKDRQLGHEFIVAHHGETVPLSLGGTAKILSVDAYEKLVGEIYINNRSKRNKLMLDDIPDDFNARQMADSRYISRLMMHLLSNIVRAEDEEGNREESVTSRNVIVCNGSVTDRLKRDWGIGDVWNRIILPRFERLNDITGSTDYTSVTANGHTVPDVPLSMRQGFNKKRIDHRHHAMDAIVIASCTRDHVNILNNESAGSTTRYDLMNKLRSKEQYTDKEGHKHDVFGDFIKPWPTFTEDVFKTLEGIIVSFKQNLRIINKTTNRYTIIQDGKRTNTKQEKGDSWAIRKPLHKETVFGEVNLQLKKKVALKKALADINSIVDRELKETIKEKKRLGYSDKQVIEFLGKNKDVWSEVADGKVEVYYYTKDTGDRYFATRKDLLSYMTGCTTVDAAEKAIASITDSGIRTILRNHLVAEGNNPTEAFSADGIERMNRNLRELNGGRSHQPIKRVRVFEQANKFSVGSEGQKATKFVEAAKGTNLFFVIYTTPKGTRGYATVPLNIVIDIQKKYEKDWRDHLAERLKEEDLQLMGNEDEVLYVLSPGDLVYVPEASSQNIAPTPDRIYKVVSMTGIQFMCIQHQVTTPIVNKMEFTTSNKMERSLTGEMIKEVCIPIQVDRLGNIIKIG

SEQ ID NO: 9316 - protein, 1016 aa, unidentified
  REGION 1..1016: note = Description of Unknown: Cas Enzyme sequence
MKQNGNDKMKGNYYLGLDVGTNSVGWAVTDHDYKLSRFKGNDMWGVRLFDEAQDASARRTSRTNRRRLARRNQRLLLLELMFSEEIAKVDPGFFLRMDESAYWLDDKTDKTCHFALFNDQGFTDKDYYRTYPTIYHLRSELMLSSEPHDIRLVYLALHHIMKSRGHFLYDTGDQGSSIRRVDDVLAELNSWLDSTFDLSLKPENPTAFTETLLRDDLGVKAKQKALLAAWGQEEKEDSDISLRASIDLLSGAKVKLALLFHDPELDKAEISSISLKADLDDQYDALSEALGDRVELILRLKDVYDTARLSQMLKGHSSLSDAKIALYEKNRKDLRQLKAYVRKTIPAKYKEIFSVKKEKLNNYAAYSGYMNRSGAYNCKQEDFCKYLRATLPEPDETDAVNLRIYQEIREGTFLTKLKGSDNGIIPYQLQRQEMKTILENAAVYLPFLNKTDADGYTVKEKIEKTFEFRIPYYVGPLNKNAKSAWAVRFPGKESEKVTPWNFSEIVDTESSAKQFIINLIGRCSYTGERVLPKDSLLYSEYMLLNELNPLRVNGRPLDAKTKQELIRDLFEESKKKVTKKSIQKYLLSRGLIQAEDEISGIDEQVKTQLKSLHDFRAILQKTGDREMVEEIIRHILIFGEDRGMLKRWLRKNTHGLSEDDYSYLCRLKYSDWGRLSKTFLTGIYSTDPDDNTGEALSIMDMLRKSDKNLMQLLTDRYSFAEQAEAHRKELYGSGRTLTEELDSMYIAPAVRRSIRQTLRIVDEIVDIKKSVPEKIFIEMARGSKEEMRGKRTESRKAKLLALYASCKEEAAALLPKLEQEDEGRLRSDKLYLYYTQFGKCMYSGEPIDLDALMDGRLFDIDHIFPQSRIKDNSLDNRVVVKNTLNREKTNTYPIRAEIRGKMRGYWEMLKQNGMISQKKYDRLIRPTPLTDEELASFVARQLVETQQSTKALTTLLQSRYGDRTRIVFSKAGNVSDFRHDYDMIKCREVNDLHHAKDAYLNIVVGNVYSTRFTDRF

SEQ ID NO: 9317 - protein, 913 aa, unidentified
  REGION 1..913: note = Description of Unknown: Cas Enzyme sequence
METQSLPPEGIVRKSLGLDLGSNSLGWAVVDADRGTILDTGVVVFDEGIVRVKGADTLATPASTRRLARMARRLRYRRRLRKFALLRTLVANGMCPIATTSLDAWAKKGVYPVSDKAFRAWLHSSPEDNPYRDRALAAEGPVDKQTLGRALYHIAQRRGFLSSRKEAMEKEGDEELGRVKSAIHDLTEEIRKGGPDRTLGQYFYECYRDGVRIRGRYTGRKEHYIAEFERIAAVQKLPAELCKTLHRNLFFQRPLRSQKRFVGKCPLEPRHSRCQLLRPEFEEYRMLSLVNNIRVDPDGANRPLDPEERARAIAAFYKVDRYMKMEDVQKAIFPAPRGRARERSRAASPAPALNFKPFKSVSTNSVSQQLNNLFKTRGEGFKTWFHDGTSAAGKPVRYDYNAVLDAISFFQDDDKLRVFGRERLGFSDEQAERLVKMRFPEGYASLSLAAIRKILPFLRKGLDPHMAILLAKFPDLIGADRFAAEESRILGKVAALYADVQENRRAAFRNRNVQVVPLQKRVADWLSAEFGVATDATASLYTALSRSEYADASGSGILPKVELGMIRNPLVQRSMTILRRLVNRLRREGTIDARTHINIELARNVNDRNTRLAWEAWQRQREAARADALAKLAEAKISNPSDDLVLRVCLAEEQGWKCLYTGRAISLSELVARDSGFDVEHTVPRSRSGDDSQANKTLCDARFNRDVKKGRLPTECVDPATLDALLRPWLEKRDKLEKDFARQMSAAKAISSAAPDARSKARQKALATRFELDYWRRKVRYFEMTDADLGDGFMNRQLVDTGVMSRHAVDFLASVYHRPDGKPAVWAVNGAATAFARKAWGVQDTDSPKLRTNHVHHAIDAMVIAHLSRGRFNDICSLLKDDDPAAEARFGREGAIPPPCPAVAERVRRAADD

SEQ ID NO: 9318 - protein, 1014 aa, unidentified
  REGION 1..1014: note = Description of Unknown: Cas Enzyme sequence
VIKQYLPKEFKNVFYNNDLKTNYPAYSGHAVKNGRRAPSQSKCTQEDFGKYIKTVIKKITESDERIDYINAEIDSNNFMPKQVSKSNSVIPHQLHEKELKLILENLKRDYPVFDEKLSDDWSICEKILQIFTFRIPYYIGPLNNYHSDKGGNSWVIRKPGKIYPWNFNDIVDRETTAERFIRRMTNKCTYLVGEDVVAKNSLMYSRYQLLNELNNLTINDFRISVELKQKIYKEVFERKAISGKVTLKNLKKWLVRENEIEAADMLGGVDDSFKSDLSSYHDFKRIFGDKVESNKEMIEDIINAIVLFGDAKDVLIGKLENQYKNQLTKDQITAICRLKYKDWGRFSKTLLQDIKSVDAETGEVFSILDAMWETNYNFMELMSENFDFRSEIQAFNDRQMGDNVNLSYNLVKDSYASPAVKRQTWQALQIVNEIKKITGHDPKRIFVETTRRHEEKKRTQSRKEKLLDLYKNIKDDRDWYTEINSREEREFLSKKLYLYYTQMGKDMYSGEEISLDDLFTGDKYDIDHIYPQSITTDNSIHNNLVLVNRTANGVKDNNYPLNPDIQRRMAKTWKYLLEKELITKEKYSRLIRKHGFTEDELASFISRQLVETSQATKLTIQVLGSVCKDSTIVYSKANAVSKFRQDNNFIKVRSINDLHHAKDAYLNVVVGNVYYVKFTKSPLNYIKNVQRKSHEQYSLNRMFDFDVVRNNDVAWKAGKKGSINIVKKYMKKNSILFTRMATEKHGEISNQMLVKKGKGQLQKKTSDPRMSIEKYGGYNKPSIDYYVLVQSEKKGSLIRTIEGIPVYLSDQSQDKIIEYLEDKDKLGLVNPAIIYDKIKINTCLKIDGYPMHLSGKTNQQLIMKNAVQLVVDKETAACLKKAEKVNNRIVNNKDYKIEKSDEISKEDNIKAYDCLMNKAKKTIYKNRPSNQISTLEKGKDKFEALTLEEQCTVLMEILKYFSCKAITCNFSSVGGGAHAGKTLISKNITNCSTISIINQSITGLFEEVIDLKAI

SEQ ID NO: 9319 - protein, 1058 aa, unidentified
  REGION 1..1058: note = Description of Unknown: Cas Enzyme sequence
MKYVLGLDLGVTSVGWGILEEETYNIVDYGVRLFEESDAANNLKRRTARGMRRLKARKKNRINAIRYYLKQIGIVDNVDFMPMNNIYELRVKGLNNKLTNLELANVLVNIAKHRGSSLEIAVDESDTEAAKSSSSLSENTKILLRENKYVCELQLERYIKDGEVRNTNNIFRTVDYEKELRKILSNQELTDEQVEKIVEIVVRRRHFSEGPGSEEFPTPYGSYRYEIENGVEVLKHVNLIDVMRGKCSIYPNEPRCAKNTYTSCLFNLLNDLNNLKIDNGIEKVKLSEEQKNYIITTYINETGGITPKALAKYLGVSVENISGFRIDSKKNPLLTEFKVFKKMLKDDVNKLIVDNYDCFDQIVEILTNTQVVDERKEKIKALVNNIPDDLLEKIASYTQVNGYHSLSKKAMNEMIPELLSTSLNQMQIIENNGLGKNENSLISNEISADDSAILSPVAKKVQRQAFKVVNDLRKRYGEFSSIVIETTRAKNSDDEKKQIIEKQKLFEENKKKADELIKEMKIDPGKINSLTKLKIKLYKEQNCKTIYAGQTIDLVKLINDPTAYQIEHIIPYSISFDNSLNNKALASAKENQDKGNRTPFMYFASGKVDGPINTFEKFEAVVNSLYQNKQITKAKRDNLLNQDDISKFSNMEEFVSRNLNDTSYGIRVVLNTLDDYFKANNISTKVFTVRGKVTHAFRSRVGMGDKDRNDYIHHAIDALIIAGFRNQKIFNNVFELEAVDNELVANKITGEILNLENPLKDSIFLNYLCKLKNIQGTPYDFSYAVDTKTNRQFSDETIYSTRVVDGEEYVVKKYKDIYGKEGESLAKLLRDEKKRNSLLMAKNDVQTYELLLEITDYYKGEKNPYAKYKEQNGYIKKVSKRDNGPVIKSVKYISGKLNSCKSISHKLKFKPKNKNVVLLQLTPYRADVYLDNGIYKFLTIKMNDINYKDGKNNIERDYYNSLLEKKKISKNAKFLFSLNRNNIIKLEFDKSDNDNNMYRFKGVKTDDKNVIEVDYIHKKSDVRLTPTIGKSVVKFEKYNVSPSGIYSKVESETLKLEW

SEQ ID NO: 9320 - protein, 1104 aa, unidentified
  REGION 1..1104: note = Description of Unknown: Cas Enzyme sequence
EHYLNEFRRICEVQKLPEEICKALENAIFYQRPLKSQKGLVGKCSFEKTKPRCPVSHPLFEEYRALQFINSIKASNEKGELVFLTADERKSIWPKFIRKSKPSFDFEDIAKELTPKGQHRTFNYKNNTAVAGCPTIAQFVNIFSEGWRESIYEKYTNKKIKKGPKSVEGVINDIWHVLFTYNKDEKLQEFAEQKLGLDKSRAKKFSGITLKKEYGSLSLKAIRKILPYLHEGLIYSYAVFLANIEEVVGKEVWSSVENQKIIRDALKGLIDEFNEIQRLERIVNDLIADFKNEYNNSDSEYRLDEQDKKAVREKVISVYGQKLFAELSVEKQDEVIRWVEDTFVKQLRKYRGEYIKSKRLDEKIATFIQDNFNVSDDNLKRLYHPSDIEKFKVPERSSDGKLYLGSPVVSSIKNPMAMRTMHQLRHLVNTLIREDVIDEETKIHIELARELNDANKRKAIQDWQKERQEKRTEYVEEIKNLYKAQTGKDIEPSEDEVLKFQLWNEQNRICLYTGKSIDICDFIGGNPNFDIEHTIPKSLSFDNSQENLTLCDIRFNREEKRNRIPSELSNHKEILPRLTKWEKEIEGYEILFNSRKKARSTETKEQKDRRIRDKHYFKLHLDYWRGKYNRFTRQDVPEGFKNSQLVDTGIITKYARAYLKSVFGKVYSVKGSMTAEFRKLWGLQSEYESKARANHIHHCIDAITIACMTKSKYDMLAKLYRADEEGFYKEKKEALQIIKPWATYTEDVKGIENEILVSHFTADNIKKNTKKILRKRGKVQYAKDGNPIYKNGDTARGSLHKDKLYGGIKRPLRDENNLIQRDEKGNMLFEKDKDGTDRIFYVIRKIVDPSAGLDLLGEGDVENIVDDIVKDKIKAAITQKGFKKAMSEPIWMNEEKQIRIRKARCFALAVKSPIMLKQHRDLSKHTHKQHIHVVNEDNYGMAIYEGSKGGKIQREGSIINLLHAASYYKRSNSEHREQYPIIESKNKDGLALKTIITKGKMVLLWEHNPLEIWDLDESKRLERLYEVVQIDLEASGIKLLYHQEARQGTEITKFMGLKTGQKGGKNIGKHKEFPYIKVSPNNFDALVEGIDFSFSITGRIQKIG

SEQ ID NO: 9321 - protein, 916 aa, unidentified
  REGION 1..916: note = Description of Unknown: Cas Enzyme sequence
WRGYSSDRYSNNEEETKGAKSGDIELFTTTVKQIFPPEPFDAKNIMFKVIFENGHQGYEVRLNDKEKSNFEEGQLASYYYEKKEDERDGYKKLKYKPIDKTSWAYRKKEINNNIEDYVNRENGTVGSYFYKYFFDEGYLRLHPTEKISRIRQNVVNREWYEKEFEIIWKVQFEKHKEHFTPELVEKAIDFAFTKDISIKKELQKIKEPELQLKALIKDKILYYQRPWKQVKNKGGCRFEKIPDIKKDKDDKVIPHKDGKDHYKGRIVIPRSHPLHQEYKIWQQINNVRIWFHPKDKEKIELMENSMQCLNLLQKTPTEIKELLYKRLQEKKEQSWRTFVNETFNLDVQIKKEGDKKIPVEIEHYSVNYIKKTKRGKEQDNYLKGNKTKKQIADILSDKDDSWFLKIIKEGKDEHKPDKINKDGLTISSLNYKSNNYIITNLQLLWESIYDITGYQAGNDKINIEMIKKRIRNHFNIDIISDNQCDLLARIKFDDSGMGQLSAKAIRNLLPIMADGKYINQYPLTNKTRKQIENLVTLNQQEQNETNDDLKLYSLKEFITDKNARINLSEKMSEDEFRGLNYWEAAAVVYGNHSKTGITNVNPNEVNERIKSLQTVRPGSMNNPVVEKIVNETIKLVQLIYMTYGFDEVRIELSRELKASREDREAMWDSMQNNNRRNEWAKQMLREMFNAEESQDVDVSFSHNNIDKIKIIEDVVANRKGKEHDEKRKEFKINEPTKADILKYKCWLEQEFKCPYTGQSIPFSDVFAKGNKVEIEHIIPRKRYHDNSYSNKVITWATVNKAKAENGNRTAYEFIVSKRDRETVNELPLISKDQWEEKVKEMFKGRKAKNLLRQSIPEDPIGRELKDTQYINKKLRERIGEAIGMDKIWTTTGQITDMLRNAWHLNDKILKELVRER

SEQ ID NO: 9322 - protein, 990 aa, unidentified
  REGION 1..990: note = Description of Unknown: Cas Enzyme sequence
MTFFCLFLEVIKSIDMAKILGLDLGTNSIGWALIDDKLNKIIGMGSRIFPVGVDNLGDGEGELSKNASRTGARGIRRQFIRKRLRKKVLLKELATLEMCPLTDADFENWKTTKKFPSQKLAAWFALNPYELRHSALTERLSFEEIGRVFYHMIQRRGFLSNSRSAGKDDGAIFKGNAKEGKIGIDETREHIEHKTLGSYFYEIAPKESQPFVDGLERIRNRYTTRQMYVDEFEKIWEHQKKYHSNLTHELKEKIGGRKNDAGFKDDGILFHQRPLRSQKHLVGNCTFEKNKTKCQLSAIPFELFRLHQWINTVEYNGHKLHADERRLVFDFLIEKEKPSFKDIRKAINKLDAVYKFNYKDEDKIVGTHTISNLCNKKFFGKKWFEFTKKQQEDIWHVLYFFDSKDKVKEYAIAHWGFDEIQAEAISKFNLKDKYASLSRKAIHNILPFLEMGFQYDIAVVLGGIKNAFGQNWETLSDEKRALIIDNIPDIVRSNLKGGFIEPLKHFLKTDFQFAEKQFIKLYHHSANIDSRELIEKLPVNVDADKEIQAIRNPVVITALFEIRKLVNEIIIEYGKPDEIKVELARNLKASKTGRNEERKRQQKLERENDRVKGELDRLSKHYSHDNILLYKLWEECKHTCPYTGKSISVTQLYSGEVQIEHIHPWSKSLNDSFMNKALCFADENRAKGDKTPFEYYSLQGENKWHEVKDRALKLFSDTAQYPNSYQKFKRFVQQKYDDDFASKNLNDTRYISKEAKDYLSKICEKVAVSPGQMTANLRQKWGLNAILNPEDKTKTREDHRHHAIDALVMACGTVSHLQKLSEWNRYDRKPENKNFPLPWTGFVKDAEDAVDSILVSHKKLNNIITVRTHKTEKNGKVHRNVGVAARGQLHKETVYGKRTAPHSEEAFHVRKSIDSLTTEKHIEKVVDDAIRLLILKRVNELGGFVKGNIPANTFFTTDENGVQQSQLFLPNKNGAPVPIKKVRMKENIGG

SEQ ID NO: 9323 - protein, 1041 aa, unidentified
  REGION 1..1041: note = Description of Unknown: Cas Enzyme sequence
KTKEKRIWKKKAKKSCPKSHPYFQEFRIWQKLHQINYSSIEEDVYNRPLKAEWLKILAEALMQNLELFLNKTPKIVKENKLWFGKILQGKGEITNPDSYTFHIDKADEDIDHEEKNENRITGNITYSSFLEALGEEAFIRLKNETVKRHERISKEEIIEVEESKLFQLWHHLYIAKDGLFKEDDWLKCILTEPTKWNFSPEQAQRLIETGLQPDYCSYSSKVLRAILPEMRKGLNEYEALKAINKGYINEDNSIGQQVKLKNKISQLRYLELRNPVVERALSKAIKLVNIILEKHNEEIDRDSFEIRIESTRQFRKPRQERENERKKNVEKDKLREQYAAYLTKNKGKLGFKRDIYKYDSIVGKYDLWLQMNMNEDDEVFIKEFKAFSKITKQEDKLKHSLWLECGRMCPYTGEVINFTDCFSSEVEIEHIIPLSRSLDDSFNNKTLTRRRINVLKGKMTPFEYLGKAGGDALKDFKIRIKAKNNVFSDSKKKLFLAEKVDDGFLNQQLSNTSYISKYTRKKMQEVCRNVQFTNGAATSELRNKDWGLSNLLDKIRYEEDFGINMDGDASDPGIYPNYYRIKRSFIAWCEKKYKSTDVKIDWKNLNENKDVKEYFSQTNDDLLYWYNEVEKFNQYRSKYGKKDRSDHRHHAIDAFVTACCSPKIIRELSTYNAVKEEQHLDYRDKVDKRFDYSRLKESIAAILVSHSEKQSLIKKRKNKVKTKEGIKEYITYAPQGKLHEESFYAKRNGATVRRVELFDDQRQEKALFTESAKLDYLVKGNVKWTYIEDKQLYKIVKQRLGNLKGKAFTKDEMEKKPFYRVSPETPDKYTSRKKDKPLPVVKSIRKRFNTDRTLINLAIKDENGKIITENRYAENDSNYLIAFYKNGKNVFARPVSFFNAVKNKTNHLPLIPDEIEYKGVIYGIDEELPWLKSGDIIYISKNDENRDDIDWTNSLFLKKRLYKVKGFSTLVTPDPKYGNYEYGNTLLLNIKRTKADGYPSKKSIDEALELYAFTLSHVKLKAIKVRINILGEIEETGRNCF

SEQ ID NO: 9324 - protein, 1394 aa, unidentified
  REGION 1..1394: note = Description of Unknown: Cas Enzyme sequence
MEQKILGIDLGTSSLGIAVRNVDLGRNISEQLEYYGSIIFKSGVGNGKSGEYSFAAERTKYRSTRRLYQSRKYRIWATLKLLIAYGCCPLKSEDLDKWSKYDKGNNLKRRYPVDAKEFEQWVRLDFNCDGIPEYSSPYQLRAELMKHKLDWDNQTDRFKFGRAMYHIAQRRGFKSSKGETLKEAGEKDDIVSIDIKSEMKKSEESKSRMLKEYMANNHLETVGCAFARLEKEGIRIRNSEYQAVQSLYIDEINKICIFQQIDKKLPQLFNCLISTKKGEGTIFYRRPLRTQKHNVGKCTLEPTRDRVSVSNPEYEEFRALSFINNIRYRASSDDDWSSLDNEQRNRLFDSIFTRSKATFKFEDIRKWLEKEHKNQHFSYEEHTINYRDTTSVAGCPVISRLKKILGEDWRNASLDTNRNRINNITGEIHKVSYNYEDVWHLAYTSEDYEELAEFASKRMHLDDKQVDELTRLWSVVQDGYTSLSLKAVRNITPFLREGMVYSDAVALAKIPDIIGFKRWEENKADILLNYKQIQLDNNYLRMVYRVTNTLISNYKSKVLDEQQAFKNTQYKIDDIDRKEVMKCIIESISKKRWMELQANEQNRLRESVEFLYQQFFSSSKREYFKIPLVSDGLKRYLYIKFPDVQQEKWDKLYHHSQINKFTLQSPQQLLCDGHMMYVFQLGTPNIGAIKNPVALRALYILRNTINELLAKGIIDENTRVVVETARDMNDANWRWAIENYQKARNEENRAIAEVIKEFRPQYNDADIEKGRLLFEQNIVELDSPQQKTKAERFTIDFQKYKLWQEQRFICIYSGKTINVSDLFDDNIIQIEHTIPRSISFDDSLSNKTVCFTYANREKNNRIPAELSNYADIQDRIQHWKEKVEHIKSQIEIWKGKSRIATTVDRKNQCIRQKHLYELELDYWQAKLQTFTVQKDELEFGFRHRQLVDTRIITKYAYHYLKSVFSRVDVQKGSVTAGFRKILGIQSADEKKNRNKHSHHAVDAAVLTMIPVASQRDRMIELFYRYEEACDSEKNTLRLLMDKEIQSCRLGTINNIVDIIENNILVNHIYKDQTLSVAKKTRFVCGKRIVGQWNKGDSIRGSLHKDTFYGAIKTSDDEYLMVVRKPLKSLTEKDLDCIVDAKLRKCIEKQIYDYIEKEQLSFAKAIEKDIYMLSKEGQQIKRDKNGRPISPIRHVRCKAKAGRGLLKIDTTIKIKQQTYKSKKCYKNNYYVQNDDNYLCLYYEGTLQGKYKRCFRLINYFDVAQLNLNSTDSLYEEPEFKFFEGNKMMPLKAIIKKGTRVIPYIHYPEEVKEMDSDRLNKRLFVVYKFNEMGTPNIYLVNHIESRKENDCDSSERATEFSTQANISYLSLKADKFKALIENVDFEIDPIGNIVFK

SEQ ID NO: 9325 - protein, 1219 aa, unidentified
  REGION 1..1219: note = Description of Unknown: Cas Enzyme sequence
MKKILGLDLGVGSIGWSLIETDDNHEPKSILGMGSRIVPLSIDDTNEFSSGNAISKNQKRTQKRTQRKGYDRYQQRRENLTQELRRLGMLPDERLIKLPVLALWQLRSDAATPGKQLSLPEIGRVLYHINQKRGYRHSRSDESEDKTQRDYVQAINERYTTLHNEGKTVGQYFAGKLKESEVVTEKGPFYTFRIKEQVLPRKAYMEEFDQIIACQKAFYPDVLTDGTIHRLRDEIIFYQRPLKSCKHLVSYCEFSLREYKKADGQTIFAGPKVTPRTSPLFQVCKIWESVNNLTLQNRNGEFYPFTQEERKILFDHLDSHEKLTVTDLYKLLGLSKKDGWWGGKSIGKGLQGNTTKTALAKALGGHPELLRFQLKRKESRQIDTQTGEVLTEISPDFEKEPLYRLWHIVYSMPEREEMAAALKRQFDLEDEKVIDALAKIDFVKPGYGNKSARFIRQILPYLEQGMQYSEACAYINVNHSNSLTIEENQARPLLEKLPQLQKNELRQPVIEKILNQMVNVVNALLEQFGPIDEVRVELARELKQSRDERNETYIRINKLERENKLITERIQEYGIRPSRNRIQKYRLWEESDHLCFYCGQPVGVKEFLSGAEVEIEHVIPRSLLFDDSYSNKVCACRKCNAEKGNRTAFDYMKSKGDAAFDDYKRRVEKAYEAKKISKTKRERLMTPADEIPQDFIDRQLRQSQYISRKAVEMLKQVCRNVWVTSGSVTDFLRHTWGYDTILHDLNFERYKAGGLTETTTAEHRGQEITKESIIGWTKRLDHRHHAIDALTIACTRQSYIQRLNHLNTERKQMFQEIEKQSAEWRSKYSSLEEWIKERPHFSVRDVSEAADSILVSFKAGKKVATKGKRYVHKGGKRLLVQDGITVPRGALSEESVYGAISCLEEKVPVKKLFDQPELIFKAYIRNLVEKRIEECDGNRQEARKSIGKKPIYLDESGALPLEYATCWKKEFVIRYPVSSLKKKDVECIVDPHVRELVRKRMEEVGEKDAFKTPLYTDAACKMALKSVRLFTGLTAVAPVKYDGNKPVGFVKPGNNHHIAIYRDQEGNLSEHVVSFWHAVERKKYGLPVIVRDTNALWDSLLDKELPEAFLQNLPPAGLSLVLSMQQNEMFVLGMPEEEYQEAIRKNDKRMINKYLYRVQKIGVKDYTFRFHIETQIDDSNEALAMHKFYRVRSINALLALSPHKIVITSLGGMIPEKDD

SEQ ID NO: 9326 - protein, 1544 aa, unidentified
  REGION 1..1544: note = Description of Unknown: Cas Enzyme sequence
MKKILGLDLGTNSIGWAVVNADETTRENETTYLKPTGISAAGSRIIPMSADILGNFDAGNSVSQTAERTGFRGARRLHVRNLLRRERLLRVLKVMGFLPEHFATQIDDYGKFINHDEPKIAWRKDGQGKFEFVFKDSFEEMLADFAEHQPQLVADGKKVPCDWTIYYLRKKALTQRLKKEELAWILLQFNQKRGYYQLRGEDEEEQPNKLVEFVAQKVVKVEATDEKKGDDVWYNVYLENGMVYRRTSKMPLEWEGKVKEFIVTTDLEKDGTPKKDKDGNIKRSFRAPKEDDWTLLKKKTEFDIDNSHKTVGCYIYDSLLQKPDQKIIGKLVRTVERKYYKDELWQILETQIALIPELKDDTLYKRCIEELYPNNEAHRNSIAKPDFAKLFINDILFYQRPLKSKKSLISDCPYESCFDKDGNEHPVKCIAKSNPLFQEFRLWQFVQNLRIYQRERMVSDGQLDLFGNVSAGKLQTDVDVTNEFLKTEEDHVKLFDWLNDRASIKQDTLLNSYFKFKKDKGKDQYPYRWNYVEDKEYPCNETRATILGGLTKCSIDASFLTRDKEMSLWHILYSVEDKTEIVKALKKFAEKNNLPDSFADVFAKVKPFKKDYGSYSEKAIKKLLPLMRMGKYWSADAIDSKTKVRIDKMLTGEYDENIKNRVREKAIDLTDINHFRGLPVWLACYIVYDRHSEAKEIGKWEQPEDIDRYLKEFKQHSLRNPIVEQVITETLRTVRDIWKQESQIDEIHLELGREMKNPADKRKRMTEQIQQNENTNLRIKAMLMEFLNDPEIENVRPYSPSQQDILRIYEENALDNLTKDDKDFDFVSKISKSAQPSKADIIRYKCWLEQKYRSPYTGEMIPLAKLFTSAYEIEHIIPQSRYFDDSFSNKVICEAEVNKLKDRQLGFEFIKNHKGEKVQISQGKTVEILSVEAYEKFVKDHYANNRTKTKKLLMDDIPDGFIERQLNDSRYISKLVKGLLSNIVREKLENEEYEQEAVSKNLISCNGSITDRLKKDWGMNDVWNSIILPRFQRLNALTGKDCFTTISAEGHEIPAMPLELQKGFSKKRIDHRHHAMDAIVIACATRDHVNLLNNEAAHSKHNVNRYQLQRKLRRFEKIVIDGKEKEIAKEFIKPWDSFTTDAKQTLENVIVSFKQNLRIINKTTDNYQHYDEKGKKVMVKQEKGDSWAIRKSMHKDTGWGEVNLRFIKEVSLNEALMNPKAIVNKDFKAKVLELLKENRDAKYIKKYVEDNKDVWSDIDIKKIEVYYYTKDTKDRYFATRFMSDLVGYMSGIKDYEKALVKIEGITDTGIQKILKAHLQAKDNNPELAFSADGIDEMNRNIVELNSGKPHKPIYKVRRFESGNKYSIGQTGCKAKKFVEADKGTNLFFAIFGTEKENKESGETETVRSYLTIPLNVMIDCQKKYGSQWRNNIETHLKEQQLVADDAKLMFILSPNDLMYLPTKEELKDGIKVIDNKRIYKFVSCTGNRLYVISYSVAKVVVDKVEFTSLNKYEFTDDKTSIKETCIPIKVDRLGNIIELNGKRL

SEQ ID NO: 9327 - protein, 1190 aa, unidentified
  REGION 1..1190: note = Description of Unknown: Cas Enzyme sequence
MSKILGLDVGIGSLGWAVVDEDARRIDDLGVRIFESGEEGATKAADRASQVRRGYRSTKRLNKRRKQRKLRLKRCLENLGIISIESVNHEYRTKGNNPDVWKYRAEGLERKLSPFELASVLINMSNYRGYQDFYEDSDEEDTGKLAEAKNRINQIYELQKNKYRTIGQMIYKDETFRNKANGKIVIRNRAIKNKDGKKETDYKYLIDRRYLKEETRTLLMCQREYGYEQLTDDVIANIIAVIFVQRDFEDGPGPKKGKDDDKRAAMMASLKGHQTYSGFDELIGNCPFYPEELRGHKNSQLYDMYVMVNSLSQLGFESDGKRISLPESLIHELRQLLFENNGIITKKLLNDICKKQGINLDVPRELEKKKNLIKAPFIQFLSDTAYFPDNLISEFREEYYADLDSLSSRIGYALAKFATPRRRQDEIRTVLSEEDFAAVDNANKIKLYKSNGVANVSFKYMREAIDAYTQGMKYGDFQAKFNKEHPEVFKYDYLDAKGKLKPIADPDMVRNPVVYRSLNETRKIINAVLGKYKDITSINIEVAKDVGKSFEQRKETAKFQRENEESNEQLKAELVQKLIAEKYPVMISDKMIDRFVLWKSQDCKCIYSGKDISFSELISGTKIQVDHIIPQSIVLDETLNNKVVVLTEENQKKGNDLPLQYMMNDQAKAFVNRVSNLNRKGNISRIKKEYLLLSELDDETVSGFVDRNINDTRTISKYIATYLRNAYSDKIKINVIKGAVTSRFRRRWLGAKRKVYDYLPSIYGLEQKTRDLHYYHHAIDAAIVANLKRSYIELAQDYCKFENMRKDIRDHEKHGNAATAIRLQEELVKEKAKTVDKMFHVYGFNREYTLSLLDKSYVPSICSNLRDEIEVRVPLSISFDAKEYTSMEKDFYDLRKLLNGVRFNLKDCDIIGEEKVIDDDTLEEINARIPIVDPKVACINSKAQIVYADKPVDDVDPDKIRKDLNAYVKKLVPRDIKEYISDISMVSEEEYSERVHSYYDDKEFADHVELPYVSFKIDKKFRGAMVSSDNPVSLSKTGFNTYRELESDIYNNLKSPYYVRFNRGIGEEGNFTIYDARSYFCIEIYIDENEDYQIRGIRYVDIRIDHKTGKMRLLKPLPDGCRHYMYLFKNEYIKAFKKGKLRNNGFGAYRSAKSINRNMGKIRLFSNENLAGEDTCVNLAGECHKVEISI

SEQ ID NO: 9328 - protein, 1343 aa, unidentified
  REGION 1..1343: note = Description of Unknown: Cas Enzyme sequence
MSQNNNKIYNIGLDIGDASVGWAVVDEHYNLLKRHGKHMWGSRLFTQANTAVERRSSRSTRRRYNKRRERIRLLRGIMEDMVLDVDPTFFIRLANVSFLDQEDKKDYLKENYHSNYNLFIDKDFNDKTYYDKYPTIYHLRKHLCESKEKEDPRLIYLALHHIVKYRGNFLYEGQKFSMDVSNIEDKMIDVLRQFNEINLFEYVEDRKKIDEVLNVLKEPLSKKHKADKAFALFDTTKDNKAAYKELCAALAGNKFNVTKMLKEAELHDEDEKDISFKFSDATFDDAFVEKQPLLGDCVEFIDLLHDIYSWVELQNILGSAHTSEPSISAAMIQRYEDHKNDLKLLKDVIRKYLPKKYFEVFRDEKSKKNNYCNYINHPSKTPVDEFYKYIKKLIEKIDDPDVKTILNKIELESFMLKQNSRTNGAVPYQMQLDELNKILENQSVYYSDLKDNEDKIRSILTFRIPYYFGPLNITKDRQFDWIIKKEGKENERILPWNANEIVDVDKTADEFIKRMRNFCTYFPDEPVMAKNSLTVSKYEVLNEINKLRINDHLIKRDMKDKMLHTLFMDHKSISANAMKKWLVKNQYFSNTDDIKIEGFQKENACSTSLTPWIDFTKIFGKINESNYDFIEKIIYDVTVFEDKKILRRRLKKEYDLDEEKIKKILKLKYSGWSRLSKKLLSGIKTKYKDSTRTPETVLEVMERTNMNLMQVINDEKLGFKKTIDDANSTSVSGKFSYAEVQELAGSPAIKRGIWQALLIVDEIKKIMKHEPAHVYIEFARNEDEKERKDSFVNQMLKLYKDYDFEDETEKEANKHLKGEDAKSKIRSERLKLYYTQMGKCMYTGKSLDIDRLDTYQVDHIVPQSLLKDDSIDNKVLVLSSENQRKLDDLVIPEMIRNKMFGFWNKLYENKIISPKKFYSLIKSEYSDKDKERFINRQIVETRQITKHVAQIIDNHYENTKVVTVRADLSHQFRERYHIYKNRDINDFHHAHDAYIATILGTYIGHRFESLDAKYIYGEYQKIFRNNKNKDKEFNKNKDGFILNSMRNLYEDKDTGEVVWDPEWISRIKKCFYYKDCFVTKKLEENNGSFFNLTVRPNDEHSEKGTTIAKVPVNKLRSNVHKYGGFEGLKYSIVAIKGKKKKGKKIIDVNKLVGIPLMYKNVDDETKINYIKESEGLEEVKIIKEILKNQLIEINGGLFYVTSPTEIVNARQLILDFNCTRIIDGIYKAMKYKNYSELSQEEIMNVYDIFVEKLKLYYPTYKNIATNFENMREQFENISDEEKCEVIRQMLVIMHAGPQNGNITFDDFKLSNRIGRLGGKTISLDTTVFIADSPTGMYSKKYKL

SEQ ID NO: 9329 - protein, 997 aa, unidentified
  REGION 1..997: note = Description of Unknown: Cas Enzyme sequence
KYPEVFKDEKSVKNYAAYVGIAKRSGKKQPLKRCDYETFTAYIKSLLKGFENDKRVTYILNEIDNKTFMPRQVTKDNSVIPYQINLAELKMILKNASKYYAFLKETDKYGTVAQKIESLLTFRIPYYIGPLNAYHGKYAWIEKNTNEKIRPWNFKEVVNAEASAEKFIKRMTNYCTYLADEPVLAKNSLLYCRYMVYNELNNIKVNGKKLDAAQKSSLFNALYLTKAQPKKKDIIRIIKLNTGEEDIEIDGLADDLKANMKPYIDFKKAIGNKVRNEEMIDDIVGLITVFGDEKEMLINRIKRQYGTVLTDEEIQKISKLNYSGWGRLSAKLLKGLYSDNTHENIITLLETKSENFMQIINNDVYGFNRQLEEYSGDLSKTKGIGTYSSLEELYLSPANKKRVWRVMTVVKEIVKVLGYEPEKIFIEMAKGPEEKKEIKQSRKKQLTDLYKSLKNEKELLAALGAETDSSLRRKKLYLYYSQLGRCMYSGKRLDLSELDLCDIEHIIPRSVKSDDSINNTALVLRTLNEKKSDTYPIPDELVNDEARELWKLLLAKKFISKEKYARLVRKTSLTAEEKAEFVARQLVDTRQTTKVVADIFKTMYKDSEIVYVKAGNVSKFRNGGYLKKDEKKLYPDDYLVKVREINDYHHAKDAYLNIVVGNIYNEKFNHDPLTYIASGKKYNLNRICEFDVERANWIGGHDGTIVKIKEMLSKNNILYTVMPYEQRGGFFDQMLMKKGGGQFPIKTSDPRYSDIEKYGGYNKVAGAYFALVRGEKKGKTELTFEPVPVYLGEDVKNDINALSAYFIKQGIEKAEVVIPKIKMQTLLKVDGSKVRITARSNNRIVVCNGNQLAIGVEKEKYLKRIIKHINTQKLTDTTELSEKDGITAEDNLDLYNTFIDKINSNVYRRFYGAQYEVLIAGRDRFINLRIEDQCKVLCEILKFFKCDRSLSDVSMIGGSKNAGLIAINKKCGQGTSIKIIHQSATGLFENEIDITAL

SEQ ID NO: 9330 - protein, 1488 aa, unidentified
  REGION 1..1488: note = Description of Unknown: Cas Enzyme sequence
MRHILGLDLGTNSIGWALIDQEENKIIHAGSRIIPMDAGMIKDYGAGNLQSPASNRTNFRGTRRLYERAVLRRERLLRVLNVLHFLPNHFAKAINFTDHPGQFIDHQEPLLPYRKDNNGHNEFIFKDSFYEMLEDFGEKHPDMVANGKKIPYDWTLYYLRKKALSHAIRREELAWIILNFNTKRGYYQLRGEEEKTATSKNEEYKVLKVTEVTQMEEDKKHKGNFWYEIRYENGATQRKLSARPPHQIGDKIELIVTTNFDKNGNIATDKEGNAKIKLRDPKEDDWTLMKKRTEHELDESNKTVGAFIYDSLLTDPTLKVRGKLVRTIERAYYKKELIAILNKQKEFIPELQDHAIYMDCVRELYRSNEAHVKSVEDKDICDFIINDIIFYQRPLKSKKGEIANCPHEYYHYINKDTGEIVEKPIKVIAKSNPLYQEFRLWQFLQNLKIIQREKIIDGRLRTDVDVTAEYLNSAEKRENLFQIINQRKDINQTVILKALHLSSDQYRWNYVEDKSLPGNETHMLINPDNLLNTQQEYELWHILYSVDDLLVLRKALTTFAQKNNLDEQAFVENHIHTKPFDSDYGAFSEKAIRKLLALMRTGKYYDAAAIDSNTQCRIQNIIEGKADANIYKQAHKAGIDLKDKNAYQFLPLWLAEYVIYDKKEDFLVWKKPEEIDKYLKLNFKQGTLRNPIVEMVLGETLRVVRDIWAKYGKIDEVHVEMGRDLKQPSDKRKNDQKRMAENERTNHRIRTLLQEFAADDCKINNVRPNSPSQLEILKIFEDGILHDETIEIDDDIQHIINDLGDTSTHVSHKDVIKYRLWLEQQYRSPYTGDVIRLTDLFTPAYEIEHIIPQSRYFDDSLSNKVVCESAINKLKSNQLGYEFILKEHGHIEDGHKVFDKVQYEEFVKKHYANNKGKMRKLLMEDIPDAFVQRQLNDSRYIARKTIEMLSPLVRITTEDGKIADNDKGPVSINVIATNGAITDRLKKDWGINQIWNDIIAPRFERLNQMTQSENYGQWVNKDGKNYFQINIPLSLRGFSKKRIDHRHHAMDAIVIACATRDHVNYLSNAAACSNQADLRYDLQHKLCSKEKTDDKGNYVWRFIKPWETFTQDTRQTLMNIVVSFKQNLRVINKMTNFYDHFENGKRVKVKQQNGDGWAIRKSLHKATVSGAVRIQRKKKVKLADALGHLNLIVDKEVKKDIKGVIAQYHKFDSKTILKYYKDRKYLIGKKDIKQVEIWDTPTPEKADYSAVRVNLDSSFTKEKIASITDTGIQKILLAHLANYNDKANEAFSAEGIAAMNKNIKALNGGKDHKPIIKVRKMESFGLKYPIGETGNKSKKYVEADKGTNLYFAIYVDDEGNREYESIPFNMVVERMKNGLSAAPEQNQKGNKLLFTLSPGDLVYVPEEGEHVDKIIDTSKIYKMMSSSGKQCFFIPSSIASPILDDKKNPELGAGNKSERAWDINKTMIKSTCIKLIVNRIGAIKLVSL

SEQ ID NO: 9331 - protein, 1019 aa, unidentified
  REGION 1..1019: note = Description of Unknown: Cas Enzyme sequence
VVDKNFYLGLDIGTNSVGWAVTDGSYKIRKYKGNLMWGVHLFDEAHQSAERRSFRTARRRLDRRKQRIALLQEFFAPAISKTDPSFFLRIKESGLLPKDSKYRTKNIYFDGPEYTDKDYYKQYPTIHHLICELMNSKDAHDVRLVYLACAYILAHRGHFLFEVDKDHIDQIKDFPPLHEEFIDHLSTICTDIPFDSDCKALEEILRARSTITETAKALTGLWFSGKKPKSDLNSEIRFDKLISLISGGSVKLSDLFINESYKDLEKDSISVSSADFDDTLEALRGSLTEDQWALLETLKKLNDWALLVNSLGGHDYISDAKKGIYEQHKNDLTALKKICRQYLSKTDINKLFKDEKEKHNYTSYINSPTDCNPDDFCKFILKCLDKIDPSSDDIKVLNELKEKCRIGKLCPKQVTTDNRVIPYQLYYAELKKLLDNAASYLPFLNERDEYGSVAEKILSIMEFRIPYYVGPLVKKSSKDTAWIERKADGRIYPWNYKELIDLDKTEDAFIRKMTCKCTYLADEDVLPKNSLLYCKFTVLNEINNITVDGNKISVKAKQDLYTNLFMKKRRVTVRMIVSLLQSIGEMTQKQSIGGVDQNIKSSLKSYLDFQRLILKRSLNESDVEQIIERITATTDSKRLKKWLKDSYPTLADDDIQYIAKLKYQDYGRLSRKLLEEVCETDSTTGEVLSKENIISRLWNTNENLMQLLGSKYKYTDRINMINSEYYSDPANHQTLSERLKQMYVPTAVRRSINRTVDIVKEIKTIIGKDPDKVFIEMARENDVSKKGKRTESRREKISDLYKTAKEITDAETLEELEHKLSSIDDGKLRSEKYYLYFMQLGKCMYTGNVIDFDKLGNDTYYNIDHIWPQSRVKDDSFDNKVLVESAANGEKSDTYPIKAETREKMHGFWHSLHSKGLVSDKKYQRLTRSSSFTDEELAGFISRQLVETRQSTKAAAEIIKELCPDSELVYVKAGLAAEFRQEMDMLKCREINDLHHAKDAYLNIVMGNVYNTHNDIQIC

SEQ ID NO: 9332 - protein, 950 aa, unidentified
  REGION 1..950: note = Description of Unknown: Cas Enzyme sequence
MKQNYYLGLDMGTSSLGWAVTDPQYHLLRAKGQDLWGVRLFPEAESAAARRTQRVSRRRLQREKARIGFVKEVFSEAVNAVDPGFFQRLDDSKYFPEDKTEKQKYALFAGKDFTDREYYEKYPTIFHLRSALLHSNEPFDVRLVYLAVLNIFKHRGHFLNANLIDGQISDIKDIYVQLSEKTANLPSTVNYSELKEILSSSKITNSRRFEQISELLQINKKMPEAEMLRMVCGLKGVLPKAFPEVLFDEEHLKYSVSFRDGNYEEKDIEMQAILDEESYEIVLLLKQMHDWGLLANIMMGEKYLSDARIKAYEKHAYDLKVLKSLYKEYGKGHFNKMFRVMEDNNYSAYVGSVNSEKEKGKVRRGAKIDRTAFFNKIKSDLSEMQKKAPQDTRIQYVLEEIGKETFLPKQLTSANGVIPYQVHLNELKTIMANAESYLPFLKDKDATGLSNSEKIVQLFAFQIPYYIGPLYNDGDPSHNAWVCRKEPGKVFPWNFDEKIDVKASSEAFIHRMVKNCTYLQGESVLPKASLLYEKFMVLNELNNLKINGIAISPELKQSIYLDLFCREKKVTAKKLRDYLFIQGHASRKTGIELSGIDGDFKSSLTSYLRFREIFSVDVLTYDQEQMAEKIIFWATVYGDARGFLKERISENYGDKLTEAQIKRICGIRFRDWGRLSKAFLQLEGADKETGEVQTIIQRMWNDNKNLMECLSDRYTYLEAIEEQGSKINKSFAEIQYEDLEELYISAPVRRMVWQTILVVREVVKVMGCPPAKIFVEMSRDEAGKNEKKRTDSRQKRLSALYKNCKDEGRDWSKEIAEIPEARFRSKKLYLYYTQKGRCMYTGEPIDLDDLFKDNLYDIDHIYPRHFVKDDSIEKNLVLVKKQENSDKSDSFPLDAETQRARYSLWKHLYDGQFITKEKFERLTRTSPFSADELAGFISRQIVETRQGTKT

SEQ ID NO: 9333 - protein, 1400 aa, unidentified
  REGION 1..1400: note = Description of Unknown: Cas Enzyme sequence
MKRILGLDLGTTSIGWALVNEKENDNEQSSIIKLGVRVNPLTVDEKTNYEKGKSITTNADRRLKRSMHRNLQRYKLRRANLMDCLKRNGIITDETSLFELGNRTTFNTYRSRAKAVEEEISLDELARVLLMINKKRGYKSNRKIKESDEGELVDSIDIAKRLYDENLTPGQLLLELYKQGKKSRPTFYRSDLQAEFDKIWEVQSAFYPEILTQDFKDHIRGFGKTQTSGAFYGEYQITTAKNYGKESYSQALKWRTNALLDKKLDIEELAYVLCDINGAINNSSKRLAMISDRSKELYFNHLTVGQFLMKIIERNNNASLKNIIFYRQDYLDEFETIWEKQKQYHPELTASLKKEIRDIIIFYQRDLKSCKNLINFCEFEHSEKEVIIEGKKRIVTVACKVCPKSSPLFQNFKIWQTLNNLQVSVLGHQRKKIVKDDSQLSLFDNNEGEPLQRFLDQEEKDILFKELSIKEKMSKKDILKLLFENSSKLDLNYKEVEGNKTIAALFKAYQDIISLTGNGEYDFSKMPADNVLSITTEIFSGLGYKTDFLTFNPLLPHKELERQPLYRLWHLLYSYAGDNSMSGNEALYKKLQELCGFEKEYAVILSNISLPIDYSSISAKAIRKILPFMMKGYEYSTACEKAGYNHSTRSLTKEELKNKEYKSKLDEIKRNSLRNPVVEKILNQMINVVNEISATYGKPDEIRIELARELKKSQAERELLDEAIRKNTTEAEKCRKILHDEFKIQHVTKNDILRFKLYEELKLNGYKTLYSNTYIPREELFSKRFDIEHIIPKAKLFDDSFSNKTLEVRDINIEKADLTAYDYVNGKYDEKGVLDYENRVEELYNNKAISKTKRNNLLMKEDEILSDFLERDLKDSQYIAKKAREILEEMVPFVVTTTGSVTSRLREDWQLVNIMQELNWDKYDALGLTDSYIDRNGNTVRRIKDWTKRNDHRHHAMDALTIAFTKRSIVQYLSNLHARSNKSSSIYGIEQKELNRDNKDHKLVFNPPIPLNEFRAQAKKHLESVLVSIKAKNKVVTKNINRSKTRNGHYQKVQLTPRGALHNETVYGKIKTFEAEYKKVDGKFTEETILRVCNEKYKHALLNRLSLYGNDPKKAFTGKNSLEKNPVWLNDDHSYSVPLKVKLYKVVNVFTIRKAIDKDLKIDKVIDEGIRVILQNRLDQFNGDAAKAFSNLEENPIWLNKEKGIAIKRVKIKAKVSEETSVPLHIKHDLCGEIINDSKGNPIPTDYVNTANNHHVSIFIDNDGNWHEHVVSFYEATTRAILGYPIVDKNYMCEEGWKFLFSMKQNEYFVFPNEQTGFDPLDIDLLDPQNYPLISPNLFRVQKFSSLFYVFRHHLETDVEEPKELKDITWKSIRSVKNLNGIVKVRVNHIGNMIHSNFNY

SEQ ID NO: 9334 - protein, 1153 aa, unidentified
  REGION 1..1153: note = Description of Unknown: Cas Enzyme sequence
LNYYLGLDIGIGSIGWAILNLDKLRIEDFGVRLFDSGEDQRKNERYSQQRRRYRGIRRLFRRKSHRKQRLKNYLSLIGLVTEIELNTYYETNENNVIRLRCNGLSTKLSPEELAACLIHICNNRGYKDFYDVNVDEIDDPSERKEYLENHKALSHISILMDEKGYRTPAEMICKDEEFNIDNSDYKDYHNSAFSEQHYLISRNMLEKEVDLILEHQRNYYKCLDDSAISNIKNIIFAQRDFETGPGNENDKYRKFTGFLDSFGKCRFYKDKARGCRFTVIADVYALVNTLSQYNYIDSKNQNAFTSELANEIISTALENGSLNKRELNAIAKKHAISISDNNSDTPITKCFKYIKTVKPIFERNGYSWKELVADYYDTENNLLNKVGIILSQSQTPKRRISKLRSVSPQLSEKLINELAMQKFSGTTNVSYDYMAGSINAFFEGDFYGKYQAKINNDITNIDETAKPSKLPPFKNEDDCEFFKNPVVFRAINETRKVINAIIDKYGYPNAVNIETADEINRTFEDRSKDTARNRRNEKENDRILDEIIQITGYSTEKARTYIEKIKLWEAQEGKCLYSGTPIDKSDLLKDPAHLFEVDHIIPYSLILDNTLNNKALVLTAENQFKSQRTPLMYMDPDKAEGFRKRVNVMLKSKKCSKKKYQYLMLENLNDSELLSEWKSRNLNDTRYICKYLVNYLRSNLRFNISNETEDVICIKNHSRVFAVKSKFTSMFRRQWLNEATWGKQDKQDLKKITYLDHAADAIVIASLRPEYVILAGEKQKLSRMYFQAGKKITPEYEASKKACIDSLYRFYGMSKKESERLLSSHSSRLTPIIPGLSDEVDKRLWDKNIFKQFWNVDNYADEEIEEKCEDIFKANVISYYKNDPEFAYSLRIPVVSYKPDHKYRGKITDDNAISVKEIDGKMMQLNKKPVSSLTAKDIDNIYSDDKGLIEKLNSVFEGKKDGYSVGDYLAENGLPYFTDNSGRRVNKVTLISNAPTRWLTKQISDNNYTLMNDRSYYCIELYEDKEGANHLLGITMSDIVHKNGKLWLRADYEYPVDYNKHVMYIFTGDFIRVTNSKGKMKFEGYYKSVKNINENRIFAVTNNNPTAKTPGLTKKDRCIKLSVDILGKLTGYNNGEGIKCGEPLSLLKEKNSQ

SEQ ID NO: 9335 - protein, 1407 aa, unidentified
  REGION 1..1407: note = Description of Unknown: Cas Enzyme sequence
MKKILGLDLGTNSIGWAVVNEATNKEEKSSIVKLGVRVNPLTVDEQTNFEKGKPITTNADRTLKRSMRRNLQRYKLRRENLISCLKENGFINDESILCENGNKTTFETYRLRAKAAKEEITLEELARVLLMINKKRGYKSSRKAKSNDEGELVDGMSVAKTLYEEDITPGQYSLQLLRNGKKYLPDFYQSDLRAELQKIWEKQQTFYPDILTPDFMKVLEGKSKTNTSKIFYARYGIHTADNKSKDKKRQAYEWRVDGLTRQLSIEEVAYVISDLNGFINGSSGYLGKISDRSKNLYFNKLTVGQYLMQELDKNPNVSLKNQVFYRQDYLDEFETIWNTQSGYHPELTFELKKDIGNMIIFYQRPLKSQKGMVAICELENEQREVEVDGVKKTVTIGCKVCPKSSPLFQEFRMWQRLNDVIINDSKATPDLFGNGKATKRHLTEEEMNTLAFELNIKGKMSKQQALKCLYGKTAGLDMNFKELEGNETQTKLFEAYMKIVEMSGHEGYNFEKLNAQQIFDVVEKVFAGLGFNTAPLYFDASVEGKQFDKQPMYQLWHLLYSYEGDNSKTGDESLVQKIRDLFNFDNDDYAKVIAAISFKPDYGSLSAKAIRKVLPFLKAGNDYSLACEYAGYNHSKRSLSKDQIDQKELKDHLDVLPKNSLRNPVVEKILNQMINVVNEVVKTYGPLDEIRIEMARELKKSAKEREEATNEINAANIRHEAIKKILQAAPFNIEHVSRNDIIRYKLYEELKDNGYKTLYSNTYISKEKLFSREFDIEHIIPQARLFDDSFSNKTLESRSINQEKGNATAFDFVKEKYGEEGTKAYKQRIDELLKQKVLSKAKHDKLLMTIDDIPEDFINRDLRDTQYIARKAREILEQIVKVVVPTTGKITDRLREDWQLINVMQELNLPKYRELGLIETFKRDGNEVLRIKDWTKRNDHRHHAMDALTIAFTKLSIIQYLNNLNARSDKSSSIYGIEQKELYRDKHGSLRFLPPMPLDEFRAEAKRQLEQILVSIKSKTKVVTRNVNKSKSKKAEKGYNKRVQLTPRGQLHNETIYGSSQRYVTKEEKVGSSFDAEKIATVANKSYREALQHRLDAYNGDVKKAFTGKNSLEKTPIWLDDLHTRAVPIKVKCVTMETIYTIKVDISAYLLGKKKEDRTKEKVLKRIDKVIDKHIKDILLERYKDSEYDVTKAFSNLDENPIWLNQEKDICIKNVKTRGVLSAEAIHSKRDKFGNIITDKNGHSIPNDFILTDGNHHTAFYVDENGDIHDEVVSFYEAVIRANEGESIINKQYNSHLGWKFLFSMKQNEYFVFPNSKQGFDPKDINLNDPQYYSLISTNLYRVQSMSKKSYGNAIVRDYIFRHHLETSVTNNIKDITYKQFKSLGFVNQIVKVRVNHIGQIVAVGEY

SEQ ID NO: 9336 - protein, 1087 aa, unidentified
  REGION 1..1087: note = Description of Unknown: Cas Enzyme sequence
MTPYALGLDIGITSVGWAALALNSEEKPCAILDLGSRIFDAAEQPKTGASLAAPRREARSNRRRLRRHRHRNERIRQLIVNKGLLSEEELSALFDGVLEDIYVLRTRALDEAVSRPDFARILIHLSQRRGFRSNRKSASEKEDGKILAAVAENARRMEEKGYRTVGEMLLRDEAFADQKRNKGGEYRTTISRALVEDEVHKLFAAQRALGSPFAEEALEKDYLAILLSQRSFDEGPGGNSPYGGSQIERMIGRCTFFPEEPRAARAAYSFEYFSLLQKVNHLRLEKDGESLPLSKEQRRTLIELAHKTDNLDFARIRKALAIPEPWRFNAVPYRLEQEASAAEKKEKFNYLRAYHAMRSAVDRNGKGRFALISPEQRDAIGTVLTLYKADDRVRQELAALGLEDCDIEALLTIGGFSKTGHISLKACRLLIPFLEQGMNYSDACTAAGLAFRGHEGQDRSLYLHPTEDDLADITSPVVRRAVSQTVKVINAVIRRYGSPVFVNIELARELAKDFGERKQLEKENRENRSKNERLMERIRSEYGKYNATGLDLVKLKLYEEQGGVCAYSQKQMSLQRLFEPNYAEVDHIIPYSLSFDDSYRNKVLVLTEENRNKGNRLPLQYLSGQRREDFIVWVNSAVRDYRKRQKLLKECITEEDEARFKERNLQDTKTMARFLMNYIGDHLAFAPSVKDRKKRVTAVSGSVTAYMRKRWGITKVRGDGDLHHAVDAVVIACTTDGMIREVSRYAAWRECRYMQTESGSLAVDERTGEVLREFPYPWPQFRRELEIRLSPDPARLLREIHIPYYDEHGIRPEAVFVSRMPRRKASGPAHKDTVKSARALDEGVVLVKRPLSDLKLKNGEIENYWQPESDRLLYEALKARLLAFNGNGEKAFAEPFYKPRHDGSPGPLVKKVKLREPSTLSVAVHGGQGIADNDSMVRIDVFPVPGDGYYFVPVYVADTLKPELPNRACVAHKPYDGWKEMKEENFLFSLYPNDLIRVKHKRGLKLSKVNAESSLPDTWETNDILLYYAGADISAGAISCRNHDNSYQLRGLGLKTLEKLEKYTVDVLGEVHRVEGEPRMRFTPKRS

SEQ ID NO: 9337 - protein, 971 aa, unidentified
  REGION 1..971: note = Description of Unknown: Cas Enzyme sequence
MKKVLGLDLGTGSIGWAVVNEAEAENETSSIVRLGVRVNPLTVDEQAQFESGKPITTNAERTQKRAMRRNLQRYKLRRENLIEILKQQEWIDDETILSEQGNNSTFETYRLRAKAASEEITLEQLARVLLMINKKRGYKSSRKAKGEEDGVFVDSLDVARQMYDEGLTPGQYGHRLLSEGKHLIPDFYRSDLQSELDKIWTFQLAFHPGILTDDLRKSIEGMGGRSTSLEFRKQFGLFTMDIKGKKFEKNKILYSLRNESLQRELNKEELVTVICDINGQINGSSGYLGAISDRSKDLYINHKTIGQKLVESLDKDPNRSLKNQPFYRRDYLDEFEQIWETQARFHSELTDELKHEIRDVVIFYQRRLKSQKWLVSNCLFENRKVCPKSSPLFQHFRIWQNINNIVVKVDDKEYSLDEEQRQMLFDELLFKEKMSKTEVVKLLFSKTRGIDLNFSKLEGNRTMASLLKAANSVIELTGHGEWDFSKMSSKDIVSTVRGVFSGLGYNSSWLDFDSNKQGEALDREPQYRLWHLLYSFEGDNSATGDEKLVEHLMALLNMPKEFARLFASVKFEDDYGSISVKAIQKILPFMAAGHIYSEACALAGYRHSAQSLTREEIDNRPLKDHLDQMARNSLRNPVVEKILNQMVNVVNGVIDAYGRPDEVRIELARELKKNSAERQAMADAISKNTKETERIKALLQKEFGLTHVSRNDIVRYRLYQELETNGFKTLYSNQYISREDLFSKKIDIEHIIPQARLFDDSFSNKTLEFRDVNIEKGSATAMDYVRYKYGVDGAVAYKARIDAMFQKGAISAAKAKKLRMTVDEIPTDFIERDLRNTQYISRKAQEMLRDIAHTVTATTGSITDRLRNDWQLVDIMQELNWDKYERQGLTQVIIGRDGQRIRRIDNWTKRNDHRHHAMDALTIAFTKPAYINYLNHLNARDKDDIRAIERRFLERDGNGHLRFKSPIEPNF

SEQ ID NO: 9338 - protein, 1097 aa, unidentified
  REGION 1..1097: note = Description of Unknown: Cas Enzyme sequence
SISLKEELDSKEAALTAILGDGMQLLNAAKALYDWALLDELRAGKEYLSSAKIETYEKHRADMIRLKRIVRAIGKEQYSQMFRRTDSGLNNYPAYSGHGAGHRCTYDDFRKYVKKVLNDGASQLTEEQKQEAAWINSEFAEERFLPKQTSKNNGVIPHQLHEKELKAILSRAEKYLPFLTEKDESGLTRSQQIVEVFRFRIPYYVGPLNSKSDHAWLVRNGEKIMPWNFERVVDLSATAENFITRMTAKCSYIGEDVLPKDALIYTRFTVLNELNNLKINGKPIPVELKQDIYQSLFLRFRKVTRKRLTDYLLSEGAMQKGDLISGIDGDFKSSLGPWLTFASLLRDGEDERMIEDVIRHIVLFGEDRKLLENWLSKTYGARLTKDEQRYIMQQRRKFSGWGRLSREFLTEITHTDPETGEICSIMDMLWNTNENLMELLSGRYTFAQGVEAYRQRVYADKQTLDDVLKESYASPGIRRAIHQTIAIMSEVEKITGGKPKRIFVEMARSEEEKGDAGRKASRKQQLQKLYERCGEDERELRELLDSKNEADLRRGKLYLYFTQLGKCMYSGEPINLSALDSDYDIDHIYPQSKVKDDSLDNRVLVKRRLNAEKSDRFPLPADIRQKMLPLWRTLREEGFISEKKFSRLTRREPFTENELSDFIARQLVETRQSTKLIAELLQKRYGEETEIVYVKAGNVSAFRQDQRLRPDGAQCQAWECRSNDHTIQDPLFVKCREVNDFHHAKDAYLNIVVGNVYHVKFTKNPLNFIRSHEKYSMNSVFAFDVERGGETAWRRGNEGTIATVRRMMRKNNILFTRYAKKLYGGFYDQLPLTKGNGQASLKPSDPRMTVERFGGYNKVSGSYFCLVEHTVKKERVRSLETVYLMSEKLYLSDPERYCREVLGLKDAKILIPCIRINSLVSFNGFRMHVSGRTGSRIIYKNANPLVLDISWHQYVKDVVKFAERTGKDRQNVKPTVFDGVTAEKNLELYDLLKAKLQVKPFASMYETPVKRLEEGRDAFIRLPEADQCKTLMQVLHLFENNAMSADLKLLCGKAGIGILLTSKNLDNYAGMSFKLIQQSVTGFFEQEVDLLSCGAEA

SEQ ID NO: 9339 - protein, 1047 aa, unidentified
  REGION 1..1047: note = Description of Unknown: Cas Enzyme sequence
MSQNNNKIYNIGLDIGNASVGWAVVDEHYNLLKRHGKHMWGSRLFVQADTAAKRRLYRSTRRRYNKRRERIRLLRGIMEDMVLDVDPTFFIRLANVSFLDKEDKENYLKESYKSNYNLFIDKDFNDQTYYDKYPTIYHLRKHLCESKEKEDPRLIYLALHHIVKYRGNFLYEGQSFSMDVSNIEDKMIEVLKQFNEINLFEYVEDSKQVDEVLNVLKEPLSKKHKADKAMALFETTKDNKAAYNEFCNALVGNEFNVSKMLKEADLHDEDEKDITFKFSDATFDDVFVEKQPLLGDCVEFIDLLHDIYSWVELQNILGSAHTSEPSISAAMIQRYEDHKDDLKILKDVIRKHLPKKYFEVFRDEKSKKHNYCNYINHPTKTPVDKFYTYIKSLIKKIDDPDVKTILDKIELESFMLKQNSRTNGAIPYQMQLDELNKILENQSVYYPDLKENEDKIRSILTFRIPYYFGPLNVTKERQFDWIVKKEGKENERILPWNAEEVVDVDKTAEGFISKMTNFCTYLPGETVMAKNSLTVSKYEVLNEINKLRINGHLIKRDMKEKMLTSLFMNHKTISSKTMVKWLITNQYFNNKEDIKIEGFQKEEACSTSLAPWIDFTKIFGEINDSNYKLIEDIIYDITVFEDKKILKRRLKKEHDLDEEKIKKILKLRYSGWSRLSKKLLSGITSNQKGKTPETILEVMERTNMNLMQVINDEKLGFKKIIDEANTSQCTGKFTYEEVEKLAGSPAIKRGIWQALLIVDEIKEIMKHDPAHVYIEFARNEDEKERTDSFIKKMQDLYEEYDFRDEVEKSAYKDLKKEDNNSKIRSERLKLYYTQMGKCMYTGKALDIDKLDTYQVDHIVPQSLLKDDSIDNKVLVLSSENQRKLDDLVIPTSIRNKMVGFWEKLFENKIISPKKFYSLMKTEFNEKDQERFINRQIVETRQITKHVAQIIDNHYENTQVVTVRADLSHAFRERYNIYKNRDINDFHHAHDAYIATILGTYIGHRFESLDAKYIYGEYQKIFRNNKNKDKEFNKNKDGFILNSMRNLY

SEQ ID NO: 9340 - protein, 954 aa, unidentified
  REGION 1..954: note = Description of Unknown: Cas Enzyme sequence
KTDEKCTQEEFCSFLKAKLKGMENSEDEQIARIWKEINDKTFLTKLKGSDNGLIPYQLELKELNAILNNAEKYLPFLSVKDETGLTVSDKIRSIFTFRIPYFVGPLNRKAKHSWIVRSDEPIYPWNFKDVVDEKASAHAFMENLIGRCTYTGEPVLPLNSLLYSEYMVLNEINTIKVNGQPITVDAKKLIYDELFVNSKKKVRKKNIYNLLLQNGLITKDDEITGVDDEIKANLKSLHDFRQILDRTKDKAQVEKIIRSILVFSDNPKMLETWLRENTHDLTESDIRYILRLKYKEWGRLSAEFLTKVYTPDENGEAVSIIEMLRNTNANLMQLLSDEYDFSKNAKLYRLEHNPISETIRDRLEELYIAPAVRRSIWQTLRIVDEVVDIEKAAPAKIFIEMARGSKEEMKKKRTESRKNQLLALYQSCKKQSEELYDKLQGETDQTLRRDKLYLYYLQMGRCMYSGEPIDLDKLLKDNETYDIDHIFPRSKIKDNSLNNRVLVKSVLNRDKTNIYPISEDIRNRMRDFWSMLHQKGLISDIKYARLTRNYPLTDEELSSFVARQLVSTQQSTKALADMLGMVYPNSRIVYSKAGNVSDFRQEFDFIKCRDINDLHHAKDAYLNIVVGNTYNTKFTDQFFRNIHAENYSLNMVFKFSTPGAWKADGTSIKTVKKYMRKNSPIVTFMPVEYKGIISDLQLMPKGKGQLPIKTGLSVDNYGGYNKLKGSYFCVVEHGPEKKRIRTIEPVYLYAQPEYDRNPAEYAERVLGLESPRIICSKIMINALLELNGSRLAITGRTGDRILYKHTYQFAVDDEHTKYIKEAGKYIDRCVVANMVFDKNEYVTHEKNVMFYDWLIQRLESNVYASISPIKNVAVNLLENRDKYNSLDTLEQAKILMEVLKTFQCNSVWTSLKQLTGKGVVGIILFSKNLVSLKSAYLIHQSVTGLYEIKEDLLK

SEQ ID NO: 9341 - protein, 909 aa, unidentified
  REGION 1..909: note = Description of Unknown: Cas Enzyme sequence
TLEPNKPRCPQSRPEYEKFRAWSFINSIRYGIDCNKELSIETKKALFDEVFVRATDFRFETIRKWIERKTGEHFAYKTDRKQRTINYKDNTPIIACSVTFRFLQLLGENWQNWSFHPNAQHTNSKNKNHWHPTTYHWEDVWHVCFGADEEEPLRLFANKSNLDYNLLLRLWKAMPIAYANLSLKAINNINRFLEKGLIYNEACLLAKLPDIFKEKWTDEVEYILFDSITSIITANSEERKIVNIVNSLIANYKSKTDEEKQGYKDYSYNLSGEDYCDIEKCAAGFYGIKTWNEKDEEERKMIINQIAHLYQQFFHDEKRQYIKPNKIEDSIKQFLTDNFEDLNPRSLSKLYHHSQIEYYKPASIRRVDKGDKMLYMKLLENPSIASLRNPMALRVLHTLKRKVNDLLMEGIINEDDTRVVVEVTRKLNDANMRWAIKHYQDIHNAENEEFRTMINEIADIPKVRMLVEQHDCNGQVLSEKDSSKQEYYYERYMSNLIKKYRLWVEQGGFCIYTRKPITISSLINGEGVDIEHTIPRSISFDDSLSNKTLCDSNFNQKEKVNRIPSQLPNYEEILLNIRPWVEKVEDIRGRITFWKNKSKKAQTKEQKDNAIRQRHLWELEFEYWEKKVNAFLIKEVTTGFRNNQLVDTSIIAKYTMHFLKSVFSRVEVQKGKITSDFRKILGIQDDDTLKVRDSNSHHAIDAMVLTFIPVAARRDELLEVFFKRQDAKDLGHDVSQFDNEIKLLLRKNGITANFAEIVENIKSTVLAFYERKSQALTIAKRRKRVRGKIVAQRDEKGNIIMEKDEYGNFRTDRFGHRIPLAKQWIKGDSIRGELHDKTYYGAITQHGSENIKYVLRIPLKYKTNSLDKGFKSWDELGKAIVNKSLVEMMKSQFPEDTSLKEACEQGIYM

SEQ ID NO: 9342 - protein, 1062 aa, unidentified
  REGION 1..1062: note = Description of Unknown: Cas Enzyme sequence
MGLNYRLALDLGTNSIGWSMLHLDMNAQPSPTPDAVIRAGVRIFGDGRDPMSGSSLAVARREARGMRRNRDRNLDRKNRLTDVLIETGLFPADRIERRKLESFDPYALRARGLTEELTAFEFGRAIFHLNQRRGFQSNRKTDGGDKDGSLMKDSISSLRQQLIDDGYVTVGQWLAERHSDRQSVRARLRGNSARDRKYDLYFDRSMIRDEFSLLWEVQEQLNPNLFTSAKRQQIADVIFYQRNLRPVRPGRCTLEPELDRSARALASSQRFRIYQEVNNLKIQMPDFSYTGLTLPQRDLIIGKLERQKTLSFDAIRKALKLQGSPKFNLEGIKRKDLKGNTTSFILADDRRFGSSWHELSLADQDEIVVQILDEQDEGKLVAWLMEYHGLDQDAAEQTSAAQSAITSLATGFSRLSQRATLLILPHLVSAVTTYNVAVELAGYGSHSALTHAEQTGEILEQLPYYGEYLTRHVGHGTGLVSDLPADRYGRIANPTVHIALNELRKVVNTLIATYGPPAQIVLEIVRDLKLPKAAQDEIESAQAKRQDENTQYRKEIKELTGIDATRDDIQKMRLWVELNRDDVTDRCCPFTGERISIARLFSSAIEIEHILPYSRTLDDSMNNKTVAMVKANRDKGNQTPFEAFGHSPDGYDYEAILERALHMPKQKAYRFAPNGYEKWLRDDADFLARALNDTAHLSKIAKEYLYLVAPGEVWVVPGRLTSQLRRHWGLNSLLHEGGEKNRADHRHHAVDAVVIGFTDRNTLQRVAKASSQSTSTLKGISVEGPIPGRSGPEFRAKVQQVINAIVVSHRPNHGHQRQMNNDTNYGLRPDGYVALRRRLDGFDSVAGVEKANFADINLKRRLIEFMGGAEGGAFKLRLAAFTGETGTHSAKILEKLDTIPIALSQEAQHRAPKGRKSRDDNAVRGVKGDSNYCIEIFSDERGKWRSEVISTYQAYRIVAEFGEERLRDATRTQSGQPLIMRLLRDDIVQLTMDGSRALYRLCKFYSTGSMFFAGLNESNVDARVRIKEISYLHKTAGSLATLKAKHVAVDPTGRVSKARSHS

SEQ ID NO: 9343 - protein, 1431 aa, unidentified
  REGION 1..1431: note = Description of Unknown: Cas Enzyme sequence
MKTNVSSEKILTESQEMVWAFDLGKGSIGEAVRRGNEFLHKASLLIPAELGRRGPATMSGTPASQYRMLQTRRAHKRREDWLDAVWEAAGLKPLVSRTVELVNFKTRKVKKTIHGKTRWKNKKVGGHWVLKNKADFLLEKEFGAKDDSTCYTSCLLRIKLLAGDKLETWQLYKALFSAIQKRGYAKVPWEKDRKDADDKNAQEEAENAVAGKRWTDFSQYPDVLKLGDDFKRACYFDAWHMKLWNPTEPKHVELHSVERPESTQKVVFPGRIIAEEVLCLAENAAKQEARLNEAFDKVMADWRAKVSKRIARVNEHRARLGKSPLPEPNFSIGAKNFAELLVYGPGGSPKTVKEGFRHIPSHDPDIRRAMGLRPGGIDDAMGALNQEVARFDNRLRAPCALIPRLSVCRNLAPDEILKIKENDSKKLLPAQVTFLMELKKMSVESVEKGDSARKQRGLTAEELGEMFEKLNSQRKYHLTKREWRTWCRHFAVLAVTDPEEKNAAPKLDADAESGGKKKPDELAVNRPRAAGRARFSRPALRLLMELLLSGLSPAAFHAKLVGRNEELLNKLNLDVLDKEPVITKKDSRGNDYINYEKRSRPWLLVSDLDFLPRMSKDGKSADSWDNISIPSQQLDRLAQESDAPASKRKEAIRDLIGEQNNPIVRHRLETFWKRLEKLEAKYGEPRSIVLEFVRDNSETSWLGTEAIKEITAAQKKQRDRRETAKKMLAEMGKPNGDVLKYMLWEAQGGQCLYGKPAGNPQCPYTETALSFTDLHKYRIDHIVPRAKGGPDSFSNFILTTDEANAAKGDRTPWHWFRQDRSLADWDAYKERVLRRFHALGGKKVRLLLGADAENLVERYTPLAETAWIARLAQTVASLHFGWANGNDSEGKKRVITVSGGLTGRTRRKYFLNSLLGRDRELDKNISEKLAELAALRSSTLPREEQKAKARILLAELDELNAESGKARDDDRHHALDAMVLSFLEGWVNDPKREDEFRFALLGDNPTYPTSLEREIGQLKHKIIALGAVVKKTVAGEERARINQQIIACRDALAGMRMERNALKVREAFREEINGNKEKNIKPILPIWLHYPKPELAAALHRGVWLRVESASRAAHATIDDFDKAFEQERVSLMDLPYLENRITEELEFSVAHGLRRISEIVTHKDYDFKAVQPVVEEFLNTNPTETQWKEWCASSSAPAGIKPKKGQAAKLEFIFYKIEEVRTKRPQETPSARASLYSIGIGSNEVPEFDRTHFEIQVARLVCRPAKGMDKPGIPLQPDSELQNKLRALLPRIEEFYRQYPPDPGDRPRKESARAAWQAQKEAAAKAWDEFIKETGLDRNKRVYLSTDSAVVTDRRYEPAGISSVLLHRVKRFDCAKAEKQAQSISDAWTRFQLREFLKHRPTPLEWKEFCATFVQVSRPTFKEFLTGQPQ

SEQ ID NO: 9344 - protein, 1053 aa, unidentified
  REGION 1..1053: note = Description of Unknown: Cas Enzyme sequence
MKKYRLGIDLGATSLGWCILELDDSNKPRGLIDLGVRIFPDGRDAKTSQPLNVTRREHRGARRNRDRYLQRRAYLMDTLIEYGLLPEDEEKRKQLQLIDPYFIRAKALDEEISLYEIGRIIFHLNQRRGFKSNRKLDSAEKETSRMKDAIKELRQKLEDVNTRTLGEYLYNLNKDIPKNEHHKKRPVRIRDFGKSYNFYTSREMYKEEFDLIWKSQVRFHDTLTDDIKEHLRDIILFQRPLKPQPKGKCRFEITEPRCPVAFPMYQQFRIFQEVNVLRLLDFERKEHILSKEQREIIITTLMKQKTATFKSLRNKIVNTDPGEYVFNLESEKRTKLQGDETSFIMRKDEYFGKQWDTFNDEQQDEIIRRIINEDNDIEIEASLTTWLQENFEVTEEQADNIKKIRLPQGIGRLSKKAIKKILPFLKEGNVYSDACAKAGYHHSDFRTGEVYDEGDLPYYGKVMPHHVSFGTNDPDDIDEIRYGKIANPTVHIALNQLRKFINALVTKYGPPAQIVIELARELKFGKRRLDEINREQTANRKHNEEVADELEKIGIENTYQNRLKYKLWEELDPDPIKRCCPYTGKQISINELFTNKFEIEHLLPKSKTFDDRPLNKTVSYYLANKFKGERSPYEAFGNSPEDYNWDEILERSKRLPPKKRWRFFPDAMKNFEDQGELISRLLTDTQYMSKMAREYMSYVCGDKNVWVIPGALTSMFRAKWGLNELISDDAEKNRADNRHHAVDAFIIACTDRAMLQKFARATERSRERFIEEMPPPFEGFSHDEMKKKVDDIVVSYKPDHGNAKAAIQKDQTVGQLHDETAYGLVSETEDKIILSVRKPIRELNTIKKINEIADTQIRETLISEIENNKDRKIEEILDDFSQRTGTKRVKIHVEKDKKTVIPIRNKKGEIYKYYLSGNNYCADIYCPGKGKDAGKWQIEIIPMFYAHQQDFEPEWHKKYPTARKIMRLFINDNIAYDEGEIRIIRRVKKMTNNLVYLRNPVVSEEKGDQLSWAASPVQLQKKNARKVGVDILGNVSDPRKHEYTRDQKERRLS

SEQ ID NO: 9345 - protein, 1031 aa, unidentified
  REGION 1..1031: note = Description of Unknown: Cas Enzyme sequence
MMSPGVAEPLTILGLDIGANSVGWVLIDRQEEEGPGRLKDAGVRVFEAGMNLPEESEKEASHNVERRQARQRRRLLERRRMRLYAVRRTLQDHGLLPPGDPRYDAAFKQWLSQTDPYTSRAQGLDARLEPHQIGRAIYHLAHRRGFLSNRRAPEKKDEKPKVLQKAIGHLEDEMKSAKARTLGEYLSRIAPPERRRSQYTLRKWLQEEFDKLWKSQQGHHPGLLTPELKQKIRDKIFHQRPLKSVARLVGTCELERGRKRAPRALLLAQRVRLLQEVNNAQVSIEGCPRRRLTHDERKKLVKALETSAELKFAKVKKILGFPQSVTFNLDRAGKKGFVGNKTAARLIEIFGKKGWDQLYSRDRDIVVEGLLTIQKEGDRGRDEIVKEWGKRRWSLAEEQAEALADVALEDGYAHHSVQAMEKLLPHLEAGLTHPEALERAYPDPAAATAVDRLPHAPKLRNPIVERALAETRKVVNSLIHRYGKPARIRIELTRDLKRTSREREKIWKGQRQREWERGRAEKAIANEIDRQQPSRDDIERYRLWEECNHQCPYTGRQINMADLFHESRFDVEHIIPLSRSMDNSFLNKTLCEAQCNRERKRNKTPWEAFGETPAWEDIIARVERFKADEETKKAKRRRFEMKQVDDKFTAQQLNDTAYASRMARDYLARLYGNQWKKCVEVSRGRVTAYLRRAWGLETILGAKPDEAAAETRRGKARDDHRHHAIDAAVVALTTLGAVHALSNAAKQEIPGKARFRPILPPWEGLVQQVRDAVEKMIVSHRPERRVSGQLHKETFYGFVTDPRTGQKRAVVRKRVEALTCHEIEKKEIVDPTVRAAVEARLEVLRNQDPKNAFKNPSDHPTLRTRKGCEIPIHRVRVFQAVKPKTIGSGISERRVALANNHHLEVFEKPDGSWMGEVVTMLEAMRRKKTGEPIIRRQDNEGRRLLFSLSRGEAVQINTGTGERVTAVVQTISGPNPGKVDIEFRRHSDARKAEDVRKAGDRIRVSSYADLKQREARKVLLTPLGEIRWAND

SEQ ID NO: 9346 - protein, 1223 aa, unidentified
  REGION 1..1223: note = Description of Unknown: Cas Enzyme sequence
MEKVLGLDLGVSSIGWAMTLQDPNNEERNEIIDCGVRIVPLDTDEIKEFGKGGNVPTNVARRQARGMRRNLQRYRWRRQQLFRALKQLGMLPDERLLRQLSPLQLYALRERALSEPLSLPEMGRVLIHLNQWRGYRSNRKEQTESDGKKPSEYLEQIEKNEERLQGQTIGQYFAARLRESGGYRIRQQLFSRETYKQEFDRIWEKQAEYHPQVLTEANRSWIRDRIIYWQRPLKSAKGLVGECALEWCYALDKNQQPIRLPNGQLKIVRPKCAPKSSPLVQVCNVWESIHNLRVYDHFGEERPLSQEEKERLFRILQDRSLTARQIIKDVLLLSPKTHTVDRLIQEKGLEYNRTRARLLEVFKEQKINREDLLEFNPVIEEVEWDNPETGERLRRLQVRGDFTQQPLYQLWHLLYATEDERNLVALLQKRYGFTEAQAKALAKLDFTSAGYARKSHRALRRLLPHYQRGLDYAAAAQAAGYRHANQMTKEENQARPLLDRLEVLPKNSLRNPVVEKVLNQLVHLVNDLIATYGRPDEIRIELARELKQSAQERQQIEKLINKNKKTNEEARKKIAEILGIDPQAVSRTMIEKWKLYEETDGLSLYSGKKIDLPTLLRGNAVDIDHIIPRVSRFDDSFQNKIFCEASLNQAKSNSTAHDFMRDQPVSGLQPYDDYRKMVKDLYEGKKISKAKYDNLMMTAEDLLKDEEFLQRQLRETQYIAKKAVEMLRQVCREVRSTTGSITDFLRHQWGWDEVIKELRLPQFRQAGEDLIEYRPAANGGRDRVVIKDWDKRKDHRHHALDALVVAFTRVSHIQRVTKLNQIMSGKFGEERRKELLRTGRDLYIAGKAPFTFAQVSKAIANILISFKQGLRVATRSRNRPKGSTTVQITLTPRGALHEETVYGRIKRYKKVPLNGKFSPAMVTEIAHPHQRALVEARLAQHNGDPKKAFKDLEKHPITYGPNGSKHLTHVTVWDYVLVARKSVDASLSEKAVEKIADRGVRRAVAERLKAGGGKSKEAFKNVGTDPVQPPRHHPVKRVRVENYAEKAIRLPRGYVEPGSNHHIAIYRDADGNKHEHVVTFWDAFQRVRLGLPAIITDVPAALQYAQDQLPEGVTDLLLPEGWDWQFVVSLARNDMFVFDLDPSEIDFTDPNNRARISRHLFKLRKASKKQYWFLHHLETEVLEDLASKKAYRCKQCSMESLAGAVKVKINRLGHVVEVGQPFS

SEQ ID NO: 9347 - protein, 1245 aa, unidentified
  REGION 1..1245: note = Description of Unknown: Cas Enzyme sequence
MKRILGLDLGSASIGWAMISESEDNGNVKREILGLGCRIIPYEGTEGKDFEKGTGESRNSIRTQMRTMRKGYDRYQLRRKFLVQELIKHNMYPTDELKGLPKMQLWELRNRAATEKVSLTELGRILLWLNQKRGYKSSRSDSNLDKKDTEYVAKVKSRHQLIKEQNLTIGQYFYQQLQNDQFFRVKENVFPREAYIEEFDTICNEQKKHYPNILTEELISKIRDEIIYYQRPLKSQKGLVSVCEFEGFWRKGPDGKEYFVGPKVAPRSSPIFQYAKIWENINNIKIENKQGNNIEITHEQKKALFEHLDNNEKLTTTDIVRILGLKKNECFFNKQLAKGITGNTTKCAILNCFDEVSKYAHLVKFELDIIETSKNTYQYDNTTGEVINEKKVKYIHPKIEKEPLYVLWHTIYSISDQDECSRVLQDKFGIEKDVADKLASIDFTKQGFGNKSAKTLRKILPYLMEGDGYSEAMCYAGYNHSNSLTKDENLKRDLLDKLKPIPKNSLRQPIVEKILNQMVNVVNAIIDKYGKPDEIRVELARELKQSKEERNETFKRNNDKERENAQISKKLEEFGLRATRNNILKWRLYEEMDNEDKKLNAICIYCGQPISLVEAIKGADVDIEHIIPKSKLFDDSQSNKTLAHRHCNTGKGDLTAYDFMKSKPTEVFNAYLERVAKLYANKVISKAKRDKLLMTESKIPDNFIDRQLRESQYIAKKAREILQTISHNVWTTSGSVTAELRRLWGWDDVTMNLQFNKYKELGLTSFVEWESEHGKNKHSKEVITGWSKRDDHRHHAIDALVIACTKQGYIQRFNTLNSSKTKEDLIADVEKRSIEFKEKLSLLEKYIVSEQPFTVKEVEDKVAGILVSFKAGKKVAVIGKRKVGEKGNKKVVQTGIIVPRGALHEESVYGKVKTVERKPIKYAFENPDLIVIPKIKKLVEERLSKFQNTKDAIASLKKEPLYIDKNKQVLLEYASCFSSDYVIKYPVDINFNKVDKVVDGRVKEILQARLNKFNGKPKEAFKDIQRGDRVIKWYEDEGLPKPIKSVRCYTGLSAVVPVKKDENGNNIGFVKPGNNHHIAIYTDSEGIKHEHVCTFWHAVERKKFGLPVIIKNTNEVWDKIQQEPEGTYPVEFLEKLPLPNLTLELSMQQNEMFILGMAPEEISNCLDKKDYKAISEKLYRVQKLAEKNYVFRHHIETQLVDDENSRKSKRYYLIQSLGALFTLNPVKVKIDCIGNIIAWNNTDRV

SEQ ID NO: 9348 - protein, 1094 aa, unidentified
  REGION 1..1094: note = Description of Unknown: Cas Enzyme sequence
MNAIKKMQGAVDAPDLQLAFDVGHSSIGWAVLQKTGKQPSDINILGCGSVVFRADDCLASSRRAYRRQRRHIRSTRQRIARMKVVLTHLGALKQSELDQPGCAWPWQLAARVLQGGKLLTWPELWDVLRWYAHNRGYDGNRRWSAAETEARKEDSEKEENARTLMGKHGAKSMAETFCKELGVDPLGKKKSSMKRFKGLNAAFPREVVEGEVRRILQAHSGKLKGVDANLEKSLFSDWRAILCPDLKLPKRYEGGLLFGQLVPRFDNRIISICPISGQKVPSRNCPEFLNFRWAMQLANIRVGKHSDRELRPLNSTERAAVHQRMRERGYITPKELKGAVRGATSCERDNLDTMLMHPDAKEALLLDPVQKLICSDDLQPFWKLLPERLQKRLRGQWRRGKIFTLGQIRNQLESSGDADAFDGELQHQLDAHNSKAKKKDKQTTREELLQKHFPPKPLKLDGRAAFARHLLKQAYEDILAGKPHPKEEGGCLFLSEEIREKQLNREIAEQTNNHLVRHRLLILERLLADIIKEYADGKKERIGKITIEVNRDLREMSGKTAKEKAQDLGLRIANHHHVAEKLEKAFAEERNGRRIPITAGLIRKARIAEDLGWRCPYTGIDYEPKDLVTRRVDKDHIVPRSERASDSLDSLVITFSAINKWKGKRTAWQFVEQEQGKPVPDLPNLSIVSLTRYKQFVESLETKMGHNDDKRRKKRRKELMLLPKYEEKEFVPADLTQTSQLVRLGAQVLKRAFSACREKPTVVSLPGAVTGTVRKAWKVLGCLSRANSQVLDENGDVRTKTEIRDITHLHHALDACVLGLATHYIPNNGRVWELLMKRNPNETEKQQLQALGIFHFNAEKRFEMRDLDDKLKDQVRQRLAERRVAQHIPARMDGLPVDQNMWRLRGWDAENKAMLEKYSRDPSGKRKRDVPKAGANNKQRLIGWNPPEGDGKLQRLKAVLITNENYGVAILDHALSNDDRLKLVPFHKVFPLIFGKKEDRKKGGLVALNQGRNPRILRLGNVVLIPRGTHAGCWRIFSVKNNTGGLAVSLGEPDALACRRDKQNVGLKILLRDGLKIVGKSFTGIAACPTTSSA

SEQ ID NO: 9349 - protein, 1080 aa, unidentified
  REGION 1..1080: note = Description of Unknown: Cas Enzyme sequence
HVFLPEDENLGIFIQQEGYLDKEQLLASDLSKEERPINQNWSWDRILRSCFIKQADVLQGLYFFEDHFDKEVIKRNFDFYEPRTVHESSLSPCLHSVLASWLGYLGFYLYGGSIRNKWFNINNIKLGSRTGGNIEITTEQKWLLFNHLDNNEKLTPSDLLKILDLKKENCYVNKQLAKGISGNITKFAIRKCFDDSTKYDHLFKMDLNIVETDKEGYLYDKKTGEIKGSKNIKFIDPIIEREPFYQLWHIIYSIQDQEECSRILQTKFDIEKPIADKLVSIDFSKHAFGNKSGKVIRKILPYLMEGDGYSEAMSYAGFDHSNSLTKDQNLERKLLGELKLLPKNTLRQPIVEKILNQMVNVVNAIIAKYGKPDEIRVELARELKQSKEERNDTDRAMSKRQRENEEISKRLAEYGLRATRNNIIKWRLYQEIDNAENKLNAICIYCGQPISLIEALKGNEVDIEHIIPKSKLFDDSQSNKTLAHRKCNTNKNDRTSYDFMKSKSEQALAEYVDRVNALYANHVIGRAKRDKLLMTESKIPDNFIERQIRETQYISIKAREILQTICHNVWSTSGNVTAELRHLWGWDEVTMNLQFDKYKSVGLTHMVDWESEHGKNKHQKEVITGWTKRDDHRHHAVDALTIACTKQGYIQRFNTLSASKTREDMKFEVDKRSIEFKEKLNLLEKYLVGENPISVDEVQNAVANILISFKSGKKVAVIGKRKVGKRGNKKVVQTGIIIPRGQLHQEFVYGKIKSKEKKPVKYLFENPNLIFSPKIKSLIENLIEKYEGDAKKAYASLKKEPIFLDESKTTPLAFGTCFKEEIVIKYNVNTDFNKTDDVIDKNIRKILQNRLEKFGGKNKEAFKDVQGEGKKLIKWYEDEGLERPIKSVRCFTGLSAVVPVKKDEQGKNIGFVKPANNHHIAIYIDNEGNKHEHVCTFWHAVERKKYGIPVIINNANEVWDKIQMQADGTYPDSFLEKLPVVQWNLLMSMQQNEMFVLVMTSEEIEIAFSKKDYRTIGDKLYKIQKLGSSDYTFRHHLETEIIDDPNAKICKRFFRIKSIGSLFSLNPIKIKINCIGDLKV

SEQ ID NO: 9350 - protein, 1026 aa, unidentified
  REGION 1..1026: note = Description of Unknown: Cas Enzyme sequence
MLHTMRYRLALDLGSTSLGWAMIRLNANDEPCAVIKAGVRIFSDGRNPKDGSSLAVTRREARAMRRRRDRLLKRKARMMRTLIEYGFFPTEAAQRKMLETLNPFVLRAKGLDQPLTPAEFGRALFHINQRRGFKSNRKTDKKDNDSGALKTAISKLRETLKAENCRTVGEWLHRRDVAGLTVRARYHQDKTVKDDGKTKINKYYDLYIDRAMIEAEFDALWAKQAELNPAQFTEAARADLKDVLLHQRPLKPVKPGRCTFMSDEERAPLALPSTQRFRMYQEVNNLRILREGLKEEVLTLKQRDELIAKLERGNQSFKTAIPRVLGVSGAVGFNLADDKRTELKGNTTSAILGKEAHFGAAWFKFDEAKQDAIVMQLVKEENEAKLVRWLQDETDIDEKRAEAIANVGLPEGYGSLCAQALARILPELRRDVVTYDKAVQAAGFDHHSNISSSATGEILMELPYYGEPLQRHVGFGSGKPEDVPEKRYGKIANPTVHIGLNQVRLVVNALIKRYGHPSEVIVEVARELKQSKDQRDEENKRQAANQERNKQMRKDIAGILKISAERVHRADIEKMILWEELNPKDIADRKCPYSGSQISATMLLSDQVEIEHILPFSQTLDDSLNNKTVALRQANRVKGNRTPWDAFGANNTAGFDYADILARAEKMPKGKRYRFAEDGYQRWLKDDAGFLPRALNDTRHMSKVAFEYLKLICPNTRVIPGRMTAMLRAKFGLNDVLGLHGEKNRNDHRHHAVDACVIAVTDQGLLQRFAQASASARERQLNKLVENMPPPWEGTGRKSYREHVQRAIDAIWVSHKPDHSHEGAMHEDTAYSPPFLDNKNMWRTRGIGGSKPNERKHDSDAIVAISSSEDLSRHNRDELGSARPYKGYVGGSNFCIEITMNEKNKWDGDVISTFQAYELVRAQGLESLRNPNIGQNKKNLIMRLQNGDTVKMMDDEQLRLMRVVKIGSNGQVFFAGHREANVSDRNGKKDDEFIFTSKTASSLQKAKARRVTISPIGELRDPGFKE

SEQ ID NO: 9351 - protein, 1307 aa, unidentified
  REGION 1..1307: note = Description of Unknown: Cas Enzyme sequence
MKRILGLDLGTTSIGWAFVNEAEKDNEESSIIKTGVRVVPLSTDEENDFKKGNSITINADRTLKRGARRNKFRYQLRRKALINQLKNIGFIDKNSKLTETGNNSTHELLRLRNQAVTEKVEKDEFARILLSINKKRGYKSSRKANSSEEGELIDAMGITKKLYEQNLTPGEFSYQFLKEGKKAIPDYYRSDLENEFDKVWKNQKTFYPEILNTKLRKELVGKNKNQTWKICENPFDIEGIKLEGNRDEKKLETFRLRKIALTEQIDLERLAIVLQEINNEINKSSGYLSEISDRSKELHFNNLTAGQYLYNQIAKNPHKSLKNQVFYRQDYLIEFQKIWDKQAEFYPALTEKLKDKIQNEIIFYQRRLKSQKGLISYCEFESWEQDVTIDGQVKHKTVGHRVIPKSSPLFQEFKVWQNLNSIRIIHIKTNEVFHIEEDSNTDLFQKLNWTDKLTDKQVLKEFNLKPEDWKINFQQIEGNRTNYNFLAAYKEILKIEGYDNINFSNIEPDELQEILEKCFGEIGIDKQILDFNATLGGNEFSKQKSYELWHLLYSYEDDFSRTGTEALENKLKNNFGFNDEHLPYLINIRFQDDYGNLSARAIRKIMPYLQDGKIYSDACQLAGYNHSNSVTKKQNEKRVLKPKLEILKKNSLRNPVVEKILNQCINVISTIIEDEKMGRPDEIRIELARELKNTKEQRDRMTKAIGRATREHEKYREEIKSKFGLPHVSRNDLIRYKLYKELESNGYRTLYTDEYIKPEDLFSKKYDIEHIIPKSRLFDDSFSNKTLETRESNLDKGDETALDFVERKFGKEGLDNYRNRVEELYKAGKIKGSKHQKLLMSLKDIPADFLNRDLGNSAYIAKKAAEILLDVTKRVSLTSGKITSKLRDDWGLIQIMQELNWDKYDKVGLTYYKENKEGKKLPRIKDWSKRNDHRHHAMDAITVAFTKPGMIQYLNNLNAKTNKEIYKLENTYTYKDDRGKRKFKAPFPKIRKASKKHLSQILISHKAKNKVTTKNKNKINVKGKNTFVYQTVETPRGQLHKETVYGKSKYYETKFEKVGGKFDEKRIELVANRSHKNALLKRLEEFENNPKKAFTGKNSLAKNPVYLNGTQETLPEKVKLAWLESRFTIRKEITPDLKLDKIVDQGVKKILEERLKEFNNKSKEAFSNLDKNPIWLNKDKGIKIKRVKITGVSNAEALHDSKNHLGQEILDHKNSPIPNDYVSTGNNHHVAIYEDEKGNLQEEIVSFYEAVARKKAGLPIINKKHEKGWTFLFTMKQNEMFVFPNEEKGFNPSEIDLLNPNNKALIS

SEQ ID NO: 9352 - protein, 1073 aa, unidentified
  REGION 1..1073: note = Description of Unknown: Cas Enzyme sequence
MTQHKIWRLGADLGTNSLGWAAIELSAPINGEPVSILAAGSRIFSDGRDPKSGASLAVDRRDARAMRRRRDRFQQRQRALIKYLIADGLFPADEAARKAMAAIDPYAARARALDEVLTLPELGRALFHLNQRRGFKSNRKADRGADDDAGKIATGIDRTCDAIRDDEAAAGAEPGSWTYGKWLYERGLAGKLMEEEFDAIWQAQAPHHPTVLTDEVHDRLHEIIFYQRPLKAPRIGMCTLIAGDERLPKAHPLFQRRRLLEELNALMIVRPGEVAQRLTREERDILFLKLKDKGKVSFASLRKTLKLDPDARFNKESENRTDLKGDEVAAAMGAKTRFSNRWAHLSVEEQWDVIARLSEVESEAEDSAFRQWLAELYDLTPQQARAVLNAPLPQGYGRFGEKATRRLIDALRDGEKDGRVIVYSEAVVLADLGHHSDRRTGEIFTDEEGRPQLPYYGVALERHIMPGTGNPSDPEEMRVGRLTNPTVHIGLNQLRRIVNRLIRAYGPPAEIAIELARELKLTDEDKKRINRENNDNRVAAEKRGLKLEELGQRNSGANRALLKLWEELDSDNVLSRPCTYCGQPIGIDTLFSNSVNVDHILPFALTLDDSNGNKIVCHTHCNQAKHRQSPFDAWGHTARWEGIAARAARLPKNKRWRFEPDAMEKFRDESGFQARHLVDTQYLARLSREYLATLYPEKGEGSGHIWVSPGRLTEMVRRKLGLNDLLPDHNFGGGADQAKNRLDHRHHAIDAVVVAIVDRRMLNEIARVSGQEGAEGRERIIIPDPWDGFRDDLRTAVNAITVSHRTDHGTASKAGLPKGQDATAGRLQNDTAYGFTGETDAKGNSIVVRRVPLSSFKKLTDLERVRDPDLKAALYQHLDGLEGKAFEKAIGEFGDREWHAYRNVRRVRVVEPLTVIPIRDRNGRIYKGYKGDSNYRYDVWELPDGKWVNEVVSMFDAHQPGWLSGIRAANPTARKILSLHRDDVLAIERNGGDRELVRVVKFSEKQFAVAPPNEGGALKGRDADKDDPFKYSYPSPNTLKAWHARQVRIDEIGRVLDPGFPPRKARRKTRKPG

SEQ ID NO: 9353 - protein, 991 aa, unidentified
  REGION 1..991: note = Description of Unknown: Cas Enzyme sequence
MTKKVLSIDPGVTSIGWTLTEQNEKGHLTKFIDGGSRIFNSVKEAKSGTFKNEKRRAKRTTRRNKYRSNRRMAKLENYLIKNDFLSNKISSLSDHTGLVQQIIGNPYHLRKKALYEPLTNEELAWAIIHLAKRRGFLSSSKSLTPEEKKEQARADELATLMKKEKCKTLGEYFSNLYDKGEKIRGEKLKRQLIQDELELILNKQMETNSLITYKFVNDINTIIFNQRPLKTQKRISLCKFESFGKIKKHTAAKLHPLSQQFILWGFINNLKYNDNSGGMQELTLEQKNVVFDLLWTNKEVTFKKIIKELKLTPETTFNFQKGEDDKVKGNQLLNYFKAKTKTWFNSLSEQQKIDLIQDLSTINDLTGFALKKRIYNHWTKDEEIIENLLLTSDKLPQGYTSLSLKATKKILPFLKAGNKYYEAEKKAYPNFTINTKKVNKLPPVEGISNTVVLKSCSQVRHLVNAIVDKYGEIDIIKIELARDLSKSKKQISETNILNSKNKSLNDEAISYLHKNNIDVNHDNITKYKLWKESESSDKQHRSCYPEQDSDGNWFFPTINLNDLYGANAIYEIEHIIPKSISGDDSFANKALCKHKTNAQKGNKTPYDYYFQKGGQELIDMIAKTAYSQFGKWKGKKFVTSTEKYLDENDIQKRYLNDTRYLAVFLKEYLQPVCKDKIVVSKGGFTAIIRQSLNLNILLGNEFNKNRGDYRHHMVDAFCTSLISPKVLDIINIMRKQFNKKTEKYKECETKLNDYIKNVKNDFIKHFDNVITSHEVESKLKGELEEETLYGHEKIKLDDGSIITKLFQHKPYEEVISKYNSPEEVLKAHDNLEISLPKGLKKYLENNNKLPDMFQGWKRIKKYYNNIDENNFNINIYRAIHNEKEKVIAYKKTQENAYIIVYNDFKNETISKMNEISNKPKFNNVFCKLYKGDLIQDSENNIYKIYQLLSDKRIALHPVNIQPIKTKRKSVKLIFDKEKMYKIKVNILGHII

SEQ ID NO: 9354 - protein, 1391 aa, unidentified
  REGION 1..1391: note = Description of Unknown: Cas Enzyme sequence
MSKTIIGLDLGTTSIGFAVVKEGENDEQSQILKIGVRVNPLTTDEQTNFEKGKPVSVNKDRTLKRGARRNLQRYKQRRQNLINVLRKAGIIYEDTILAEDGKGSTHTTWALRAKAATEKVGLDEFVRLLLMINKKRGYKSSRKAKNGDEGQLIDGMEVAKRLYTDNITPGQLCYQLLKEGKKSLPDFYRSDLKAEFDHAWDFQSQFYPEVFTAEFKKNIEGKGQRATSAAFWTRYNFNTAENKGTRDEKKLKAYQWRSEAVNKQLKVEEAAYVITEINNNLSSSSGYLGEISDRSKELYFNKQTVGQYLYAQLKNDPHTRMKNQVFYRQDYLNEFETLWETQARYHSQLTPELKAEVCDIVIFYQRRLKSQKGSVSFCEFESKTIETEKDGNKSKKIIGLKVAPKSSPLFQEFKIWQNLSHLEIRNKKSKEARAFDQETKQLLFDELNVKGNVKADAALKLLGLKPAEWELNFTSLEGNRTNQALYEAFLKMMENEGHDDIDAEKLPGTEIKAVVKSFFETQGIDPAILDFNAEAEGKTFEQQPAYLLWHLLYSYEGDNSNTGNDKLYKALQAKFGFSREQASLLANVSLQQDYGSLSAKAIRKIFPYIKESKYSEACQLAGYNHSSYLTAEENEARELKDKLDLLPKGSLRNPVVEKILNQMVNVVNAIMADPSLGKPDEIRIELARELKKNAKEREEMTAQINKATAEHDAIRVKLINEFGIKNPTRNDIIRYKLYDELKFNGYRDLYVNEYISPGELFSNKYDIDHIIPQSRVFDDSFSNKVLVPRKVNLAKGNFTAIDYINNVYHAEEVNEYKTRLDAFLKFYPERKAKYKKLLITGAEIGEGFIERDLRDSQYIAKKAKAMLHGVCRHVVTTTGSITDRLRQDWGLVNIMQELNMEKYRQQGLTEMIERKDGNLKENIKDWTKRNDQRHHAMDALTIAFTKRSYIQYLNHLNARQNEGKYTADVFAIENKDTRVATDDEGKRKRTFKLPVNNFREQAKHHLENILVSYKAKNKVVTKNKNKAKVSKNKEPQTALTPRGQLHKETVYGKIKQPVNTVEKVSGKFDEETISLITKPAYRQALLNRLLENGNDPVKAFTGKNSLVKSPVFINRQKNIIVPEKVQLTRFEDDYTIRKNISPESFKDAKNIEKVIDIGVRDILLKRLKEFNNDAKAAFSDLDKNPIWLNKEQEIAIKRVTISGVKSAEPLHFKKDHYGNEVLENGKPVPVDYISTGNNHHTAIYRDEEGNLQDEVVSLHKVITERVNQGLPVIDKTYNQHLGWKFLFTMKQNEYFVFPSADFDPSEIDLTDPANNKLISPNLFRAQKFSKITYGNSSVRDYVFRHHFETSVEDKKELKDITYKSIKSLPNLENIVKVRINHIGQIIKVGEY

SEQ ID NO: 9355 - protein, 1022 aa, unidentified
  REGION 1..1022: note = Description of Unknown: Cas Enzyme sequence
MKYRLALDLGSTSLGWALVQLDKNAQPCAVIRAGVRIFSDGRNPKDGSSLAVTRRAARAMRRRRDRLLKRKARMQRLLVEYGFFPVNEASRKSLETLNPYQLRAKGLDEALKPEEFARAMFHISQRRGFKSNRKTDKKDSDSGALKAAIRGLRDQLDAAGTDGKARTVGELLWRRMSDASIPCHQRTVRARYRETRVQRENGKLGIEKSYDLYVDRAMIEAEFDALWASQALRNAAVFHEEARLALKDCLLHQRKLRPVKPGRCTLEPGEPRAAMALPSQQRFRILQETNNLRILGGRLLEQPLTLEQRDKLCAALEQGSKSFKSAIPKLLGLPGAVQFNLADAKRPELKGNTTSMLLGKKDFFGPAWHEMSEAHQDEIVTRILEEESEAVLVDWLQQKTGVDPIRAERIANAPLAEGYGSLSAKALARLLPELRLAVVTYDKAVVSAGYEHHSHISHAATSGEILPELPYYGEYLQRHVGFGTGDIRDSPEKRFGRIANPTVHIGLNQVRAVVNALIKRYGHPSEVIVEVARDLKQSQEQRREAQELQARNQRRNERLRSEVAEVLQIAQERVRHADIQKLILWEELSFDVADRRCPYSGVQLSKSMVLSEQVEIEHILPFSRTLDDSLNNKTVALRQANRVKRNRTPWEAREDFGAQGWDFDEILLRAELMPRSKRFRFAADGYEKWLRDDKDFLSRALNDTRHLSRVAREYLSLICPAGTRVIPGQMTAQLRAKFGLNDILGLQGEKNRHDHRHHAVDACVIAVTDQGMLQRFAQASAEARGKGLDKLVETMPDPWPTYRRHVRRAIEAIWVSHKPDHGHEGAMHNDTAYALLGNGKVAVHKIVEGQRRREESSMKVIEMTCARAAGRHGTLPDGAPMPYKGYKGDSNYCIEVVRSPAGKWSGEVISTFDAYRAVRTAGVGVLRGKDLSLRGEPLVARLMANDLVRLDHKGIERTLRIAYINSAGTIALCDHNEANVDKRTRSRELAYVFKTAGSLQASRGRKISVSPIGDLRDPGFRE

SEQ ID NO: 9356 - protein, 1420 aa, unidentified
  REGION 1..1420: note = Description of Unknown: Cas Enzyme sequence
MSNLILGIDLGTNSIGWAIRDTAEIDNQIIKNGVLIFDKGVGEEKGIEFPKVKKRTESRGKRRNYQAEKYRKWELLEFLIKNKMCPLSIEELDQWRKYSKKDKRQYPQTEEFLNWLRFDFNGDGKPDFHLLGGDKHESYYLFRAKAVSELEKDKKVFQNNPEVLGRVFYHLVQRRGFKGRDEEEAKTMLQGSKDGTTKGRDEISEYIENYKSLGAALYHYQKDHSKNYEKVRIRQRYNLRKDYENELKDICRVQELGISDYKKLHKAIIWQRPLRTQKGLIGLCTYEKNKRRAPISHPLYEEYRTWVFINNLKIEAPEGEELEAYLKVKIYPLFLKMGTDFKLKTILDRVKKDGGKVHSNFVDRPDTKVLSAKLLKKLEDVLGENWKKDYQWNDFFLREAQPSKKRDNTYTVEDIWHILFTFDNDEKLVEFASTKLGLSEEASAKFSKIKLQQGYATLSLSAIKKILPYLQKGLLYSKAVYMANLPKVLGTHEVSEDFIDHFAGEIETIYENALTEKKLNNILNGLFRTELVSEGDYHLSPNEDLDDSDHSLIHQKIIETLGEKTWNETDEKTQNQYLDYIKKEYKNFLQKPFHSKKGSFIEQPRIHEQIFNYLQEHYPEQVPDENIKYLWHPSEQEKYPNASTYQEINIKGDSIFIKEAELDRFLHKNPDAEAEGISLELLGDPEPISKGFKNPMALKSLHKLKQLLNFLLQTQQIDVHTRIVVEIARELNNANYRKALEKWQNERERENESFKKRIEEINKECNSHFDVNDKSLIRKIRLWEEQDHKCLYTGEVINMCDVLNGEYYDIEHTIPASISFDSELKNLSLANKDYNNHIKGKKYPSQLDNYDDASTFNGKRIEPILKNIESLFGKRTVYKKKVKKRGGEKEILVEKWAKIADLEKQLDGLKNLSYIDSKDAKDYKIQQRHLLKFRLDYLKQKLQTFTIEEYKASWRNSQLRDTQIMTKYAVPYLRTVFNRVEVQKANVVNDFKEIYNVKLFGEKKDRSKHSHHAVDAAILTLIPKPAQRDQILKKYNLAKDDGLAKTYHEKPTDWKNFKTYYIKKIEEEILINNLKEQRTLTPTFKKVRKRGKIVKKENGKPMWAKGDTIRGQLHGESLYGAIKQAKRNDQNQIIFDDEQKMILEDEIKLVIRKPLTYAKDAASPGFKNLSEIKKVIVDQALFEMIKAQVDKAESFKNALEKSIYMLNKKGERVNKIRHIRCFERLKHSTAVQPHNHDFTSDKEYKQSTYAQNGENVFCLFFKGQIKGREERAMSIIGIFDLAKLDIQDEKDFFKIPHFSSLQKKKTELPLYAVLKSGQKAIFYKENLEELKDLTQKELSDRMYKMYQFEGDSNKIKFKHHLVSGANTEIVKNLPKGYKEASEYGSFEEQPLMRLTAGNWNFAIEEKDFEMSLDGTINFKI

SEQ ID NO: 9357 - protein, 1021 aa, unidentified
  REGION 1..1021: note = Description of Unknown: Cas Enzyme sequence
MLPKMRYRLALDLGTTSIGWCLIRLNSQSEPIAIIRMGVRIFSDGRNPKDGTSLAVTRRSARQMRRRRDRLLKRKSRLLTSLTRLGFFPADESRRKELVQLDPYALRKKGLYEALTGSEFARALFHINQRRGFLSNRKTDKKDNDSGALKKAIRDLRDKLNEEHCQTLGEWLAKRHEARLSVRARLHGKKQKDKAYDFYADRAMIEHEFDVLWAKQASLTPTLFTESARNELKDVLLHQRPLKPVKPGRCTLLPDEERAPLALPSTQRFRIYQELNNLRRLTADLREQALTLDQRNQIAALLEHQGEVRFTAMLKALKLPSKDKFNLEDIKRDRLKGNTTSAILSKEQHFGDLWYAFNHSLQDTIVDQILNEPSESRLIAWLLEHTGVDEQAAESIANANLPEGYGNLSSAALERVLPELIKDVVVYAEAVSRAKFESHSALSSAQQTGEILPALPYYGDPLRRHVAFAKENPVNEEERFGKIANPTVHIGLNQLRKVVNALIKRYGHPSEVIIEVTRDLKLSRERKREIEHDQKLRQDRNERLLAEACAILGLNVTNLDAAKRRELSQKMQLWMELNFKDAADRRCPYTGEQISIERLLSNDVEIEHILPYSMTLDDSMNNKTVAMRRANRDKGNRTPADAFGITPITGYDYQAILERAALMPKEKAKRFAIDGYQRWLREDKDFLARALNDTAYLSRIAKEYVSLICPPNKVRAIPGRMTALLRGKFGLNKFLSGSTVKNRDDHRHHALDAAVIGVTDQGLLQRFSKASARASEMHLDRLVEDMPFPWESYREHVERALTNVVVSYKPDHGYQGAMHEETAWGLREDGQVTRLVRPEDGGPRQREIKNKHVVAISSTRDSGRHGLDERGQPKAYKGYIGGSNYCIEIWMDEEGRWKGDVISTYQAYQIVRQWGEVEGLKKLRGSGFSQSGKPLIMRLMIDDLIRLNIDGSTRTMRIVKMGINGVITLADHNEANINARNSDADNAFKYVSKMAGALQTAKGRRVVVSEIGDLRDPGFSG

SEQ ID NO: 9358 - protein, 1114 aa, unidentified
  REGION 1..1114: note = Description of Unknown: Cas Enzyme sequence
MQSENHSYTLGLDIGIASVGWCVLGENRIIDLGVRAFDKAETAKEGDSLNLVRRSARLMRRRLRRRAWRLTKLARLLKREELIADASLFKKQRTLPGSTWQLRIDGLDRRLDDEEWARVIYHLCKHRGFHWISRAEEKHADADSKGEGGKVKQGLAGTAKLMEEKGYRSAAEMVLAEFPEAQRNKQGEYGKALSRVLLGKELSQLFMRQRELGNLHAGQELETAILGSGDRKSGLFWAQKPPLAGNDLLKMLGKCTFEKDEYRAPKASFTAERHVWLTRLNNLRIVVDGSTRPLNEQERRIALPLPYSQAGDLTYKQLRSALLKAGALSDAFRFASFSYAQQPDRKAKDPETAVLVKLPAWQELRLTLKKAGLETEWQGMAGAAADGRPELMDNVAWVLSVFKDDEEAATELRRLPLPNAEKMIDALLDLRFDRFHALSLKALRRIVPLMETGLRYDEAVATIPDYGHHSQLHKVGEGEYKYLPPLYSGRDKDGRMVFSDDMDVPRNPVVLRALNQARKVVNALIRRHGSPAAMHIELARDLSRPIDERRKVERDQVEYRDRNDKDKAMFAEQFGQLPKGVEFEKWRLYREQQGKCAYSVKPLDLHRLLEPGYVEVDHALPYSRSYDDSKNNKVLVLTNENRDKGNCTPYEYLGGAEESQRWRTFAAFVEGNKAYRLAKRSRLLRKNFGNDEAKEFRERNLNDTRYICKFFKNYVERYLKLAESSESKRCVVLSGQLTSFLRARWGLIKVRADNDRHHALDAAVVAACSHGMVKRLSDYARRKELENVRTGFVDMETGEIVDPAMFQQLRQHFPEPWPHFRAELESRLKVDHRGTLQEEMGRLGTYPPEALEALAPLFVSRAPQRRNSGAAHKDTIYGQPERLKAQGGVTQKVPLSGLALKDLDKLIDPHRNEKLYGAIRARLEAHGGKGDKAFPSVNPLRKPDREGNPTGPIVRTVTMVIDKLSGIPVRGGIAKNDSMLRVDVFTKADKFHVVPVYVHHAVAKELPNRAIVAFKDEDEWTLIDDSFGFCFSLHPNDLLRVHQKGKTPILGYYASCHRGTGNLNIWTHDRNQQTGKDGLFEGIGVKTALALEKFHVDVLGNIYPAPLELRCGMA

SEQ ID NO: 9359 - protein, 1007 aa, unidentified
  REGION 1..1007: note = Description of Unknown: Cas Enzyme sequence
PVNTLRLLSLIFCLNFRSEYSLNYCLDFGVHYMTRRVLQRRAKRKLRMLKFLISLHLLPEDLQNSLAPEVQLNAIGDPYLLRAKALDEALTPYELGRVLLHLVQRRGFLSNRKTLLGDMADDPDVLAVLAELEEAEDNSSERAKEETAFKKDINELRQTIAAANCRTLGEYLATRSHHECQRNRSREGGHLRTDRQMYREELAAIWETQQNFHAVLTDEAREQIEHIIFFQRPLKLRADRIGKCSLEPKRNRATIARLKCQRFRYWQDINNLQYFEHYTDQWLSLNEAQKTKLADVFEHQASISFAGIRKALGFYKTIEFNLERGSKKLKGNITACEIRRVLPAWDNFSDDQQQTLVEDLLTFEKKSALKKRLENHWNFTPEIAVQLCLLEFEPGHSNLSVKAINALLPFLQQGQIFSDARVSAGYGYEQETIIPLAKLPAPPETTNPIVNKGLHELKRLINAIIAEYGKPDAIRIEMARDLEMNTKRYTEHEKQQKANTKANDEAIGKYQEMRQQNPHLQLRNYPGKTDKIKYRLWKDQDQHQHCAYSGKAISLSTLFSAEIEIDHILPYSESLDDSYMNKVVCHAAENRNKGPKTPIDAFGKNDSQWNQITQALKHWDRRLQSKKNRFFMTAADVQKRDFISSQLNDTRYISRVALDYVKQLGVDVSVSKGITIAWVRHQWGLNNLLGEGDEKDRSDHRHHAIDAVVIACVDRRFYTALVGIAKDLERKQSQLNMKDIHIDPLWPNLRDDLQQALSEVIIAHAPQLKLSGELHEVTGAGFIEGIGNVNRKNLDGNFTQVDKIYDAAVKKQVEKHLQRFGNKPKEAFAEVNVVLHKDGKTPIKRVRIRQSETTLKELTKSKFGARDKQGKVFKWLAYGSFHHVEILRNKQTGKCSGEFVTMMEASHRAKGIGKPKQPIIKTDHGDAFEFVMALHRNDIVSIETNGQRVFYRVQKLDAGINRFMLRLHTTSVLDRKNQELHLSINELMFTKWQLQKHKLNILGKIIA

SEQ ID NO: 9360 - protein, 1016 aa, unidentified
  REGION 1..1016: note = Description of Unknown: Cas Enzyme sequence
MASLEFSLDVGHSSIGWAVFQSDPFQPLGAGSVIFGADDCLAKKRRDYRRQRRHIRSTRQRIERMKQLLSHVGFLTREQLDQPGTAWPWLKAAEVLKPEGGVKLSAQELWDVLRWYAHNRGYDGNRAWARDETEAQEDTAREQAARQWMQDHNTQTMAETVCAVLDVGPGKRSDGGDKRSSNLRFKGRGVAFPRSVVTSEVRHILENHQGKLPGLDSRTIRILMDDARHENLAAEAGIRLPHRYEGGLLFGQLIPRFDNRIISSCPVTYEREYARALDEGKSEDEAKHQAVRQAKVPAKKSREFLLFRWAMILANVQVADASGTRPLSVEERQSLHQLMVKSGKLTKREFLKTLDATVGSPRHNGSALLMPPDADKALVLRPEKDALKRLSGRAPHARVVMKQAVKDVFAGRHPMAEGGALFRSEELRALQLRRTVEEKTNNHLLRHRLLILRRLVKDMLATYAGNDPSRISQVTIEVNPDLRSFSGMTAEEKKQEMGQRLGDFKKVVQKLRGDLPEVTAISAGLIRKARIAQDMNWTCPYTGMEYDALDLLHGHVDKDHIIPRSLRPSDSLDSLVLTLRTINEMKGQRTAVQFIKEFEGREVQDGKKRSLEILPWSQFQKLVESLDAKGIHDQDRARKKRRKALLLQEHYTEKEFVPKDLTQTSHLVRLAAEELKKEFGGVQCSTRIVSMPGSVTAETRKAWKLEACLAQANPEVAELRERRKTEPAPVSIKQELRDISHLHHALDACVLACAAHYLEKKGNIWKALVQRRKSEAENLELLSTGLFKRGQDGQARLQDLPAQLKNQISRVLAECRVVQHIPSNRRGLKAEETVWRVLDSEDHHPSAEKLRKWAQLAQVELPNPDSGKVLLVKRIRHTAAGAKAPKNLLHQGSEFWWAYEVVALSKLVGPGASGKLRKIKGAKQIGDNFAVTLGPKMEVIPHHQVQERWKGLGCPRYLRNGQIIEMPTGKYSGAWKVFSIKNARQGILLDIARADSPRAKQGNPGTRINVLLKTLV

SEQ ID NO: 9361 - protein, 1045 aa, unidentified
  REGION 1..1045: note = Description of Unknown: Cas Enzyme sequence
MSSGYVMGIDIGVASIGWSVVEPGSEERPGRIVRLGTHLFEPGVDGTQTAIEQGKDEPKGAARRGARQVRRQLWRRAHRKRKLLFALMKHGIMPHATVPDGAAIDAYIKALDSRLRAAWCRAGDHQAHQIMPYLIRSAGVQRKITLEEFGRALYHLAQRRGFLSNRKAKKKKDEDTSQVKAEINELQSLIDRHVPATLGAYLASLNPDEQRLRDWWTARSMYLHEFEALWTEQSRHHRELTDEAKAAIHRAIFHQRPLKSQAHLIGRCSLEPGRKRAPLAHREFQYYRVLQGVNHLTIAPPGEAARKLDAAQRKVLTDALLAQGDLTIAKVRTLLKLPKGTDIAGERGEEEKKIVGHRTDAKLRDAIGPRFDAMSDRERDQLVLDLRSFRETEPLIGRLKSHWGLSDEQARKVADADLEEGYASYSLAAIRRLIPHLERGLSVSEARKAEYPESFRATQVHDLLPPVTDVMGDLRNPSVMRALTEARKVVNAIIRRYGKPEKIHVELARDLKHGRDRRAAITKQIRQREKQHADAKHRILAEIKGYEPTRIDREKVLLADECDWRCPYTGKKFGMKELIGEHPQVDVEHIWPFSRSFDNSFMNKTLCWHDENRRVKRGRTPYEAYSASPERYQEILGRVLAFKSDRRTVSEKFRRFTAEAIDEDFTNRHLSDTRYIARAVSEYLGVLYGGRTDADGKQRIVACSGGLTSWLRREWGLDALLSPTGDDAEAEKNRIDHRHHAVDALVVALTTPRTQAMLQAAAARQEQEGRFRLFGRIEPLWSAFPREAKAAVEAIVVSHRQQRAVSGKLHAESNYSKPIHGGHRIRKELHKLTRNEVSRIVDPRCRALVEAQLEKLGVDDPAKAFSLRENCPVIKGRDGVERRLRRVRLFSTASPTIVGQNARIRYVEPDSNHHCIVWAKRTKEGEEGPWEFEPVRLLDAYDRVCRGLPVVNRDGGSDRIFKFSVSINEFIEMDDPDSGGRQLYRIKKTSLREIGVQLHHDARTVDEVRKAGDLNKYRISPSALKSRNARKVFVNHLGEVSGAGG

SEQ ID NO: 9362 - protein, 1063 aa, unidentified
  REGION 1..1063: note = Description of Unknown: Cas Enzyme sequence
MDVKRVLGLDLGEGSVGWALLEIGEDGWPVAIQAGARIFSPVINPKNKTPLNRERRAKRGARRNRERRRRRLAKLHNTLVGAGLLPADPKERMRVLGGAEASADARWLDPYALRAKALDEPLEPFELGRVLAHLAQRRGFLSNKKTRLVELMEADGNRNILAEEENVQEEQDEAATAEERKETSETLQAISDLQAAIAANGCRTLGEYLHGAKESGEKVRCRRTSRSMYVEELDAIWSAQRPFHEGALTNELYDAVYKAVFHQRPLRGARSKQPRKQWPRGEEARKMYRRLRGNCPHYPDRPVARQGHWVSQRFRILQDLRNLELLDNSTGEVRRLTDEEVATIAQKAQEREKMTWAGVRKEIGYGGSKGKFVNFEGREGAKKELKGNSTERFLKQVLGDKWDSSLVLDPDVERRQLDLMHDIETAPNKLTLVKNLQKPKPSNPIYPLSREQAIAIAGKNFGDRTVAFSVRAMRRMYKLMLSEGRDYFAARKEAFAHGEESDAQVVRETLDVPPDVPNPRIQRALFETRKVVNAIIEQFGKPDEIIVELAREMRESEADRKKRLKAIKRNEGENDAAREFYKRHGIEHPNREQIRRYKLWKEQNETCPYTGRSISVAELLSEATEVDHLLPLPLSADDSFSNLVLTHRDTNRDKDNRLLCEWLNEEQYAEAIRRIEASGNRARAKRARMKEIPEGFAEGQIVTTAYLSRLAGEYLKTLGVPVQVTNGRATSILRRWMGLNGLLPLRETKKKLPESEKNRLDHRHHAVDAVVVALTDRSRYIQALRDFRKIASLDEAERAPEALRHMVQGVVDSMIASHDVDKGIRGALHEETYFGRVEYKGEEHYVKRAFIRDLVSKGSLEDTLKQVQKIVDDDLRQRVEKHFRAFGNRVADAIAEDGTITVEDGAGNDMRIESVRIRERRTTKLHDFKDGRYAVYGNNHHIEIVRRKDGTLGARAVTMLEAARYARPPNRRSPYGLTVRDGEELVMCLAENEMVRLADGRVYRVAGTSSTSGFEITLRDPNDARTGSEKGRDRITSPRRLTEIQGVVRVSVLGHIQDGTPDR

SEQ ID NO: 9363 - protein, 1113 aa, unidentified
  REGION 1..1113: note = Description of Unknown: Cas Enzyme sequence
MFQVGLDLGTNSIGWAVVAYSDKEGHVAAGSYVFPEAGEEDGGKFISHRRKRGEKRRQRKQLRRKRQRRNAVMRLLVGAQLLPKDTNERVQALTSTCPYRARSGALDRRLDPHELGCAIYHLAKRRGYLSTAALKLIGVPGVEELDAKLAAKAMEGLDTDEGERSEDDRKAIEEIKGVLDNIAQTRRRLAQGEARTLGELLYKEIERKRPVRAITGKRITQPVENALSSALGERWSGMNAAARGKAIKQLTRVADLSRKAQRTEKDELKLQELIASLASETGLAKDRIGAVAARVRPPVLGIRADRKLYQDEFDRIIAAQRHHHPKVLTDDFCESLREALFFQRPLKPTSNLVGYCSILPTRKRCHNATMLAQHSIILQRINTLRIIERADDALRERRLTPSEINLLVDALDRHDKLTWEEAADIIKLKDGEQWFDESPPADDPAARKGRKGKKGRDGLAGNKTCTAMRRALGDAWDQLSNKRKEELIHRILTARHFRDIVPGLQRDYGFSDEQIYRIATANLPEGHNKHCAKVLRKIEPHLRKGHVYSEALELAKLREAHQSTEQLPDPDSAPEYASTTVQIANPVVQRAVKNALIVLNSIIKKHGKPEVVRVELPRDVSRTNKQRELVMKAQERKKRLNEEAAKLLQDAGLPTTGRNVLKVRLWQEAGCCSPYDPDNKLTIRQVVEECDIDHIIPRSRSLDDSYMNLTICPNQLNLVKGDKTPHEAFGADDERWSKIRNHLNALKTMPRRKKTLITCTDPETDSFVGRDFSDTSYIAREVKKAIQQLGIKVEVTRGALTAELRKLWGLEEILPLSEEEKQRIQDANAKGRFKNRDDHRHHALDAVVTALMDISTHQRLTRYYKRKETERTKGITLPEPWPGFKENVRRVIDGAPVVFQPTRGVEGALHEETARTPPTREEVERAIQQLPEHRRNRIDRAVVVGSQLVYLNDDREPRAAYDLGSNHHCIIWQRKLRDKKGRLRREMEVVTMIEAATRACCKEPVFSAEHSGRGAEWEPFLFLCKNDIVEYDDPNEGRRLMRVAKFSSWQVQGKRKTTERAELVLRPIRDAREIKDHNVRVSGQDALARILRRVILSPLGDVVGSEPPDAQHQ

SEQ ID NO: 9364 - protein, 1184 aa, unidentified
  REGION 1..1184: note = Description of Unknown: Cas Enzyme sequence
MKKILGLDLGVASIGWALINTENDIPTEILGIGSRIVPLSTNDANEFSTGNAISKNQNRTITRTQRKGYDRYQLRRKNLTDFLRKFNMTPTEELIKLDVLGLWGLRAKAANKDEKISLIELGRVLYHLNQKRGYKSAKSDDAEDKKQKDYVADVNNRYKIIKELKQTIGQYFHSQLKRDVHYRTKEQVFPRAAYLDEFEIIWNTQARYYPEILTEENKAIVRDEIIYYQRSLKSCKHLVSLCEFEMKAYKNKEGKTVYDGPKVAPRSSPLFQVCKNWESLNNLKLKNRKGLEFDFTLEHKKALFNHLDNNDKLTTNDLYKILGINKSEGWWGGKAIGKGLQGNTTKNQISKVLGNNIEYQKNLVFNLKTVDTKLVDTETGEIIQQISPDFEKEPLYRLWHSIYSIHDQRELANVLQLNFGITDTQVVNDLCKIDFVKSGFGNKSAKAIRRILPYLQDGLMYSEACLAAGFRHSESLTVAENEARELLLKLPQIKKNDLKQPVVEKILNQMVNLVNAVIDQYGTIDEIRVELARKLKQSKDERNATDKNMRLREKINDTYAKRIFQEYGLTASRTRIQKFRMWEEAKQKCFYCGQTVNVSEFLKGFDVEVEHIIPKSLFFDDSFSNKVCACRKCNSDKKNQTAFDYMKSKGEHEFEGYLFRIEEFYKNGDISKTKKERLLTPKEKIPTDFIYRQLRETQYIARKAKSILSQIARNVWASSGSVTDFVRHTWGWDKILNDLQVDKYRLYGQTELVEFVHKNQKHVEERIIGWSKRLDHRHHAIDALTVACTRQSFIQRLNNLNTERDAIWQELKHQNEGHKEKFSLLEKWLDEQPHFSKEYVQKKVAGILVSFKAGKKAASTGKRIKYIKGKKIVLQDGITVPRGALHEESVYGKIKILEEGKTLKFLFEHPNLIFKPNIKELVEKRIEEFEGDTKKAIASLVKNPILLKNGDTLEYATCFKEEYIIKYPLQSIKAKDVDSIVDKHLREIVKVRLINFNNNEKEAFKDLKNYPLWLDDNKTIQVKTLRCFTGLTAVEPIKRNENGEAVGFVKPGNNHHIAIYTNKLGKKQEHAVTFWSAVERKKYGLPIVITNPIEVWDNILDKEFPENFLNCLPSPDLTFDVSLQQNEMFILGMPEEEYQISIENKDFSLLSEYLYRVQSISGGDYWFRMHLDTMNDKTSKGVFK

SEQ ID NO: 9365 - protein, 1028 aa, unidentified
  REGION 1..1028: note = Description of Unknown: Cas Enzyme sequence
MQMRLPGNVQSDFINGLVFGFDVGTGSIGYAVRRGKEFLDVGVIICPEETSDLKARRGLRRQRRTLRSKKYRREWLRQELAKLGLPAPKTNLNDPVTLRIKAVNGDKLLPEELHAAIAHLWRRRGYLAHVPWSSHDEGDDRKKEVGEIKESISKLREEMTTDGCELPCHFLAKHPDCQRRRVWPRDLLKAEFDAIAKHHPKLADKADWLLYGDTREYEDNRGQLHHVFYKSTEGRNPGVLGLRWPRFDNRGPALDAWQPMDEAGRPLHVVRKNKDAFKKAQWELALMNFRVLDAHTRQNRDPRTDFPEFVAVLRKEWEKKAAKHETFKLKLEQLAKPYADKFLLIPDQKPLTPDCGAGRAKYSSDTLDSLREAINAGERVDPPQPVLQRRGESPDRALDRYLADIKHPLVRHRLVLLRRLLNQLIKDHGAPDLIVVEAVRSLAMNKRGEKYKKLMRDNEQFRKEREEAREFLHGEGHSTSSTSILRYRLWKEAQPLCPFCREAMTQEQLLRGEVDIEHLVPRARIDCNEIYNLTVGHIHCNRNVKSEQTPYEAFSHDPEKWAALKRNAEKCFHGKKLEIFLSPNAEELIEQKSELVQTSYIAKVLRHLCLIRLGWIDDDGRDPTTNVATPSQRFQVTNGQLTSRLRQSWGLNHALYPEPAEGDEAAWNQYAEKNRGDLRHHALDAMVISCTLPWLAHRTHGAKDEFGNFGWWTQDEKRRSKAANPIGLDYQKAKAEIERVVVHHHVTKASHRKFFDTTLYGKRGDDLYIARKPLSKMKSKQLHKVYPKTLAAYVTAAWTLFERENPDIETLIKDENRGKEVQDKVSLPVKFTSRLCFSHYQRWANKHTLANLLEFAWPSEVKMPIKSVSVVADDGDSAMFETRKGSQSFVSQTEFKEMRVFVHPNGKKYFAEYVRPWARDSHDVHERAPEGAKFVCRLSKGDSFLIKKALTSKKIDIDTRWILKKTFSTGRVSILPAHLSHNKEVLESLGFDSINFVRISLNDLMFALGYELPHPPSAQSESAGAAEA

SEQ ID NO: 9366 - protein, 1118 aa, unidentified
  REGION 1..1118: note = Description of Unknown: Cas Enzyme sequence
ALSNPLYQEFRLWHFIRHIKIYKKNVEIDGQVFPEFDVTSAFLRSEDNWAALFEWINEKNEINQDTFFQYPSFGIVNAQGQYRWNYTASKNYPSNQTHAQIVSHLQKVKNIPDGFLSGEIEQALWQVLYSIDDKIELGKALRRFSIRHNLDESFIDLFEQISPFKKGYGTVSFKALKKLLPLMRRGKYWHEEDIPDEVKNRIQQHTEQLNTAEIDIERDSQTNGITKHGNVLGSILYSENLFSALDIDQACFIIYGKFLQEDKVTKWIQPSDIDLFIKSTFKQHSLHNPIVEQLILEMLRVVRDTWLYYGMGKVDFFDEIHVELGKYMQYPASHRRSMTKKQAVEDSTNLRVKALLESLLEDPTAKNVKPYSFSQHEILTIYENDVLNSGVEIPEDIKAISQSAHPSIANLHKYRKWLDYKYRSPFTGDFIPLCELFTGDFIVTHILPRSHYFDNSINNKVICESVIKKDQGECTLFEYLEKNEGKIISISDRKTIKLFTISDYQEFVRSHYSLNRGKAKRLLMSEISDRFIANQQRDGMYISKLVRSLLAGLVKDNNDKNNFQGYLSTGNGKIVKTLKHEWGLDNVWNEAISPRFERLNKLTNSNQFGDWIFKDGRKMFVSKIPFELNKVLKKNSIDHRFFELNALVIACATNYHLEYFKNTDANSLKRAYQRAILCYQNLPDNNGNDVWTFHKPWHFINKETIEAIQTSIVSFKQNLRVINKTINWYQKWEKDEDGLIRKVFLKQDNGDHWAARNPLHLDTIYGKVTLRLKKEIPLSKAINNLNGIVNPALRNQLQTLIDDGMDKHEILAYFKTPNGIFDGEDISKVEVFYYDGEQTATRVEVDESFTSHVIKSVTDTGIQRILQNHLARYNEPSGNLFKEHPEIAFSDQGLNELNKNIRTVNNGKEHKPINKVRCYETIGKKFSIGVRLNTKRKYAKSAKGTHLFFAIYISDMGLRTFNTIPLNIAIEREKHGLPAVPDSNEYGHVLLFSLSPNDLVYVPTIEEATHPSRVDINGLTAEQCLRIYRFISSSGIVPNFVPHTKTDFGYSISKDEEKDFKERNGLSYNGCLQNFLIAENTNSKNERTTDGVMIKKVCWKLKTDRIGRITKVIGNQIR

SEQ ID NO: 9367 - protein, 1061 aa, unidentified
  REGION 1..1061: note = Description of Unknown: Cas Enzyme sequence
MSRIFGFDIGTASIGSAVIDYDPARGAGDILWLAVRIFPEARDPDGTPLNQTRRTKRLIRRQFRRRRQRRRALNEALFDASLLPAYGSTEWQAVMKMEPLALRSRGLSERLEPHELGRALYHLAKRRHFKERELAEVEREDAAEETKIRRIANSFTAEARASGLTIGQLLFSETSPDDKNLRRKMLAEGGSHKRARGIHFHRSDVADEFDRLVTAQAAFYRVLRDSDLRAHIENVVFAQRPVFWRRNALGRCRLVPDAPLCPKGSWLSQRRRMLEKLNNLTLVGDNARPLDREERDAILARLQAQASMSWQGVRAVLRPIFKVQGELGRERSIRFNLEEGGDPKLLGNAIEAKLAEIFRSKWANHPDRQLIRDAIYERLWAADNGQIGEQRVVIRTECERNERRLEAVQSFMADFGVTADEAAALSNLTLPTGWEPFSIVAIQKFLPYLESGLRFGALLNGPDWEGWRNRTFPNRERPTGESLDRLPSPTCWDEQRRIAASRNPTVIRALNELRKVVNNLISLYGKPDLIRVELARAVGKSTREREDMRLGMRRRERDRAKAEADLRLKRITQPRDADIEKWLLWKECGELDPYSGKPISFDALFGTSDFEVEHIWPRWISIDNSFANKTLCLRSLNLIKGNRTPFEAFGSGPQWKQMKTRVWGLVRDGKMKAGKAKRFCREQPLGDDFKSHQLNDTGYAARQAVTFLKRLWPALGVAAPVTVQAVTGRVTAELRRLWGLNNILSDNGEKTRADHRHHAIDALVVACAHPGMTQKLSNCWQAENDPTASSPRLDPPWKTIRADAEQAVKEIVVSHRTRRKISGPLHQEMLLGYARRNIIKNGIEYGVFAKRVPVKNLPLATLKAERLEDLSRTAPFLVSDDHIRRVLLAHVESANVQPAKAYPPYPRLIPDGPEIRKARVLTLRQKGLMVRVSTGFADPAHNHHIAMFRLPDGKIVFDPPVTLFEAAWRLSRHEPIVKRTRDDGATFVMSLSAGDALEFPAGKKAGVWIVGGVWSNGQILLERASDAIHASTTRPTPGALLREGARKISVNPIGLIRPAND

SEQ ID NO: 9368 - protein, 1409 aa, unidentified
  REGION 1..1409: note = Description of Unknown: Cas Enzyme sequence
MKKILGLDLGTNSIGWALIDKDAEKILGLGSRIIPMGTDKLDYEKGAGITKNADRRTARTIRKMNKRYKLRRNKLLFILNVLELCPSQFEFRHKVRDDNGRLGLQYNSGFPSAKNLQDLELLPIRKNTFQLNSLEHYQLRVKALTNEISKQELGKILYQFNQLRGYSGGSNNDDTKKVKEASNEDENEKKRNYEVITQKVKILSLEKSDITFKVKGGKNKGQELPLFDITFLLNDEEKEGTTMLQNLEIDKEEELEIRIKQTKKGENIIVALPQKTNWKKQMEATEEKLKSDNLLIGQLLLNDLLDKRWTKIRNRVILRSRYQEEFDAIWEEQSKHHAILNNCPKDKLEIICNYLYPGESESQKILKQSALEGGLKYIIKEQVIYYQRPLKSQTELISKCQFEKEETVIPTSHPMFEEFRCWKQINQLFIRSKNGVYNEKKQKTIYKYVDRYLTGEQKNQLYLKLQNQKQVGFSDVAKIVELKNDNTEFLNGLNVKAKLRGCDTSITIKKILGDRFNDVLDKEENIIIKIWESLYNPDNSGSEYDINSKKVSSLINILKVCLNENEATNYALKLAQNISYPRKYGSLSRKAINNILPLMKLKPLEINDTTKQNFEKIKHAIETGELMEGIEPYMVDYINSNPKILEDGGMMDSFAVSLVYGKHTINNIKPTINDYHDIKYQERSLRNPVVEQITNEALQIIKAIWKEFRFKNDELEIRIELARDLKNSAAEREKIYKGQLNNQKQNSRIKERLEEERIPITDENILKYKLYEQQKYKSPYSGDTLELNLFDEYEIDHIIPKSRLFDDSISNKVLVEGTLNKEKSNRTAWEYISQQNTKYKLFSIPLYIESVNENYYGKKKKNLLLEKIPTDFVERQIKETQYIALAVKTELAKIVGSDNVKSSTGEITSFLRSRWGLKKLFMELTESRFKQMELWDSSNKWVNKYYDNDKQRNIYEIKNWSKRYDHRHHSIDALVVALTEQSHIQRLNNLNKELQNWLLDHKDEIQLTVKEDETILEAFFNLQEEEREKIQKQIEGFRKFDSPFNNLIGQAKSHLEAMVVSHKPKDNLTIQFNKKTNKKELKIRSALHEATLYGKHNGQDTKTISISNLSVKDIDKVVDPIIKKEINSHRNRNEYSSMKEAFTGEGLKAFNESRFQIRKSESLKPPIYKVKIYYNTKEVKESSLQRLYDNNEKLSVKTGDNYLFLVMEKQGKNKLEKERVFDIVSLYDATSIANNEWKNQTEDFKKKIFDDYLVLNKAEKVLFSLQQNELVYLPENVDDPVLNMSSVEFNTWISDTINKIRFTKRIYKVVKFTGNDCYFIPHNYANTISVAKDLNEEQKKSLKDKYGDKDIPKKEMNFVEYGSYRDSAPVEVNENFVKGLIDKSHKIKPLKIQEHCIKIKTDWLGNIRL

SEQ ID NO: 9369 - protein, 1446 aa, unidentified
  REGION 1..1446: note = Description of Unknown: Cas Enzyme sequence
DLLPKHYSDAIDFDKRLGQFKPEREEKLSFYKNEAGKNQFIFMESHQEMLREFKLTNPKLKQVPYDWTIYYLRKKALTEKISKEELAWILLNFNQKRGYYQLRGEEQEENKNKLEEFHTLKVVNVVEREKGKSGIWYNVILENGWIYKRESKIALFDWVGKQKEFIVTTELNDDGTIKLNKDNEEKRSFRSPKEDDWGLVKIRTEQTINQSEKSVGSFIYDTLLKNPNQKIKGELVRTIERKFYREELSKILKTQLEFHSTILKDKNLYKKCIDELYKHNDAHKSNIKDRDFEYLFLDDIIFYQRPLKSKTSLISDCSLEFRPIKDKKGVLVKDVNGNQILKPLKCIAKSNPIFQEFRLLQFVKNLKIFKKGIVDDIDVTDDYLKSEEDIVELFNWLNDKAEVSQKQFLAYPKFKLKEDKYRWNFVEDKIYPCNETRNQFLNAVAKIDIDKSFFDSKNTQDLWHILYSVTDKIEITKAITTFAKRHNLSEEFITNFSKLKPYKKDYGSYSEKAIKKLLPLMRFGGNWNENNIDSKTLVRIDKLQTGEFDENIRTRVREKAINLNTLSDFKSLPLWLASYIIYDKHSEASDISKWKTPADIEHFLKHDFKQHSLRNPIVEQVITETLRVVKDIWQHYGEGKENFFDEIHIELGREMKNNATDRKRITDTINQNENTNLRIKAILTELKNEGINDVRPYSPSQQEILKIYEEGVYSSENNKEKLEDVDKFRKNSKPTPNEINKYKLWLEQGYISPYTGKLIPLSDLFTTKYQIEHIIPQSRLFDDSLTNKVICESEVNELKSNMTALEFIQKNEDRIVTLTGGKTIKIFTVDAYNQHITSYYGKNKSKQKRLLSEDIPEKFIERQLNDTKYISKIVKNLLSKIVREDDEQEVTSKHVVSLNGSITSKMKQDWGLNDVWNKIVTPRFERLNAITNSSDFGKLELKKDEFGNSGKQVFQTTVPDAIAKGFSKKRIDHRHHALDALVIACVNRTHINYLNNLNAKDDDDKSIKHELRNKLCFKTKPDANGNYKWEFHKPWENFTKNAEDDLNQTIISFKQNTRVINKTVNKYQVWKEEDGAFKKITTKQVKGDNWAIRKPLHAETVSGKVFLKRIRQSHITISNALEQVELIVDKEVKKQLKAKIKLYPNNADGLKKNLKSFPIMIDGKAIDKVQIYEMIEATATRERNNLDITFDEKKIEKITDTGIQKILLNHLKQEIYQNVIDESGKKIPPHEIAFSEIGIEELNKNIKTLNNGKNHQPIKKVRIFEESKRFSLGQIGRKTDKYVETAKGTNLFYAIYTDEKGKRNYKTIPLNEVIERQKQGLSSALEIDENGNNLLFTLSPNDLVYIPNEDEKENLTLLNFNKLSKEQTERIYKFVSCTGGEGHFVSNSYSKEIISNENGSNNKNERMLELNNSNTIYDEKEKPVMIKSICWKLEIDRLGKIIKIIR

SEQ ID NO: 9370 - protein, 1028 aa, unidentified
  REGION 1..1028: note = Description of Unknown: Cas Enzyme sequence
MAKILGLDLGVSSVGWALIEQDEESYNGKIEASGVRIFQGNEKRADAAPGESSNADRRTKRSVRRQRDRRSRRKINLYVTLKKNGLAPSKNEWDEWVSINPYSIRAKALDEKVTLHEIGRALYHLNQRRGYKSNRKAGSDKEGAVKEGISKVREQMAKYSARTVGEYFYKIYDNHLQDDVDHNDFDWRIRDKYTHRKMFKEEFDIIWETQCKFHDELTEGLGKELKEIIFHQRKMKSQSHLIGNCELETDKKRIAKAHLLFQEFRVLKNINNLSISDENGFQIKLTDEDRASLKKIFDKKDKVSWSQLKTVLIKNGTITNKNAVFNLERGGRKNIEGNRTNAALLHKKAFGDDWYELDEDFKNHVVDVLIHVGKPEVVHDLALNKWNRTEEQAEYLTHKVSLEKGYGGYSEKAIKKLLPFLEKGMEESTAIKEAGYSLFEQNPGKMKQLPMPDQTIKNPVVYHALVELRKVVNGVIRRFGMPDTIRVELARDLKVGYERRQKMTKNMRKLEKRNELARAALQKAPFNVKNPSYEDIIWYNLWQECEQTCPYTGKSIPAEAFNSGEFQVEHIIPFSRSLNNSFANKTLCEADFNRNKGNRTPWECVQAGLIQEDILLQRIRNLPWNKRNKFTQKEIDVDKFLNRQLNDTRYISREASSFLKHLSCQSVEVVKGQTTSLLRHLWGLNSVLNKEDDEMKNRDDHRHHAVDAIVVAFTNRSTLKRLSDENKMISTPSWMDSEESGKKAAQEMKRRVGQRIDNTPPWPYFRKEVERSINNIVVSHRVNRKVSGALHEETYYGPTDEHAPKNKEMMVLRKPVHQLSKKDLELIRDDTVRSIVNKKVKEIMDEQGVTQASAIAALESDPPYIVSPKSQTPIKKVRLLMKKDPQIMHFFENKNGKEYRAALYGNNHHIAIYETTDKNGEKKQIGQVVPMMEAARRVKDGEPVVMQDYRPDHSFMFSLAINDMIINHEDEEIYRVQKIDSSSRINFRHQHVALKGQSDPGVLRKMPGTLNATKIKVSPIGEIFPAND

SEQ ID NO: 9371 - protein, 1476 aa, unidentified
  REGION 1..1476: note = Description of Unknown: Cas Enzyme sequence
MKTILGLDLGTNSIGWALIKQDEKKNEGEIIKLGSRIIPMSEDILGKFDSGITESDTAKRTSFRGIRRLRERNLLRRERLHRVLNILDFLPEHYANEIDFEQRFGKYKKETEPKIAYSFNEDVKRFEFSFKNSFNEMVEDFKIHQPQLLEGGKKIPYDWTIYYLRNKSLTQKIEKEELAWLLLNFNQKRGYYQLRGEEEDETPNKLVEFHSLSVTDVIDSGDKKGKDEVWYNVVLENGWIYRRTSKTPLDWTGKRKDFIVTTDLNEDGTIKKDKDGKEKRTFRAPSEGDWTLLKKQTEFEIDRSGKTVGTFIYDTLLQNPTQKINGELVRVIERKFYKEELKQILQTQQKHHPELRDKRLYEECITELYENNDAHRSSISSKDFVHLFLEDIIFYQRPLKSKKSLISDCKYESRIYLKACEKITEPIKCIAKSHPLFQEFRLWQWMQNLRIYEKANDKEVTNQFLNTEEDWVNLFEWLNDRKEVDHKALLSYLLKPSKLKVSNYRWNYVYDAVKDESKYYPCNETRSMILSRLAKVQNVPTNFLTKEKEEALWHILYSVNDKIDVVKALNSFATKNGLAEDFVEQFKKFPPFKSDYGAYSAKAIKKLLPLMRMGKYWNEEAIHSQTKERISKIMSGEYDETIKDRVRDKAINLTQMEHFRGLPLWLTSYIAYDRHSEGGDIQKWKTAKELAAYLKEFKQHSLRNPIVEQVITETLRVVKDIWNTYGEGKENFFDEIHIELGREMKNPADKRKEMTLKITDNENSNLRIKALLAELQNDSQIENVRPYSPSQQELLRIYEDGVLNSGLEIDDDILKISRSAQPSKSDLIRYKLWLDQKYRSPYTGKIIPLNKLFTPAYEIEHIIPQSRFFDDSFSNKVICESEVNKLKDNMLALEFIKSKYGTTVILSHARTVQILLVEDYEKRVKEDFAKSHGKMKKLLLEDIPEKMVERQMNDTRYITKVVKNLLSNIVREEKNDEGTTSNNVLSGNGQITSALKQDWGLNDVWNEIIAPRFERLNKLTNSKDFGNVNERTNKFLPTVPLILSKGFTKKRIDHRHHAMDALVIACATRSHINYLNNQNALEKGKSKEQKQQKREDLRSILCHKKYNEGSNSNYKWVFNKPWDKFTQDTRNELQTTVVSFKQNLRVINKTVNKYEKWETKDGIKEKVIATQKNKGESWAIRKPIHKDTVSGLVRLRFKKTVMLSVALENWEDIVDNELRKYIKELVGVKYDKKMLQKHFKDRKNVWKEKDVSRVEIFYWDKENVASRVKLDESFNATKIESITDTGIQNILKNHLQSDKYQNAKDANGKLIAPETLAFSADGIDEMNKNTTALNGGKQHQPIYKVRTYEPKGNKFSIGQTGNKKDKYVEAAKGTNLFFAIYKDEKGKRNYATVPFNEVMESQKQSVGTDKIVSVPERNENGDSLLFHLSPNDLVFVPTDAEILNKSLVDLNNLSREQVNRVYKMVSSTEGEYHFVQ

SEQ ID NO: 9372 - protein, 1020 aa, unidentified
  REGION 1..1020: note = Description of Unknown: Cas Enzyme sequence
MSRANSYILGIDLGVNSLGAALIDKSNREIVWTGVRIFTPGFEGDYASGNEESRARQRRLARQQRRQTDRRRRRLLNVFRILQQYGLLPCGDREKILPAIDAELALKYPETEVLPYYLRARSLDHKLTLYEIGRALYHLAQRRGFRGRAALDQSENSSEFKKSIEGLWKEIHASGSRTLGEYFSKLNPHETRIRGQRTHRRMYEEEFAAIWTAQQQHYPDVLTDARRQVLERAIFYQRPLKPSDDLVGDCELEPGEKRAPLWTIEAQRFRVLNAINNLMVVQKGVAPRKLEDHERQTLIEATRTKEKISFPQVRKLLSLPASSRFSIEEDGDTNLPGDIVSSRMFAALGSSWLEMPEERQRELVADLGDARRNETDEDLFRCLTEKWGYSPDVAQRLCEVALPSGYSRLSSKAICKALPFMEQGMTFGEARRKLWPEQFEEKEPLDYLPPVLEAPGLKDIRNPAVIRALSELRKTVNAVIRRFGKPASIHIELARDMKRSREERRKEARRNQQRRKLREEAREALRPYLGDNVPSRQIEKYLLWLECGRHCPYSGQPISLEALFGDHPRFDVEHIIPFDRCLDDSFQNKTLCEAGFNRLKGNRTPWEAFGHTEEWPLMVERVRAFRNVAKLRRFIMTETDAEKLLGEFVSRQLCDTRYASRLAAKYLGLLFGIDRPDNNRIIVCAGAVTAFLRQKWDLNRILNEKPEKNRDDYRHHAVDAIAVALATQAQIQQLADAARRARAEGHRRFGSLPDPWPGFREQARNAVLRCVVSHRPKRRLKGALHNETYYSAPEQREGKMVVRCRKPVTSLTKTDIEAIVDERIREIVRAAWEAVGSDAKKFEGNWPFIESNGRKIPIKRVRCFQVETVRSIAEDRPERRRHVIPGGNHHIEIWAETDPKSGLPKRWHFRAVSRLEAMERYRRRHEGVRIVQRDHGPNTQFCFSLSEGDMVAVRRAPDQPETLWCVRSARTRGSFELQPATDARLKKDAEIWDVALNTLMKLGCRKVVVTPLGDIVDAHD

SEQ ID NO: 9373 - protein, 1065 aa, unidentified
  REGION 1..1065: note = Description of Unknown: Cas Enzyme sequence
MSELNHYSPYLLGLDLGSNSIGWALIKLDNDDNPCGIERVGVRVFEAGMEGQYESGKEESRNKKRRDARLVRRQIERRARRYRKLANVLQQIKLLPEGNMNDSLERKNIIDNLDKELRKMYIKEDLPEYEKNRLNQIFLYYLRSLAVEQKLEPYALGRVLYHLGQRRGFLSNRRGQKKDDEEKGKVKEGIAEIRKEMACLGTRTLGEYFAKIDPIAQQKRIRGRWTARDMYEQEFYAIWDYQAQFYPDILNDENKKSVFKAIFYQRPLKSQKEKIGFCQFECIARGAQRNRRRAPWVILKAQRFRLLQRVNDLEIKEDKLNKRPLTVEERRLLIDYLEKNGDATFAQLRKILGLPKTVKFNLEEGGEKKIPGNRTASAIREVIGERWDNMSTEERDKLVEDIYSIVNNKALEKRLIKHWKFSEDEALQISEIKIEDSYCNLSRQAIDKFLPGLEEGRRYGELVKEIYGMDNVRDEFKVDLLPPLEEAPIGEIRNPTVTRTLAEMRKIVNELVKRYGKPRFIRIESAKDLRNTKKEREKIWKNNRDLEEVRSKIRQKLINQGIPNPTRSDIEKYMLAEECSWVCPYTGRSISFTALFGSEPQFDIEHIIPLSRCLDDSFKNKTLCYHEENRTRKHNKTPFEAYAYDENQWEQILSRVEKFNSHFSEEKLRRFKLHGKALEDFIDKFSSAQLNDTRYASREACMYCGLLYGSEYRKHIFTISGSVTSVIRRMWNLNRILGDAEKNRDDHRQHAIDAIVIAITSPAMVKRISEQAENIPTKERKNKKWWRFIEPPWPSMTEEAEEKVLSIIVSHRPERKVSGRLHEETNYSPPKLDKNGETVVHVRKSLSNISKGEIDDIVDPVVRKAVQDKLIELGGDPKKAFADPMNYPLMPNKKGLQIPIKSVRIKKKVPVFPVGEKERVRYVTSDENHHIEIFETKDKKGRTKWEGYVVSMYEAIQRRKRGESILIKKLIREDGSVDENAKFLFSLCKKDMVQMKGSDGKEGYYLIIGIGLSNNNIKIRFKPHYKAKVEQYELKGLIKEPNVLKETNIKKVAITPIGIIQPAND

SEQ ID NO: 9374 - protein, 1049 aa, unidentified
  REGION 1..1049: note = Description of Unknown: Cas Enzyme sequence
MPDNQKSYILGIDLGVVSLGWAAIEVNGQGPKGLLAAGVRCWDTSDASPSNAEQGKKKPANQTRRESRQTRRQLFRRAQRLRRTYRTLQDMGLVPRGPRSSTVRKATLDAIDQQAKEWLKQNVPALANDDLLDHTFVYRLRAAALDYALPPQLLGRVFFHLAQRRGYLSNRRSAPKEEKHGEVEKGISELEQNIRASGARTLGEYFSRVNPLEQRIRARWTSRKMYQHEFELIWNAQRPHHPTVLTDENKEKLFKALFFQRPLKSQKGLVGRCTLECLTKDLGNGNVERIYPFRRAPMACLEAQRIRYMQRINDLTLIDPKGDMRSLTQEERQTLYALAETHEKLTFDAIKKVLGLTGEGWKFSMERGGEKELPGNKTAVRIRRIIGTKTWENLSESQRKELVDTIIAYLSPEALAARLQKVWHFAPEVADKLSKVTLESGYHKYSRRAIRKLLPLLEKGDSLNTAIQKIYGGTQRKTDVHDLLPPVQEVVKDVRNPLVVRALTELRKVVNALIRKYGKPQLIRIELARDLKNPRKVREKRAEEMRQREKQRKAAAAKIQEVLGREAKGADIEKYLLAEECNWECPYTGRPITLEALLGDQPQFDVEHIWPFSRSLDNSFANKTLCYHQENRDVKKNRTPFEAYGSNQQPWHEILARVERFKEPFKSEKLRRFKAESIPEDYPQRDLNDTRWISREAADYLGHLYGGRIDPSGKQRIFAIKGQLTAIVRQAWDLNSILGGGPEKERNDHRHHAIDAITIALADASLVQRISWAAARLPKTFSRITVQIDPPWEGFLNDVRQQIHNIVVSYRPNRRVSGPLHDANFYTPPIGGQKPKHRKQLKDLSPKEVSKIVDDRIRTLVQETLERHGGKEPKNVFNSPENLPVFNGRKVKSVRIWVSDHVMPVGQNHRIRYVIPSSKHHIEIYALLDDQGNETAWQGKVVSLYEAFQRMKNGQPVVCRDHGPNTRFKFSLCKSDYIEWIGEDQRKQLLRVVSLSDDDIEFRLPNDARPMSVIKRERGRIRANYSKLFKRNTRKVWVTPLGEVRPAND

SEQ ID NO: 9375 - protein, 1101 aa, unidentified
  REGION 1..1101: note = Description of Unknown: Cas Enzyme sequence
MSIKDKISLGTDANLQLAFDVGHSSIGWAVLQSSTGVAPVSVKTAKDNLSVNILGCGSVVFRADDCLANSRRAYRRQRRHIRSTKQRIARMKIILRHLGVLKENELNQPGCAWTWQLAARVLQGGKLLTWPELWDVLRWYAHNRGYDGNRRWSAAEAEAQKEDSEKEANARTLMGKHGVHSMAETFCKELGVEPLGKKKSSMKRFKGLNAAFPREVVEGEVRKILQAHSGKLKGVDANLDKVLFSDWHAIPCPDLKLPKRYEGGLLFGQLVPRFDNRIISICPISGQKVPSRNCPEFLNFRWAMQLANIKVGKNKDRELQPLEAEHRMILDKQMRERGYLTPKELKDAVRSITSCERDNLDTMLMHPDAKEALLLDPVQKLICSDDLQPFWKLLPERLQKRLRGQWRRNKVFKLAQIRKQLELLGDVSTFDAELQKQLDTQNSKAKKKEKQVTREELLQKHFPSKPLKLDGRAAFARHLLKQAYEDVLAGKLHPKEEGGCLFITEKMREAQLNRAIADQTNNHLVRHRLLILERLLADIIKEYAAGDKKRVGKITIEVNRDLREMSGKTAKEKAQDLGLKIADHHRVVAKLEAAFVGHKHNGKPIQITAGLIRKARIAEDLGWVCPYTGKEFEPIDLVTKRVDKDHIVPRVLRPSDSLESLVMTYSQVNAMKKGRTAWQFMKEDQTKPVDGLPRHQLKSLKWFEQFVDSLHPKSDPAKRKRAEGHRRPIDDDLRKWKRKKLLLLPEYEEKEFIPGDLTQTSQLVRLGAQVLKGAFANLEEKPTVVSLPGSVTGAVRKAWKVLGCLSLANQQVLDENGDVKTKTDIRDITHLHHALDACVLGLTSHFIPNNGRVWELIVKRNLNDIEKRELMAFGVFGFNAEKRFEMRDLDNKLKEQIRQRLAEKRVVQHIPARMDGLRVEQNTWRVVSSDENGNVTIRQRIRQPDGSRPEKVGEEKTAKLLGLRPANDNGKLAANKGVLVIPDNYGVALDPLPTIIPFHKVWPRLQELKKANGGKLPRVLRNGQTIKIPEGKYKGIWRIFSAKNNATGMAVDIGQPDVVRLKNKTEGHKINVLLTSLLKSKMEVVKSPFTGISAVPAASST

SEQ ID NO: 9376 - protein, 1088 aa, unidentified
  REGION 1..1088: note = Description of Unknown: Cas Enzyme sequence
MDFSSYILGLDIGTNSIGWALMKTEDQGGRLVPVGIERTGVRIFEAGVAGSIEQGRTESHAKARREARMLRRGVFRDGQRLRHAFRLFQEAGLLPGDPHQPAERDRIIKKLDAELRTTWGRKLTAEGIDTAAVKVAVHHNLPYFLRARGLDEKLEPYEIGRAFYQLAQRRGFKSARKNIKGKDDADNDPNMIEKAAKGLQEEMAKVSARTMGEYFAKYNPFESADQKIRGIYTLRAMYEQEFALLWDAQAQHYPGILTPAFRQALLYDVHGVFWQRPLKSQEHLVGECTLEPGEKRAPWALLDAQRFRYRQKLNDTRIIPPDGGESYRMSSEQYDILAGMLDQKAALTMTKAKELLGLSNRYRFNMGEGGETRFVGNRTAAKFIEILGDRWQQLSPEQQNHLVADYLKSKDKPIPMQRSIGELGLDDKLAKKFAAIKLEPGYCNFSRKALAKLLPYLQEGFDLHDSIEHACYEAPQRAPLDFLPPLMDNKKIAYPPLLRAYGALRQDIRNPVVQRSLTELRKVVNAIIREYGKPAVVRIELARDMKKNDGQRREIWKRNRDLESRRTKAAAELLKECNIANPTRNDIEKVLLWQECGGPTALCPYTGKPMALSDLFGLHPRFDIEHIIPFSISLDDSFLNKTLCDADFNRRIKQNKIPGQLLGVEEMIERIERWPKSDTRDVKLERFKMADTTDIDGFLNSQLNDTRYASRLAMEYVGMLYGGKVDAAGRTRVQVGKGQVTHHIRNVWRLNAILNDGGQKSRDDHRHHAVDAVAIALTDPKTLKNLTDIAKRAKERGERWFGREKPLFPWQSFMHDVAASIRGLTVSHRVSHKVNTAFHEQTIYSQEKEYDGKKCVHIRRTLGGNLRKSDLPNIVDTRVKEAVFARLQQQGFDPEKINDQQLQKIFGLPENLPVLTTRTGRSIPIKKVRVRKVERVITVGCNGRERNVSPGSNSHIEIFEAADRTGRIKWIGRTVTSYEALQRLKAPGKQVVNKITDDREWIFINSLSCGDLIEIDSEGNVRQLMLVKSVEEGRIKLFPSNNAGKTHGKLSDGRSFDHRKVISVDGLRKKNLRKITVTPLGDLHDAND

SEQ ID NO: 9377 - protein, 1374 aa, unidentified
  REGION 1..1374: note = Description of Unknown: Cas Enzyme sequence
MAKFILGLDIGTNSIGWVLFQDNKVFDKGVIIFPIGTNVDKNGIETTKNMQRGIYRRTSRNHSRYKLRRKDLKRLLAILHIIPSFTNTFKIKKKYQASELYQLRANALDKQIPIEEIGRIFLLINKHRGFKSNSKTLSENKDEEGVVKEDIRNLSTAMKANEARTLGEYFHKMYEKSAQSFNDGNWHNIDEPFDERAIDNDGIFWLQNNRGIRREGRFVGREMYANEFDLIWDEQKKYYPQLTGSKMEYDEICKLPVEAKRNQLKLFKATCYWKIRQETIFFQRPLKSQKKFIGKCQFEKNKRTAPASSLLFQEFRIWKQLADIRYTDKENDIYNQPLPHEWKQKIVDYLETNLSLNLREGRKKEDGTRNKDVLDILGFINKKNFDFNYDTNEEDKNFHGNKTLYAIYKSCGEEKYKQLKAENKLGKLWHILYMAKDDEWLKDTLTWKWKFDEPIATRLIEMGLEEGFANYSSKVIEKILPFMKNGNDEHNALILANYIQAPDEYEEIAVLSKKIKQLANNELRNPVVEKAVGETIRLVNTILKTHNIDQEDFTIRVESTRGFKKPKKERENIRRKNLDTEKRREEYAKFLNEKKSKGELNFSRDIKKNDSIINKFELWLELGADKNDPEFKDFEKIVERKDREKHTLWLDCNRICPYTGIIIPLSKLFSAEIEIEHIIPYSWSLDDSFTNKTLTFNYINKEKANKSAYEYMKNKGEAEFKAFKNRVKSFGKEKADEKFLNQNPERTFTNAQGRNASYIAVYVRKKLQEVCRDVQFTNGFATGELRKNDWRLGNLLDKVRYEEETGIDVDKYTREFANYKRDYETYRKQKANSTDIVKTDWRNLTPEITEEYEAETKNPIYEWWQELQKFDAFRGAKGKKDRSDHRHHLLDAMVIAMCSPSIIQRLSTLSQLREKQGATLYDEKGELTRERIDLPIPYSEIKKSLESVLVYHKAEQRLITAKQNRIHKKKHSADDTNVSKQRTIAPRGSLVGDNFYGKLKKPQHQGFAKDAVFVKRVSVNGENFKDKKALDKIVDKNLRKILELRLDKYGDKGEKAFSEEALLEDPLFVYSTSKYPNGLPNNPVSKKETPLPVIKKIRVANKNSRNLIQLAAKDEEKNIVNSNRYSEADGNYVMALYESKETDKKGKVKIKRDFEIVSFFKSVERRRIGEKLYADEKEQKDGTFLPLMKSCPFLKAGDFVVMYENEESEINWDAKKDLMQKLYFIAELNRQVNVDKQTGKENEFGVIKLNKHNNQKTTNNSYITEGPFIKILHTGLKVVKVNIDSLGNITPIKTQNPYLFSKEENNNNTISESETNYQKKTIQSFSSLKESNEANAKQMAAIPPIDHLKNVITLVKQVYKEELKEPMDKKLNFE

SEQ ID NO: 9378 - protein, 1452 aa, unidentified
  REGION 1..1452: note = Description of Unknown: Cas Enzyme sequence
MKKILGLDLGTNSIGAALINMPELIDDFGKEGNIEWIGSRIIPMDGYVSSKTGKGIKETPFDSFSKGVGISKAAARRIKRGSRRLKQRYKLRRTRLIRTFKLLGWLDESFPENFKEKMNTEENFSFQISDYLPFEKSSVEEATKLLGVENKKGELVLPEDWIVYYLRKKALTEKISIAELCRITYMMNQRRGFKSSRKDLKDENVVEIKKVVELTIRDVVEKGEKNKKKVFEIIPNDNLIGSWEEQKFKKPEWIGKKNMYLVTWRNGKRLKPELVSANDYEPAMIALGEQMNEENKYPGEFFFDRLVKDKNYKIRQFPVYRKKYKAELEAIWEKQIELRKKENTENEILNESKIEQIATTLYKHNEVKQKELKGKSLLQIISEDIIYYQRDLKSQKSSRGDCQYESHKGIDGEKYGVKCAPKSSPEFQEMRMWQDIHNIKILQRNAVENGYDKVDIDVTHNFIDEPIKEKLFDLFDSKKEISQQDIFDAINIHKPDNNLNNDKHRINMFFDGKDKLDGNQTKEYFRKIFRNEKYDGEHILNSNEKFYKLWNISYSISLNDEEKSKEAIFKALTKNENKRKKNKQVSFGLPDKVAKAIASAPDIEVSKKYASYSSKAIQKLLPLMRCGMYYDSTKISDKIKARAKEIYQRLEVINFNAKRIHEVADDDVQKQMLKSFINKKDDFLEIKGMNTYQACYIVYDRHSEKVAEREYTQSSDFNIMEKLPNNSLRNPVVEQVIREALFVVKDIWEKYGQPDEIHIEMGRDLKKNSKQRESATKNSTKNYEEKQQIRKLLYELFNDEFEQYETDENAEDEKKKVTTRFEVKPNPDNPRDIDRFKLWQQSAGFDKTEFNELFKSGGKTKNPTRAEIKKYALWLSQKCVSPYSGKIIPLSKLFDGNKFDFEHILPQSKLKNDSLDNLIICEKGINKAKGGELAAIFIKSKQGRCEHGNIEYKLYNYDNYVTHCKDTFKGKKLQNLLATEIPDDFISRQINDTRYITKKISELLYPVAKNKEAGIVFTIGSITSELKKEWGLQKEWKQLIKPRFERLEKINKATYILQNQKDKNDIDFHVTENPDLDTKRIDHRHHALDAIIIAATTREHIRYLNSLNAVDTDEELKKVKRTLVKGKIREFHLPWELFTKEAKEKLEQTIVTFKIYNKIIDKPKNSYTKWEEKSDGKWEKFTEDQRKRMKEKGRDTKKWMAVRQSLFAEQPHGKVYIKEVVEKSFETPKQMLDVMKIEAGRAKAQNTSLQKTASYIYEKEARAIVKQMVEQLKGNDEEILKQLKKIKPTNFRGEAITNVRIAIFNSYAAKRKEISRDFDHKVIDKIPYANKEKSKIPNALHNHLLKYEQKKLGIEKLAWRNERLEQLINDIRYEIVALNEEKKKLIKEAQSEAFSDEGLESLEKRIGMKIRMVTLMEDVGIKIPLKNKYSEADGNTYFIMYENNVTKKRNYF

SEQ ID NO: 9379 - protein, 968 aa, unidentified
  REGION 1..968: note = Description of Unknown: Cas Enzyme sequence
QNSMKQFLAAEFDFLKCPNTFKELKEREQKCDCNACKKLNSLYHPSQIDIYPVAKEGNYKYGEIDKRMVMLGSPKTGAFKNPMAMRALHELRKYINYLIATEQIDEQTRVIVEIPRDSNLEDNNKRWAWNEYQSRRREENKEFRDAIYELLRDPQASGSIVNPDSDSDIDKFRIWYEMIQDHDAMEGFEEKKVFIPLEKTITIKKNRKGQEEEIEEFNENNYLKINKSLFFKLQKAKENVETKYRLWREQEYCCLYTGRMIGITDLFQENSIDFEHTIPRSRSLDNSIANLTVCDADFNRNIKKNKMPSELDISIYEGIKMRLKKWEEKVKDLQLHVDFWKAESKRSTTKDRKDQCIKQRYLWQFELDYWKDKVSRFTMEEVKSGFRKSQLVDTQIISKYAFHFLKTFFNTVEVQKGVTTAEFRKIFGVQEIGTEKDRSKHSHHAKDAIVLTLIPTPAIREQMLTVWYEIQETKDLLLSNTEPDKNKIKEEVYRLEETLRLLKYQCNLPNVNAVIDKVDEQILINNIAKDNALVAAKRRIRSRGKVVPAKDKTGNTIYQTDEKGIPIQRKYKDGNLVWKIDEKGNYKLDENGNKIPVFIAREKWAKGDAIRGQLHKDSFLGAIKLVKTDKDGKWIKNENGGYEFEDLRYVIREDLVYKKNAQSPGFKDLDDLKNQIVDKALYKIIESQVRAVGDFKEAFAQGIWMINKKGEQVHKIRRVRIEVSATNPIAIKEQTYKNTTASKILPDRKHKEQYWAVNGENVILALYQKTIDTEKPERELEIISLKDAAALLSLEQIDETREVELYKKDKKGKDILNESGYRIRPYTLLKAGMKVIFYDEKIHDLKQKEGEKETDYLKRINYKMYYVVKFSGGRTTFQHHLEARDDKKLKLAYPKDKVFMTDKDNKEIKYGVSGTSGFSRPVSDALKLNGYNNYEPFPRLLYSKDSLNFAIEGKHFEIKPDGEIKWLL

SEQ ID NO: 9380 - protein, 1072 aa, unidentified
  REGION 1..1072: note = Description of Unknown: Cas Enzyme sequence
MKQKLQRYILGLDLGIASVGWAAVWVDEDENPIGLLDCGVRTFERAEVPKTGDSLASARRLARSVRRLIRRRAHRLLRLRRLLKREGLLTAADFDAEGLLQGVPVHAWQLRVEGLDRKLEAKEWAAVLLHLVKHRGYLSQRKSEMQETDGKSELGRLLAGVAENYKLLQQQEYRSPAELAVKLFAEQSGHMRNKGGDYTHTFNRLDLQKELHLLFERQRALGNLFVSAALEVKVDELLMRQRDALQGEAVLRMLGKCTFEPVEYKAAKNTYSAERFIWLTKLNNLRIQHDGEERALSEDERRLLLDEPYKKAKLTYAQVRKLLDLPTDAVFKGLRYGKNEEGLKAESAALMEMKAYHKIRQVLEKAGLKTEWQGLATQPEKLDAIGTAFSVYKTDADIAQYLAPYGFQTGIVETLLAGLSFDRFIQLSLKALQNILPLMENGARYDEACTAVYGDHYGAKSQKISALLPVIPADAVRNPVVFRTLSQARKVINEIVRRYGSPQRVHIETGREVGKSFKDRRDIEKRQEENRKERERAANEFKELFSYFAGEPKGQDILKFRLYNQQHGKCLYSGVPIDLGRLNEKGYVEVDHALPFSRTWDDSFNNKVLVLGSENQKKRSQTPYEYLDGANDSTRWREYVARVNGCRFPYAKKQRILTQKLDAKAEQGFLERNLNDTRYIARFLCEFIENHMRLEGKGKRRVFASNGQITALLRGLWGLRKVREENDRHHALDAITVACSTRSMQQKITKAMQRREILETIDYETGEVKQRIPQPWDFFRQEVMIRVFSETPHDELAEKLSSRPEALHEFVTPLFVSRAPNRKMTGQGHLETVKSAKRLDEKISVVKKPLSALKIKDIASIVGYPDRETAFYAALQERLEAFNDDPAKAFATPFYKPGKNGEQGALVKSVRVEDVQKTGVMVRNHKGIADNATMVRVDVFGKGGKNYLVPVYAWQVAKGILPNRAVVAYADEADWDEMDESFEFKFTLYPNDLVEVVSKKERIFGYYSGLDRATGAIGIKEHDMEQSKGKAGLYRVGVKTVLSFQKYQIDPLGKEIRPCKAEQRPELKTNKK

SEQ ID NO: 9381 - protein, 1288 aa, unidentified
  REGION 1..1288: note = Description of Unknown: Cas Enzyme sequence
MISLGLDIGSNSVGSAWADTDKREVHLAVSVFPAGVDEQESKRGAPKNQARREKRSQRRSLARRSARKRRVRQVLTQAGLLPQDVEELQRLFDTNPWELRRAGLTRTLTPHEFGRVLVHLNQRRGALGIETNPEDPEEGKVKEGIDRLNAEMLARKAETVGQLFADLMDERRAAGKCASNTAVSRRVQQIRRKREGRGEATEFQFHGPVRNRQYRMDERQQLYADRRRVREEFLLLWERQKSFGGPLAELLTDDLKRQLDDPTGNDVWRHQGALFGQRRTFWDTGALGRCVLEPTERCVPLADRHASYFRVVETVNNIRIIQGGHSPRPLTVEERERVMRVLRGPLFRKSKGKLIPKSTASVTDIKQALGINPRDKLVRLNIEADEEREINTDWFHREIVHGAFTEERWNQLDERQKESVNRAVLRFDPDDEQDQKTLREKAGRWWGLEAEAVERFIEAWKTRPKLEKRLNLSRKAILNLLPYMERFDEEHQRWPTQQEARKAYARTLREKYEQTGVDADRIAADRYDTGALGLTARDRYFMKLDKHRIAEGVPELPPAPMLSNPVVRKAIHEVRRHLMAYLRKFHKTPDQIVIELARITKQSERQRNAALARNRNREKIRKAIIAGTENEPGVLVCAFGAEGARRLSLNQQRAAVDRVILAIQQRETCPYCGRNGLTPVVAAKGDDLEVDHIVPYSRCGDDSLNNKVLVHRTCNRGKANLTPREWWGTEFETRIQVAEKLFNGVKPAKGDYFEERDYKRKWENFTREVREADEWKNSQLTDTAYAARQVAAYLADALFNGRGLPERGDGGNEQKIFFTMGRFTAMLRRDWQLFETLKPPQREGRHGELTADEEARIAEKDRGDHRQHAIDAAVIALTDPKIKHHLANWAAYAAEYKEKRGEWPRREPIEPPWGDVPSFRREILSQVYARFDSSEFESGRQDEAGASDLLVVSHRPVKRRLVGAFHEETAYGPVISPLPPHRREKPETLFTNRIQVAGLTPNHLRVPEGWDELSARLEDPALTEGEKKAVRRQLAALTDPPPGKSGIVRDRALRDWIRKCLRANGLNPDGFSKAQMRDFAASGKLVMRSGVPIKSVILLRTNTDPVIISRKRWDPAANRMIVDEDPRSARVYIGGNNHHIEIRERQVTRQGATVTEWTGRVVTTFEAARRVRLEGRPAVDRSDNEDGRFVMSLAEGEMVFMRHPKTGTPGYFVVFKLDKPNTIHFIHHWDARPSMPRKDENGNEIPGSAREDIAVVASKLRFLGVEDGQPPYKVRVAPLRRPKPVMGD

SEQ ID NO: 9382 - protein, 1045 aa, unidentified
  REGION 1..1045: note = Description of Unknown: Cas Enzyme sequence
MTGQDTERVLGLDLGANSIGWALLEYEKGEPARLLAMGVRVFEAGVEGDIAQGKDESRAAVRRAARLMRRQTDRRARRLKKLAALLQRHGLLPPGNIGSELERDMLIKDLDKQLYRAYATRSERRDGLAQLPYFLRARALDYPLELYELGRALYHLAQRRGFKSNRRDTGKKEEDLGAVKKGIAELEQQMAASGARTLGEFFARLDPHEQRIRSRWTSRQMYEQEFASIWEVQAAFHPDLLTETLREEICEAIFFQRKLRSAKGLVGHCSLEPGHRRAPWTALDAQRFRVLQRVNDLRIICPDYRERQLTPQEREVVLALLERERKVKFTQLRKVLKLGKGFSFNLERGGEEWLVGNSVVAEMRKVFGDRWDDMSQEEKERAIHDVRSIQKDEVLERRGRDVWGLDEEHAKLLGSIALEEGYCALSHKALQKLLPLMEQGMAYAEARKKEYPQSFGAGCSTDFLPYVDDRDAVPFELRNPAVHRVLTELRKIVNGLITKYGKPDKIRLELARDLKRSRKDRELIAKKNRDNEKKRAAAKQKILAEMHVENPSKEDILRVMLAEECRWQCPYSGKHITMSQLLGDASQFDIEHIIPYSRCLDDSYMNKTLCYHEVNRTRKKNRTPFEAFGGTPEWEEIIQRVKQFQGDQEVVRAKLRRFMAEKIDEFEDYAARQLNDTRYASTLAAQYLGLLYGGMTDSSGVRRIQAGRGEITADLRRAWGLNKILGDGYEKTRDDHRHHAIDAVAIATTDHRTVKALSEANERAGREGRRSWWKDIPLPWNGFLEDVRQAIETLVVSHRPIHKVGGPLHEETYYSKPYEGEDGKTYVHVRKAIDALSENELEAVVDPTVRERVKLRLAELGQKHPKNAFKDKLQHPYLETRDGRKVYIHRVRIRKVMTPFAVGDAPHRRRYVVAKENHHMEIFETTTKRGEVKWEDRIVDQFEAVRRLRRGEPVVRRDYGDGKRFVMSLAVGDTVMLLKEQKESLWIVRSIWKGRVSLSPCNDARKQADLKKSGVFNSPAIDSLRNWNCRKVVVTPLGEIRWAND

SEQ ID NO: 9383 - protein, 999 aa, unidentified
  REGION 1..999: note = Description of Unknown: Cas Enzyme sequence
MYTLGLDIGSNSIGWAILNPEEKKVINAGVRVFQEGVDRDTKGAEVSKNAARRAARSARRTRKRRNYRKDKLFRLLVRNGLLPQDPLQQQALFQKDPYYLRAKGLDEQLEPYEIGRVLYHLSQRRGFWSNRKSEKKKEEGVVIKGAAALQKQIEESDCRTLGEYFARQNPHENRIRGHYTFRSMYEDEFEKIWQTQSGFYQDVLTDSLKEEIKDRTIFYQRPLKPTEELIGDCELEPGEKRCPRADWFARRFRILQTLNNLEIHNPDGTETKLNEDQRKIVLQELLSSKEVKFDTLRKKLNLLETQTFNAEEGPKDKKKESIQGDEFNAHLRKVLGKKTFERLAEQDIIEINDLLLDDTLQDEEVAEKLMEHWGFGQEQAQKILEVSLPQKYMSFSRLAIQKLLPHMERGLLTHQAIEAVYGSSHGRQAVEVLESLPFPEDLRNPIVNRALWEVRKVVNALIRVYGKPQKIKIEMARELKGSKREREELQYRQRQNEEENKKAREELIRMGILNPSRDDIIKYKLWQECGQVCPYTGRPISQNALFGPHPEFQVEHILPYSRSLDDSFMNKTLCAVDENRRKSGRTPYEFYGETEQFEQILHRIAVLPYPKRRRFWQKEVELDKFIQRQLNDTRYISRKVCEYLKLLGCTVQGTRGQVTAELRHQWGLNSILDDTDLGEKKRDDLRHHAIDAAVVAVTENRHLRDLAHSKYTPAGQAAARFAPPWEDFRQQMQQIINQINVSHRVTRKVSGPLHEETSYGPTGLKDDKGQDIYVYRKSLEALTLSMVPKIVDPVVRQLVAERLEQFGLKPGGDGKITKEVWKEPLRMKTKSGAPGPQIKSVRIRDVFNNLIPIKDKNGKPYRYVAPGSNHHIEIFEYTDSKGRTKREGRVISMFEAVQRSRRKEPVVCRDYGDGGRFICSLSRNESFMLEMDDGTHVLHRVQYISILPGGPRIVLRPAAFGGQLSEKHKAPLIQRKMPNSLKGYKVAVDPIGRIFPAKD

SEQ ID NO: 9384 - protein, 1258 aa, unidentified
  REGION 1..1258: note = Description of Unknown: Cas Enzyme sequence
MSKILGLDLGTNSIGWAIIEEGNDEKLIDKGCIIFPEGVKEEQGKEISRAAERTSFRLARRQKFRRKLRKYNTLKVLIEYNMCPLSMDELEKWRKEKEYPKNKDFLEWLKTDEKNGISPYYYRAMAVEKKLAPTEVGRALYHITQRRGYKSNRLESTDENQKGVVNTSINEITNSKGDKTLGQYFYDLYKKGEKIRKKYTSREQHYLEEFKKICEVQGFSEELTKKLEKAIFFQRPLKSQKGLVGRCVFEKSKPRAPISHPLFEEFRMLQFINSIKYKDNNGKFVFLNENQRERIKPLFYRKSKSSFDFKDIKEKLFGNENVEFNYKNEKDVSGCPTIANFIDLFGENWKNICIKYTREKDNKESTINYETIWNVLFSFNSDEKLIEFAKKRLGFDDEKAKKFSKINLKQGYASLSLCAIRKILPFLEQGLLYTYAVYLANLDKVLKKAEKKQYKESIKKDIEEIIKTYIAAKKIEYVINSYIDKYRTNHYNLNAEKEDFKKKIENELGNDYEALDNNEKNELIDKYYNILEKQVRKNEYVKIKRLDEKINELLKTKYDIPDQALEKIYHPSDIDIYPEAKISKDGKKYLGSPRTSSIRNPMAMRTLHQLRYFINTLIKEDKISYDDQINIEVARELNDANKRAAIRRYQNELEKKRKEYAQKIRDTLHIEPTDTDILKYQLWEEQNHICIYTGREISLKDFLSDNPTYDIEHTIPRSISIDDSQENLTLCENDFNRNIKMNQIPQQLGNINEILQRINHWKEEYERLEKEIEKAKKRSKNARTKEEKDEAIQTRHYLTLKKDYLKNKYNKFLIKQEDINRIGFTNRQLVDTSIITKYALAYLKTVFNNVNSIKGSITSQFRKIWGLEEEYERKARTKHSHHTIDAIVLACITRSKYDVLAHYYNQTEGGIRPDFKKPWQTFVQDIKKIENEIIVKHIYNNNLLKQTIKKLRVKGKIKYIVDKNGNKKPIYLKGKGFRGSLHLDTYYGAIKRKDKNGNDRLFYVVRKPLDYFKNNEKKLDDIVDNVVKEKIIKAIEEGKNNGKQLNEILSNPIWMNEEKKIPIKKVRIYSYFENCKKLKEHTFLSNKEHKNYIYVETGGNALMGIYEDQENRDNRDFIIYTNLELAKMKQISLPDTYNNLKLKYKLKEGLSVILYKDNPNEIFKLKDNEIILYLYTITGLFVDGGRIELKNNIEARKKTEIKKYLKERGEPYPKKGEFVNDGKYYPVRNLMFKQFNALIEGVDFIITIDSKVKFLNKK

SEQ ID NO: 9385 - protein, 1236 aa, unidentified
  REGION 1..1236: note = Description of Unknown: Cas Enzyme sequence
MKILGLDLGVTSIGWALIEKNNENEEINLIKSGVRIIPIETKDAMQFSSGNTASPNIDRREKRMQRRMYFRKKKRNQSLIRTLVDNGLWDANLINIEKNELWKLRNNAVNEQIYLPELGRILYHLAQRRGYKQMRIEQDEADSKSDYKKNIYTRYQTIQNENITVGQYFYRELQNNEHYRVKEQIFPRKAYEEEFEKIINKQKEYYPQVLSDDFINKLKHIIFYQRPLKSQKHLLGVCALEGKTIKIKNDGGNIIEKFVGPPVIAKTNPLFQIHRIWQTINNITIKNKKTHKNYELSIDEKNKIFNELQDKDALSIEQLYKILNLSKDEWYFDKLSKNGIKGNELLALIRKALKNEFFSPDIFKLDIKIINYQKQIIDKNTGEIKEATLEIIDPNVVNEPLYKLWHILYSVVDKEECMKALKKNFNFSTTAADKLSDINMTSLKYGSLSLKAIRKTLPYLMKGMIYSDACQIVGYNFSNAISKDENYYRPLKNKIPLLPKNSLRQPIVEKILNQMIHVVNEIIDDNNGLVSKEERENGNFAIHIELARELKTSKEEKQGITKAIYKNTKENKEIENILKNQYNLTPTRKLIEKYKLYKELTPEGTNILQPQCIYCGEFISITEALTGDAIDVDHIIPQSKLFDDSRNNKVLVHANCNRTKGNMTAYDFMQNKSQDQFKNYLALVENLKEKKSISYKKYKYLLMSEKDIPQDFIDRDLRLSQYITRKAREICMDISKDVLVTSGTITARLRELWGYKDIISEINTELINDIELSDENKSQLVEIFGDKRSDHRHHAIDAITIASTTRSIIQRINTLSSAESKEKINEYLKQLNQDTLDTVYNPNEKNLRLLHKYLANQPHPNRDQVKQNIRDILISFKPGKKVATYSKRIVYIGNKPKILQTHILTPRGALHEESYYGRIALSEFKDLKYAIENVNLIVNNHIRSQIMNLLVEYNNDTKKLWNDIKKDKVLIYSDINNTNPIKDVKCYKYEYVIKKSVNGEKVDQKAIDKKIKDILSNSKTKKDVIYFNEVKKIPIHSVRVLTGLDNNSMRAIRCNHNGEPITFVKLGNNHHIALYKDKNEKYQEHLCNFWHAVERKKYNIPVIIEHPDKIWDQVLVNPDKYQQEFLNKLPDPSWHFVLSFQANEMFILGLSNEEFDQYINEKNYSILSNHLYRVQKVSSFYYMFRKHTDTSVDELDYLAKISMFKRISSINSLIKENPIKVRINYLGEIIDYKKTF

SEQ ID NO: 9386 - protein, 1137 aa, unidentified
  REGION 1..1137: note = Description of Unknown: Cas Enzyme sequence
MAQYVFGLDIGIASVGWAVLDEQRIVDLGVRCFDKAETAKEGDPLNLTRRQARLLRRRLYRRAWRLTQLARLLKREGLIEDARLFAHSPAFVEPDPTNAKRQHLVSAWELRRAGLDRRLAPLEWARVIYHLCKHRGFHWISKAEEAAADSDAEGGRVKQGLKSTKALMEAKGYRSAAEMVLAEFPTAQRNKQGQYDKALARVLLGQEFALLFATQRRLGNPHASERFEALLLGSGDRKGGLFWQQKPALSGADLLKMLGKCTFEKTEFRAPKASFTAERHVWLTKLNNLRIVEDGRSRPLNEAERAAALALPYQTENFKYKSLKNTLVKAGLWSADVRFGGLSYPSTAQKENDKAKDPEDQALVKLPTWNTLRKAFEKAGHGSLWQRIGTPALEGQPELLDQIAWVLSVFKDGAEVVQQLRRLNLPESDTCIAVLEQLSFDKFSSLSLKALRRIVPLMEKGLRYDEAVAQISEYGHHSQLTTPDASKRLYLPPFYEHERKYGKSDRVGSMQFREDANVPRNPVVLRALNQARKVVNALIRRHGSPMAVHIEMARDLSRPLDERREVQKLQDEFKERNQKLRDDFETLFKRKPNGKDFEKWLLYKEQGGQCAYSLQPLAPSGDCNEIFLDGNTQVDHALPYSRSYDDSKNNKVLVLTRENQNKGNRTAYEYLTSFPGGEDGERWRAFAAWVQGNKAYRMAKRTRLLRKNYGQDEARGFIDRNLNDTRYICKFFKNYVEEHLQLAERPDGDRNRRCVVVSGQLTGFLRARWGLTKVRAESDRHHALDAAVVAACTHGMVKALADHARTKELEFLSEGFPDPETGEVLNPAAFDKGKKHFPEPWPHFRHELQARLFTDDLAALREDMLRLGSYSPQALADMRTVFVSRAPQRRNGGAVHKETIYAQPDSLKAQGGVIEKVLLTSLKLPDLERLLEPHRNERLYAAIRERLQAHGGKADKAFGPDNPLRKPDKNGQPTGPIVRSVKLVRDKQSGIPIRGGLAKNDAMLRVDVFTKAGKFHLVPVYVHHRVTGLPNRAIVAFKDETEWTLIDESFEFLFSVYPNDFIRVQQKGKPIIEGYFSSAHRGTGNINLWLHDRSTVDRKDGAIEGIGVKTALFFERFNVDVLGNCYPAPKETRRGLA

SEQ ID NO: 9387 - protein, 1040 aa, unidentified
  REGION 1..1040: note = Description of Unknown: Cas Enzyme sequence
MKILGLDLGVASIGWALVEKNNENGEINLIKSGVRIIPIETKDALQFSSGNTASPNIKRREKRMQRRMYFRRKKRNQSLIKALKDKGLWDVNLINIEKNKLWELRNNAVNEQIPLTELGRILYHLAQRRGYKQMRIEQDESDANSKSDYKKNIYTRYQTIKNENVTVGQYFYKELSNNEHYRVKEQIFPRKAYEEEFEKIINKQKEYYPDILTDEYNNKIRHIIFHQRPLKSQKHLLGVCTLEGKTIKIKNNDGTVKEKYAGPPVVAKTNPLFQIHRIWQTINNITIKNKKTHKIYELSIEEKNKIFNELQNKDSLSIKQLYKILNLSDDEWYFDKLSKNGIKGNELLTLIRNALKGENYPQDMLKLEIKIINYKKKIVDKDTGEIKEQELEMIDPDVVNEPLYKLWHILYSVVDKEECMKALKKNFNFSTSAADKLSDINMTSLKYGSLSLKAIRKTLPYLMKGMIYSDACQIVGYNFSNAISKDENYLRPLKNKIPLLPKNSLRQPIVEKILNQMIHVVNEIIDDNNGLVSKEERENGNFAIHIELARELKTSKEEKQGITKAIYKNTKENKEIENILKNQYNLTPTRKLIEKYKLFKELTPEGTNILQPQCIYCGEFISITEALTGDAIDVDHIIPQSKLFDDSRNNKVLVHANCNRTKGNMTAYDFMQNKSQDQFKNYLALVENLKEKKSISYKKYKYLLMSEKDIPQDFIDRDLRLSQYITRKAREICMDISKDVLVTSGTITARLRELWGYKDIISEINTELINDIELSDENKYQLVEIFGDKRSDHRHHAIDAITIASTTRSIIQRINTLSSAESKEKINEYLKQLNQDTLDTVYNPNEKNLRLLHKYLANQPHPNRDQVKQNIQDILISFKPGKKVATYSKRIVYLGNKPKILQTRILTPRGALHEESYYGRIPIYEFKDLKYAIENVNLIVNNRIRSQIMNLLVEYNNDTKKLWNDIKKDKVLIYSDINNTNPIKDVKCYKYEYVIKKSINGEKVDQKAIDKKIKDLLSNNKTKKDVIYFNEVKKIPIHSV

SEQ ID NO: 9388 - protein, 1134 aa, unidentified
  REGION 1..1134: note = Description of Unknown: Cas Enzyme sequence
MAQYVFGLDIGIASVGWAVLGEQRIFDLGVRCFDKAETAKEGDPLNLTRREARLLRRRLYRRAWRLTQLARVLKREGLIDDARLFSRQSSFSAPDPNNRGKKQVVSAWELRRDGLDRLLSRLEWARVIYHLCKHRGFHWISKAEEAKADSDKEGGRVKQGLKDTAARMKDKGYRSAAEMVLAEFPDAQRNKRGQYDKALSRVLLGEELTLLFERQRALGNPHASERLQTLILGNGDRRSGLFWRQKPALAGADLLKMLGKCTFEKGEYRAPKASFSAERHVWLTRLNNLRVVIDGRSRPLNEAERAIALPLPYQTEAFKYKTLKAAFVKAGLRDEGVRFGGLSYPSRAQAEGEKAKDPEDQPLVKMPAWHELRKAFKSAGLESLWQRISTPALEGNPTLLDQIATVLSVYKDGDEITRELRALALPEPDACIPVLERISFDKFSSLSLKALRRIVPLMETGLRYDEAVAQIPEYGHHSQRIKPDANKHLYLPPFYEAQREYRDKNDHVGSMKFREDADVPRNPVVLRALNQARKVVNALIREYGSPMAVHIEMARDLSRPLDERREVQKLQDEFRDRNDQARAQFAEQFGYQPKGREFEKWMLYREQLGQCAYSQQALDIQRVLDDPNYAQVDHALPYSRSYDDSKNNKVLVLTRENQDKGNRTPYEYLTALDDGQEGERWRAFAAWVQGNKNYRLAKRNRLLRKNYGADEQRGFIDRNLNDTRYICRFFKNYVEQHLQLAARPDGDLNRRCVVASGQLTGFLRARWGLAKLRSDSDRHHALDAAVVAACTHSMVKALADHARRKEIEFLKQGFPDPETGEILDPSAFDHGKHYFPEPWPHFRHELQARLFTDDLAALRTDMQRLGTYSDDDLARLRTLFVSRAPQRRNGGAVHKDTIYAQPESLKAQGGVIEKVLLQDLKPADLDNLVDPHRNERLYASIRQRLEDHGGKADKAFGPDNPLHKPDRNGQPTGPVVRSVKLVRGKQSGIPIRGGLAKNDSMLRVDVFTKAGKFHLVPVYVHHRVTGLPDRAIVAFKDETEWTLIDESFAFLFSIYPNDLVRVALKKDSALGYYSGADRSTGAINLWAHDRSAAIGKDGLIRGIGVKTAVSLEKFNIDVLGRVYPAPPEVRRGLA

SEQ ID NO: 9389 - protein, 1018 aa, unidentified
  REGION 1..1018: note = Description of Unknown: Cas Enzyme sequence
MGTMHYRLALDLGSTSLGWAMIRLREGQPVAVIKAGVRIFSDGRNPKDGASLAVTRRMARAMRRRRDRLLKRKNRMMALLVQEGFFPADSDARKVLERINPYELRAKGLDTQLSPAEFARALFHINQRRGFKSNRKTDKRDNDSGALKTAISALRQQLDPAGASGKARTVGELLWRRMQTGTGVRARYREMRVEKDDGKTRIDKSYDLYVDRAMVEAEFDALWEKQTSFDPQQFNEAARATLKDCLLHQRPLKPVKPGRCTLLPDQERAPLALPSQQRFRIYQEVNHLRILGADLQDSDLTLAQRNAVVDALERHGKRSFTQIKTLLKLAGTTQFNLEDNKRLELKGNATSALLSKKDFFGPAWFDLDPARQDAIVMRLLTEESEQALIAWLQAEFDLDEHRADTIANASLAEGYGSLSAQALARILPQLKADVITYDKAVRAADFEHHSHISHAATTGEILPALPYYGEYLQRHVGFGTGNPEDPAEKRFGKIANPTVHIGLNQVRTVVNALIRRYGHPSEVIVEVARELKQNQEQRKEQQQQQAQNQKRNKDLRTCAAGVLRIAAERVRQADIQKLILWKELSDDPAERRCPYSGVQISAAMVLSDEVEIEHILPFSQTLDDSLNNKTVATRRANRVKGNRTPFDARADFEREGWAYDAILARAELMPRNKRYRFGVDGYQKWLREDKDFLARALNDTRHLSRVAREYLSLICPQATRVIPGQMTAMLRGKFGLNDILGLGGEKNRNDHRHHAIDACVIAVTDQGLLQRFAQASASARERQLNRLVDDMPLPWPSYREHVTRAIHNIWVSHKPDHGHEGAMMEETSYGIRRDGSIRQKRRADGGEGREISNLIRIAEPSRPDRHGVDAAGLALPYKGYVGGSNYCIEITRTEEGKWTGEVISTFRAYDIVRTNGLAKLRHQKLGQNGLSLVMRLGIDDIVRMEHEGREQTLRMVKVAASGQIWFAPIHEANVDARNRDKADAFAYVSKMAGSLKTSKARLITISPIGELRDPGFTE

SEQ ID NO: 9390 - protein, 1141 aa, unidentified
  REGION 1..1141: note = Description of Unknown: Cas Enzyme sequence
MPNLLGLYIDVNSIGWSLLDADTMQIKAMGTRVFPVGCENFGSGKRELSKKAYKRSKRTTRFRYQRNRTRKIKVLELLIEHQMCPLSRTELKAWKEQKQFPKDSLQDWFRMNPYQLRKKAVMEPLSLEELGRIIYQISIHRGFPISERNRGLKDNIMFNGLAEKNRPGINHTQSQIHNSSLGIYLSSLLPQENKSYRFTNERIRNRFLTREMFQNELENIWNYQVKFHPQLSSDLKKALIGDSDSIPPQKGTVFFQRPLKSQKFRVGRCPYEPKKTKCCISSLIYQDLLAYRWANALKVNGKSLSKKDRTTAVTYFLTHRRFNFGRLRNELEQPNAHYNIKDEESIKGSFVNASLSHHTVFGEEWFDFDDQKRETIWHCLYFFDNEQKLKSQMIEKWGLTELQAAKFASLQLDKNYAPISKKAARNILYFLKRGINYNMAVILGGVKNSLEEKWNGIDETDIQYIINSVLKIYSKNKVLGFLPQLTAFLNEEMQLDHFQIKKLYGVKHTLEHSKTWAKFPLDKNTDREIYNLKNPLLITAVFQLRKVLNELIDTYGQIDEIQAELSADVKLNKYQRYLFRLDQRRRASLRSRYIELLGERAENIIPLNLTKFELWEECKQTCPYTGSHISLSDLFTDTIQVVYINPWRNSLNDSHWNKTLCVRSFAEKITDSCPYDYFNTHEPEEWSTVLKRAARLFSNTKEFPSSYRKFKRFIKKHNYRNPLKHQMRDSNILSKDVMNFLTRVVPEVSVAPGQATVHFIEKWRLQHLFHSEVYENPNGDFRFKALLAYINANRSTAYLETMSQQNKYLSVNQRSSFPIPYEGFRDDLEYHIYSIRVSHKQERKLISTRKHTFKQGEKVYENFCLSVRGSLHKESVYGKRKSPEDQQEAFHLRKPLHLISTLKQVIKIVDPHVRAAVLEAIDLAGGFQGDKVPRNAFFGFDKEGFSVPKVFMPNLKGDPVPVKSVRIRESLTGVVQLKEELNQYVNLRNNHHVLIYLNKKQEYCEDVVSFWEVVRRARFKEPIYQLPEDGYQFITTLKINDTFLLDLEETKIVLKEESNSFLAKHLYRIQKLSSKFYEFRLVHDNNLTDTNAPNYIRINNFGHRKTGWHTHNPIKVRLNSIGELSFENEQEEFLKMQKDYV

SEQ ID NO: 9391 - protein, 1140 aa, unidentified
  REGION 1..1140: note = Description of Unknown: Cas Enzyme sequence
MPNLLGLSIDVNGIGWALLDQQSLQIKAMGSRVFPVGCENFGSGKRELSKKAHKRFKRTTRYRYQRSRKRKIKVLEILIENNMCPLSKEGLHEWKENKKYPLNELAEWFSINPYHLRRKAVMESITPFELGRILYQISIHRGFPVSERNRGLKENAMYVGLPQMDRRGINHTQDNIENSSLGVYLNHLLPQENVSYQYSNERVRNRFLSREMYQNELDNIWTFQHQFHDFLTLELKEKLIGNEEEVSPNKGAVFFQRPLKSQKFRVGRCEFEPTKTKCCVSSLVYQQVLAYRWVNSLKVNGVSLNESDRNLAVDFFMTHRRFDFGRVKRIFQNPEGNYSIKDEELIKGSFVNASLSHYSIFGDEWFDFSEKDQEDIWHALYFFDNKEKLKSYVMDRWYLGEERASKFSELQLDKNYAPISKKAARNILYFLKRGIPYDLSVVLAGVKNSLGVSWDNIAESDINFVINRVLTLYKENKVQGFIPNLKHFLEDEMQFSSIQIKKLYGQFNVKEVKLQSKFQVDKKTDKEITNLKSPLLVNAVFQLRKILNDLIDAYGPIEEIKAELSADLKVNKFQRYLYRLDQKRQQRLRSKYIALLGERKENITPMNLTKYELWEECKQTCPYTGAHISLDELFTEAIQVVYIQPWKFSLNDSSWNKTLCLKTFTENILEKSPHEFFTTNAQMDWDFVVKRAARLFSNTKDFPAGYRKFKRFVKKYNHRDPLKHQMVDSNMFSKEVMCFLSKVVPNVTVAPGHVSEHFIEKWRLHQLFDSDVFENPQKDFRYRALLAFINANRTKAYLELLAEDNKYITLKTKKVFPEPYTGFRDDLEYQLHSILVSHKKENRLMTSRRHKIKAGEKHFSNYCVSVRGSLHKESVYGKRKPQNEQEEGYHIRKPLEYIQTEKQILKIVDPVVRNSVLEAVMNAGGFQNDAVPKNAFFSTNSSGYKVPKVFLPNKQGDPVPIKKVRIRETLTGAVQLKTNLNQHVNLRNNHHVLIYLDQQDTYQEQVISFWEAVRRKSSNEAVYQLPPDGALFVTTLEINDLFIMGVENPSVDLTQESNSFIAKHLYRVQKLSSKFYEFRLVHDNQINETESPNYIRINNFGERKTGWLTHNPIKVWMNSIGKLEYKDEFNLFDKAQKTYV

SEQ ID NO: 9392 - protein, 1143 aa, unidentified
  REGION 1..1143: note = Description of Unknown: Cas Enzyme sequence
MKTLGISLGVDSVGWSLIDSNKRVEGMGVRIFASGVQNLGMGEREVSNKASRRGVRLVRKAHFRTQLRKQLLLHFLIDHNMCPLSHSDVAQWKNQKIFPVQKSKEWFALNPYELRSKAIHEEISLHEFGRVLYHLAQRRGFSSVHSRFDPTLNTLKLGNPEKNTIGIHETKRKIRKNTLGQYLHSIQPEANTSYQKKSARIRNRYTERSMYIHEFNVLFESQKKYHSELTNAVKSKLGVGLDEKNTAKGLLFFQRPLKTKKHLVGNCPFERNKSKAPSSCPEFEMLKIYKWVNSIRYNNSPLSEEQKKLAIQVALKFTQFSFLKVRKALNKMGASDSFNYNDNDIQTLSHTLVLLSKPKFFGRNWFEFSEKEQEDIWHVLYFFKDKNKLISYAETHWGFSPSIAKELSEISLKTEYAELSRKAIRNIMFFLKRSISYELAVILGGIKSSLGERWKRLEEGDIQALVDSVTSLYKENELYGFIPALQSHLRDEFQFSKKQIQKLYGITSQILDYEPLKLLPISAREDREIVALNKPLLVTAIFQLRKVVNQIIQKYGSVDQIKVTLLPELKASRYRRRIIYSERKRRRKDSLNIKQKVIDLGKNPTFLNITKLQLWEESKGFCPYTGSSIELEDLFTNKVSVVYIRPWERFLNDSNLNRALCKTHFKKHIEGQTPYEFFSSNSKYNWDTIKQRTAKIYSSSKTHPNSFEKFKHFVLIGNQNANYLTEINDQHHLSLEVQCYLNKICSNVLMSKGFVNNRLREKWNLDLPEKKERQTLLEDYRIHALHALITACSEPKFLNALAHYNRFETSSDPSLFPMPWSDFDNDVKEALDKVIISHQKKDKIVTRTLHKIRKRGILYRNQGVAARGRLHKETYYGKRTTASGEAFHLRKPLEAITTLKHINQIVDPVIKKLVFNRIQYLGGFIKGKIPKNAFFITTKTGKKTPKILLPNRNGDPVPVLKVRSRVILGNAVQIKSEGNKYVNPRNNHHVLIYEDLVGNLQQDIVTFWEVVERKRKGQPVFQMPNDGKKIITSLQTNDCFILGMEDKSIDWNNLDYKTIKDHVYRVQRLSSYFYEFRRVFDANITSVTYPDYVRILNFGTYKTGWKTHNPIKITINAIGEISKYEVLSKSSLHIDTSNVVLNA

SEQ ID NO: 9393 - protein, 1122 aa, unidentified
  REGION 1..1122: note = Description of Unknown: Cas Enzyme sequence
VKQILGLHIGSESIGWALIRQSTSPRIVNMGTRIFSSFVSYLGEGDREISKSSLRTQTRNARKLYLRKMYRKQNMLSFLAQHRLCPISSNELKKYKKKNLRPSDHIKMKQWFALNPYELRAKGIERKLTKHELGRVLYHMSQRRGKSITNLSKNTKTLLEGLPAVNRIGIQETQRHLKDQSLGSYFYDLLPEKNKTYQYNNVRVRNRYLYRDMYIKEIQTILEVQKRQHKFLDDSFINAIIGDDNNKGILFYQRPSHYRKLRGVASTCQYEKNKKTMWHSHPINEWYNIYCWIDSIRLNGEPLNKNQRKKALHVASHFSGFMFKKVRVALGVEDQFALNYDDTAKIFLANTISHLSRTTAFGKNYLFFTDEEQHEIWHDLHFYSNNNLLIERLETRWGLPLNKAQAVAAIKLKPGFGKLSMKAARTILYYLRQGYPLNSAIILGGVKNAIGQSRWDSLDKETIANIDYFVQSAVEEKEIDYPEWISDFSTIFDIQLNPQKLYLIEQHRDEDSYSITPDNDREIIRKFKPVAQKPVFELRRLINNLIREYGNIDQINFVLSNDVKTNAKNRKATTISRKIREQELPKIYDAVVDEGQNPTHTNLFKYKLWLEWNKTCPYTNTPISIEQLFTDEVSIVYIHPWERFFNDSDRNKALCISSFKENIIGKTPYEYFIAQPSGVWEQVKTRVLEQLLNGSAKHGPYFKFKHFIASTYIKDNVYREFNDQHPMALKLKKYLSRISPEVVAARGNATSSLRRKWGISTLKEFNRKARYLSSRETATIALVTALNKPEFLEELRYWNRYEPLPYRGVFPTPWTQFNRDALYAYQTMSVSVEANHQVVRRIAQKSNDTVHLAPKGKLHKDSYYGKRTSPKGNDAFHIRKSINSLSTAKQVSKIVDSSIRELVYDQIDLSGGFVNGKIPKYALYMPTEMGWETKIFLPNKRGDKVPVRSVRMREKVSNAVQLSKGNNIYVNPRNNHHVLIYRTIDNEIQEHVVTFWEAVQRIRKSESLYQLPSNGRMIISTLHINDCFILGLSNKEIYDRINNGTSLWEHVYRVQRISSKYYEFRHVYDLDVYDQTYPNYIRILNFGNRKTGWLTHNPFKVSISMLGDITPFYKLLKVPEMH

SEQ ID NO: 9394 - protein, 1178 aa, unidentified
  REGION 1..1178: note = Description of Unknown: Cas Enzyme sequence
MKKILGLDIGVNSVGYALIENDNEGKSLNIIKTGVRIVNEDPDFHGNFYQGNSASKNEARRTKRMIRRGNQRFKARRDALYRNLRKNSMFPSDQLLNRVDEATLYRLRSMAVSERISLDEIGRVFIHLNQRRGYKSSRKSGKNTEEGSYLARIAELGELTKDITIGQFWDAYINFKSNNLDKIPIVLLDWFRLRTETEPSFRIRENIFPRDSYISEFDKIWECQASFYPTVLTGMPGKTFKENKGTLYQKIRNEIIFYQRKLKSQKHLVSDCSFEKGHKVVPKSSPFYQEFRIWQQINNLEVTDQSNNLLRIESEGRKRVFDALHDPDQLTKRNTMPYTAVLKLLGYSGRSYHLNYNMLEGNKTYFTFFNALKKAGIEQPGRYLSFDNTQKIISTGLYDLWHITYSLDDESDVIKSLVKRYGFTYTQAEIIANEVGYTSDYGSLSTRAIRKLLPYLERGKNYYEACVAVGYQNPEHVHREEFKIHLDRIFPNSLRNPVVEQVLNQVVNVVNGIIDTYGHIDEVRVELARDLKNNAKQRKELTQKNRNLRKLNDTISLRLKQEHGFSRVSGSDLLRYRLWDETEKRCLYCGQNITVTQLYNGEAEIEHIIPWSRSFNDAMTNKIIAHSKCNRDKDQMTAYDFMASKGEAELGRYVTDVNRLFTEGSGRLDSDKKVKITRAKTDNLLCKGSEIKGDFLARQLKDTQYIVLETVTRLKEVFPKVTTTTGSVTDYLKEIWQLKSLIDEMNIEKYRAVGETEWREEKDRENGLRKVERIKNWSKRDDQRHHALDALVVALTTQGIIQRINNANQLFETTREMKEKSFGFPAPAPDLRSKAMESLGEILVSFKKPGSKVLSRKINKINTSKGEKEQVTWAPRGSLHEDTIFGINRWYEKINVNKKLDEITASQIVGVEVRMAVLERLAEFKGDPAKAFKKPIFIGEKEIKEVTILSTRFTKRVPLSENLTTAQVGKIVDPIAKKLVRQRIDDKGGIKQAFRDYLNDPIWQNKEKGIVLKHVTVFDDGNLESVRDGYVYTKGNHHALIYADENGRYKDRIVSFWEAVSSCLVNLYTKGSIYPVIDRSNKDDLRFIFSMQINDLFVFDLDPEEVNFFDPANRALLGKNMFRVQKMSKGDYWFRHQYETTIQKSYDFAYKRITSMEKLKGAVKIRVNHLGDIIKIGE

SEQ ID NO: 9395 - protein, 1376 aa, unidentified
  REGION 1..1376: note = Description of Unknown: Cas Enzyme sequence
MKKILGLDLGTTSIGWAFVHEAENENEQSKIIKLGVRVNPLTTDEQSDFEKGKSITINADRTLKRGARRNLQRVKQRRENLIEILKSNNFITDETILAEQGNKTTFETWSLRAKAAQDKIEKNEFARVLLAINKKRGYKSSRKAKNEEDGQIIDGMAVALKLYNEKLTPGQYCYSILKNGKKALPDFYRSDLQAEFDIVWNFQKQFYADILTDDFYKKLQGQGMQNTRKMFLAIHKIYTAENKGTRDEKKLQAYLWRSKAISEQLPIEEVAFVITEINNNLNQSSGYLGAISDRSKELYFNKQTVGQYLYAQIQKNSHTRLKGQVFYRQDYLDEFEKIWETQKQFHSELTDDLKEEIRDVVIFYQRKLKSQKSLISFCEFESSQKEVLVEGKTKLITIGNRVCPKSSPLFQEFKIWQILSNLIIRNKNTKEEFQFDIETKQLLFNELNIKGNLKKEEILKMLVNKPNEWEMNYSTIEGNRTNAVLYEAFIKMFEMEGHEFDFSKSSALKIQETISSFFSAFGISTDILHFNALLDGNSFDKQPAYEFWHLLYSYEGDDSATGNETLYRLLESKFGFKREFAQILANVSFQDDYGSLSSKAIRKIMPFIQENKYNEACALAGYNHSLSITKEENLNRTLKSKLDILPKNSLRNPVVEKILNQMVNVINAIILDSSLGKPDEIRIELARELKKNAKERAELSQSINDAKNNHDKIFKELQTNFSIKNPTRNDIIRYKLYQELASNGYKTLYTNTYIPKEKLFSKEFDIEHIIPKARLFDDSFSNKTLEVRQANIDKREETAYDYVSNSLGTEALQQFVSRVESLYKEGKLSKAKYKKLLMKGSEIGEGFIARDLRESQYIAKKAREILLEICRSVVSTSGSITDKLREDWGLINIMQELNIEKYRAQGLTEQIEGKDGNVKEKIIDWTKRNDHRHHAMDALTIAFTKHNHIQYLNNLNARKNETNKKHGNIIAIEQKETYKDENGKRYFNLPLPNFRSEAKKHLEQILISYKTKNKVVTRNKNKIKGSSKVQIALTPRGQMHKETVYGKIQQYATKEIKIGPSCDIALLNQIANKKYRDAVLNRLQQFDNDPNKAFGGKNALTKNPILLVPDKPMPEKVKIVVMEDLYTIRKEITPDLVIDKVIDVQIKRILQQRLIEYNNDPKAAFSNLDKNPIWMNKEKGISIKRVTISGVSNAEALHYKKDHTGKPIFDAEGNYIPADFVSTGNNHHVAIYRDESGNLQEEVVSFYEAVARVNAGMPIIKKQHENGWQFLFTMKQNEMFVFPSTNFDPTEIDLLNPDNYHLISPNLFRVQKFSKVIYGNSAVRDYVFRHHLETTINDNKQLKDIAYKSIKSLSFFERIIKVRINHLGRIVQVGEY

SEQ ID NO: 9396 - protein, 1431 aa, unidentified
  REGION 1..1431: note = Description of Unknown: Cas Enzyme sequence
MTKILGLDLGTNSIGWAIRETDVFERELYYELYKSDKYEKFKDNPDFKKSNLDNEIVDFGVCHFEKGVGDGKSGEFSLAAERRKNRSKRRLYNAKRYRKWELLKCLIDHDMCPLTSDELKLWSVGNWVEIDGKWKNKGRIYPINNGDFQRWLAFDPAIFGDKGLSDKGNPIRKNPYDLRCELINRKEENEYLRKLKTGRALYHLAQRRGFKSSRKNGQSTYAKNEDIEKLKSENPDFQIALLAKEKLDEGERFRASGVIQRKYLEDEFYAICEKQEIDQDLVEILHKAIYFVRPLRSQKGLVGNCTLEKGKPRIPISHPKFEEFRALQFINNIKWREKGSKGFVEIPISLKKKILEELFFRKLSSGKNKGKISEDNYFKFDEIIKKYSENGTYEFNYKNLPDVSTCPTIASLMNVFQDEWSDCFIQDENRYGINWDGLSIVYKVKYGSKVGENRILKIDEIWHLLFDYIQTKDNQDALEIFCKEVLGFDENKAESFAAIDIPQGYGSLSYKAISKILPFLQEGYIYSEAVLFANLKSVLGDKFEDNMEDAKKIIAETIKEVLQKKEILNIVNGLIQNYFSKAEISHAKGVDKFIKDLAWQETNNRLEQYFGVADWNKKSETEKEKLEQKVFELYLRFLNGEQKDDEKASAKGIKVPEIDYYKLPRLDIAIKEQLKTQFKVSDKALNLLYHPSDIEMYPVSKTEIKGTDIKLLESPQPPSKGWKNPMAMRTLHELRHLVNYLLKIGKIDKDTKVVVEMARELNDANKRWAIETNQRYRKEENKEFAKAIVGVVKQKYPNIKENDIENINRIRLWWEQIDNNEEIYRQIKSLKEDVEKYRLWKEQDCVCMYTGKLINITNLFDGTQTQLMHTFPRSISFDSSLANLTVGDAFYNNEIQGNKIPTQLPNYKNDITINGRTYTAIEPRLKKWQDKIQHLRDLIDDNKRRTKKTQDVETKNDLIRKRHLLQFDYEYWQKKVDTFTLEEVPLKWKNSQLVDTEIISKYARAYLKTVFEKVDVQKGTTTDSFKKIYQIKGEEQKDRSKHSNHAQDAAVLTLIPGSAKRDAILEEYYKSLEKKEKYHIKPYESYVSAHIIEIENNVIINHIPHDKTLTPTIKHIRKRGKKTGKIAQGDSIRGQLHDATYLGAIKPNVYNKNGRAIKDDQTGKYLNLQSNGENIIWVVLRKKIDKADIEAIVDEALKKHIKNQLEKGIKITEVKDFAGKIIRHVRVKNFSPTYDKALKVKPHIYTSKHQHKSLYLANNAANYLCLFYKGFNEKGKEMRAFRFISLFELSKLENKKMDDIIKNPEYNQYVKKKNKKEYKFHLNNIFKVGQKVIMFKNSIDEIDKQNVEDLRNRIYQIYKFNNSGTDYIFLQNNIEARNETDLKEAGYNIDGETKFIPTTYQPRLKLKADNFNCLFEGIDFEIKPDGTIIFK

SEQ ID NO: 9397 - protein, 1122 aa, unidentified
  REGION 1..1122: note = Description of Unknown: Cas Enzyme sequence
MSTKLGLFVDSNSINWSLVEEKTNKLIDLGVHVFPPGCENFGMGKREVSKRYTRRLVRLRRICYSRIRTRKYYLLKILIEHKMCPLSLEELEHWKKTKQYPTATLSEWIALNPYELRERGLHEKLTLEEFGRIFYQISCHRGYRFGERNSKLADNVLSLGIPADRKIGYLKTRRSIKDETLGSYLHSIKPADGETYTKPVERIRNRICTLEMYFDEIHQLWEIQSAFYFSLTQELRDSLIGSPTDIDPQGALFFQRSLKSQKHKVGNCLYEPKKTRCCISSLTYQELEAWKWVNSIQYNNRPLEIEDVKKVVHYFKTHYRFNFKEVKELLGLDFSKNFNYRDEDNFRGSFINSELSKKKYFGKEWFSMEEKSKEDIFHALYFFDSVSRLEAYAMDKFDFGPNIAKQFANISIDKNYAPLSRKASTNILYFLRKGYEYKTAMYLAGVRNATKESWNKFSYVEEEEFIQVILNLYRDTPVAKLIPELKRLLEEVFQFKGFNPAKLYGLSITGSSAGKNRKLSVDKNADNQILALKNSLLIQSIFELRRVVNQLIVEHGAVDQISCELSVDVKVNRMQRFMHKLDQKRIAENNKRYILHLKKESIDLTPMNILKYELWEECKRTCPYSGKEIPLELLFTQHIKIVYIHPWSRSLNDSRMNKTLCVAEIADQLKDRTPYEFFESHPANEWESIKTNCASIYSNTHYHPTSYKKFKRFVKKYNYREVVKKQFNDQNQLSRSVAGILSQATDSVQMIPGNVTQHLIDEWLLKTIFTGQDSKNDYRFNVLKAYVNAVASPVYIDHLIQRNKYERLVRKVKFPFPSSGYLEELEEKVNTILVSHKQAKKVITTRSFWRKNDSGKVKVSAVSIRGVLHKDSLFGKRKPPNKLEAMHIRRPLRLIKTVSQAEKIVDPVVAQLVRKRVNKKWSGQGVFPTNIFFDNFERKEPKPKIFLPNKKGDPVPIYNVRMRETISNPVQLKEEKNCYVVPRNNHHITIFKYAEGEYQEEVVTFWAAVNRFRKEEPIYMQCKKNEGEVITHLHINDFFLLGLAEGVAIKTLSMETLFKHLYRVQKLSSKYYEFRSAHKQISNLFEFPDYIRINNFGERRTGWKTYNPIKVKLSFTGKIQLE

SEQ ID NO: 9398 - protein, 1473 aa, unidentified
  REGION 1..1473: note = Description of Unknown: Cas Enzyme sequence
MAQYIFGLDIGIASVGWAVLSEQRIVDLGVRCFDPGENEKGLPHNQKRRSARVARNRLHMRRWRLRQLLQLFCDVGIIDQPNPQLLAAPPRAKGEPEAGPWQLRAKGLNVPLEPLEWAQVLYHLVKHRGFEFFRKSEIKSSSSSDATSKAAAEPQSPPAGLEEADVDKEKQRLTQALEDSSRLLDKYRKVLDNPNLTIASLLIWLAQDTYVPGAPSPDEKDRIQSFRNKAGSYRHAFYRAVLGQELRALFGAQIKHGNAYTTLQLPKDGQYLRQMLATYGESGIPVGGASRNVGQTFQEAVFDLFELQHPPLYAEQIREMVGECELVEGQPRAPKNAFSAERATWLEKLNHLKVRRNGKEDFLTPSERACLMHLPYAHRVVTLKLVRETLMAHTDFPASWKEASFKAASYQSRPSSGGAWIFIASLGKEPLSLAKWADNKERKERLKKAKEMLAGGVVTFQQLRQQLGLEASERFTCKLQETTVIPRAQESTEHIPFAQKEEGLLIPGQSFRYIPADGKPKAFPKPKAWGLLAALRSHAAPTLADWRAALVLLPNMQGSWQFEHSVQINTAVEQDAEAQTVVPLQFEDAQAVEKDHKLVELKGWHALAKALPGRREQFESAFKDPCSEVGKKAAKDLDHIAATLTECQTDHEIALKLTKLGYTQLEIEALQEVSFSTFRNLSFAAIGKILPHLEEGHVYSEACKLAGFSHSEKNMTRTRRLPPLETYIFQRYRHGKLTGHVEKRYKELRNPVVARSFNQARLVFNALVAKHGSPAYVHVETARDLARSKKLRDKISREQETNRKRTEVLRSDLRNWLGQEPSSTHILKMRLYNEQGGKCIYTGRDLSSEQMLRDEEYVEIDHIWPRSKTFDNSLDNRVLVIAGANRNKSDKIPYEFLDGANESAQWRMFEKRVLACKGMSAEKQRRLLSKSLEDADEFLARNLVDTRYVTRLFSNMLRERVIFSEDAKPEELEAISPDDDGSVRWSRYQRARVRSPQGRLVDFLRGKWGLARVKDREASDLHHALDACIIAACTPRVIGLVNRYFAEEEIDPGRHGFKRNADGTYTHRATGEILSKAAAKERGLYLPAPWDSFHRDLLNALNQVFVSRRPKRKQTDELHDANPKSIRYIPVPLVDLTEDMLSDQRLRGVTGRRRKNYETLRTALQAANGDAIAAFSQGHEIDGVNGKTQRISSIPLPVWSLPKSYLKKLPKTNSKHPKGSASEEKTSRRSVALTDLTKKMLTEFYLGATFYHRNRELIESLKAHLGDKVARDAFAQPFRPPGGTKKGEPRPIIRSIRLPETQGSGMLVRGGVTGMGNSIATEVYWVEGSGYFFRQRYAVDEEATFGQEKPPANAQHFFNLRIDEPVQVVMKDGTTFPASRPGYFVGYEADKRMTIRVHDRPGKGRKKSKETGDEVNDGQAEESPASIIDGEKSGKDSTLFRFSVSGIKKLRKFKVDALGNYRELHAHLHHGLA

SEQ ID NO: 9399 - protein, 1238 aa, unidentified
  REGION 1..1238: note = Description of Unknown: Cas Enzyme sequence
MKILGLDLGVTSIGWALIEKNNENGEIDLIKSGVRIIPIETKDANQFISGNTASPNIERRKKRMQRRMYFRKKKRNQSLIKTLIDKGLWDESLINIEKNKLWELRNNAINEQISLSELGRILYHLAQRRGYKQMRIEQDESDANSKSDYKKNIYTRYQIIKNENITVGQYFYRQLKNNEHYRVKEQIFPRKAYEEEFEKIISKQKEYYTDILSEDFVNKIQHIIFYQRPLKSQKHLLGVCTLEGKTIKIKNDGGNIIEKFVGPPVVAKTNPLFQIHRIWQTINNITIKNKKTYKMYELSIDEKYKIFNELQVKDSLSIEQLYKILNLSKDEWYFDKLSKNGIKGNELLALIRKALKNEFFSPDIFKLDIKIINYQKQIIDKNTGEIKEATLEIIDPNVVNEPLYKLWHILYSVVDKEECMKALKKNFNFSTSAADKLSDINMTSLKYGSLSLKAVRKTLPYLMKGMIYSDACQIVGYNFSNAISKDENYIRPLKNKIPLLPKNSLRQPIVEKILNQMIHVVNEIIDDNNGLVSKEERENGNFAIHIELARELKTSKKEKQGITNAIKRNTKENKEIEDILKNEHKLTPTRKLIEKYKLYKELSPKGTNILQPQCIYCGEFISLTDALTGDAIDVDHIIPQSKLFDDSRNNKVLVHANCNRTKGNMTAYDFMQNKSQDQFKNYLALVEKLKEKKSISYKKYKYLLMSKKDIPQDFIDRDLRISQYITRKAREICMDISKDVLVTSGTITARLRELWGYKDIISEINTELINNIELSDENKSQLDEIFKNKRSDHRHHAIDAITIASTTRSIIQRINTLSSVESKEKINEYLKQLNQETLDTVYNPNEKNLRLLHKYLANQPHPSREQVKQSIKDILISFKPGKKVATYSKRIVYIGNKPKILQTRILTPRGALHEESYYGRIALSEFKDLKYAIDNVNLIVNNHIRSQIMNLLVEYNNDTKKLWNDIKKDKVLIYSDINNTNPIKDVKCYKYEYVIKKSVNGEKVDQKAIDKKIKDLLSNNKTKKDVIYFNEVKKIPIHSVRVITGLDNNSMRAVRCNHDGEPITFVKLGNNHHIAIYKDKNEKYQEHLCNFWHAVERKKYNIPVIIEHPDKIWDQVLVNPDKYQQEFLNKLPDPSWHFVLSFQANEMFILGLSNEEFDQYINEKNYAIISNHLYRVQKVSSFYYMFRKHTDTSVDELDYLAKIKMFKRVRSINALIRENPIKVRINYLGEIIDYKKTF

SEQ ID NO: 9400 - protein, 1066 aa, unidentified
  REGION 1..1066: note = Description of Unknown: Cas Enzyme sequence
MAYRLGLDIGTNSVGWTALTIDADGQPNGVLGQGVRIFSDGRNPKDGSSLAVQRRVPRGMRRRRDRYLDRRDDLMEALIAVGLMPPDEAERKGLETLDPYEFRAKALHDPLTPHELGRALFHLNQRRGFKSNRKTDKDADNSKIQPKIDELRHRISQSGAMTLGEYLHKRRLKGKMVRARPEAGFYPDRALYEDEFNFIREGQTPHQSLRPEQWDQLEDIIFYQRPLKPVDPGWCLLEDGERRAHRALPLAQEFRMVQDANNLRILVPGEPAKRLTQEQRDRMLKDLRTKKELKLEQFVKLLKLPSGARINLLDENRKVLKGDETASRLKDLFGKTWPDMKIARRTEIVHTLIETEKAEDIQRIAQAEWGLDELAAKKLATTSLPEGYARLSEKAITKLLPIMEEQGLNYSEAVAEVPEYGHHSDFRPDAALDTLPYYGAILTRQVVGGDVTKPKDDAVAHYGRIANPTVHIGLGQLRRVTNALVKVHGKPKEIVVELARDLKMNKEEKDNARKTNRENEIKNRRREEQIVASGGILSAHLQRKLRLWEEQVFGSINVCPFTGDPISFALAISDATEIEHILPFSKTLDDSMANKVLCLREANRAKRDRSPHDAFYSNPKIGKYQYDYAAILLRAEALPPNKRWRFHVDAMERFVNEKEFLDRQLNETKYLSRIARTYLAHLYNEKAEGRLCVRAIPGRLTAMLRGKWGLNALLGDHNRAGGDASDGPARKNRDDHRHHAIDAFVIAMTDQRLLKAISDLNSEADRKRLIESVPLPWDGFTPDALRPHLERIVISHKPDHGALGDKSKTTGSLHNDTAYGLIAPGKRGNWKVVSRSALKGVTKKAELEGIRDSALRAALETLWDDVEKSGGKPGDFAKRAEEEGVVLGGRKMKVRRARMTEELNVVQIKDRKTGKPYKAYKPDGNAFADIYQLPNGRWTAVVVQRFDANQPDFDPVTFRPHPAAKKIIRLHIDDMVALEDGGRRRILRVVKMSGQTITMADHLEGGALKARDADKNDIFKYTSRSASGLKDVGFRKVGVDEIGRTEQFGQLAFLRNRVDRDDPGST

SEQ ID NO: 9401 - protein, 1060 aa, unidentified
  REGION 1..1060: note = Description of Unknown: Cas Enzyme sequence
MDTSNNFNPYVLGLDLGSNSIGWAMIKLDENDNLCGIEKVGVRVFEAGMEGQYESGKEESRNKKRREARLVRRQIERRSRRYRKLANLLQKIGLLPDGNMNNSLERQNILDNLDKELRSKYIDANLPESEKNRLNQIFIYYLRSLAVEQELEPYALGRVLYHLGQRRGFLSNRRGQKQDDEERGKVKQGIAEIRQEMEKLGAETLGRYFAKIDPVEKRIRGRWTARDMYEQEFYAIWEHQSKYYPEILNDTNKKQVFHVIFYQRPLKSQKEKIGYCQFECIARGAQRNRRRAPWVILKAQRFRLLQKLNDLLIIENKFTKRALTEDERTLVIDYLEKNGDATFAELKKLLKLPKTIKFNLEEGGEKKIPGNRTTGAIRAVIGDLWDNMSAESKDKLVEDIYSIVSNKALKKRLINHWKFTEEQAEKLSDMGIEDGYCNLSRQAIDKFLPGLESGTPYSTLVKEIYGMDDIDTTVELLPPLESAPIGEIRNPTVTRTLSEMRKIVNELVKRYGKPKYIRIETARDLRNTKKEREKIWKNNRELEEVRAKIKKDLISKGISNPTNDDIERYMLAEECNWVCPYTGRSISFHALFEESQFDIEHIIPLSRCLDNSFKNKTLCYHEENRNRKHNRTPFEVYGTNETQWDEILRRVEKFNSRYVAEKLRRFKMHGEELDEFIDNFSSSQLNDTRYSAKEARLYCALLYGKEYRKHVFTVSGPTTAIIRRMWDLNKILGSPEKNREDHRQHAIDAIVIALTSPAMIKSISEQAEKIPKDTRKHDRWWRFITPPWNTIFNEAHEKVLNIIVSHRPERKVSGRLHEETNYSPPKPGDKNGETVVHVRKALASITKGEIEEIVDPIVRDVVKKTLEELGGDPKKAFNDPANYPLMPNKKGLHIPIRHVRVRKKLSVFPVGKNERVRYVATDENHHIEIFETKDKKGRTIWDANVVSMYTAMQRKRRGEEIIQRKLIRDGKVVEDAKFLFSLCKGDMVYMKNSDGEFEYYTVVTVSEYASGSKVMFFIQHFVAKRPKSWVGLTRYPTTLQISEAKKCSINVLGEVQIAHD

SEQ ID NO: 9402 - protein, 1382 aa, unidentified
  REGION 1..1382: note = Description of Unknown: Cas Enzyme sequence
MKKILGLDLGTTSIGWALVQEAEKENETSKIIKLGVRVNPLSTEEVKDFEKGKPTTINADRTQKRGIRRNLQRYKLRRKNLIDVLTQNNIIDENSVLTEEGKNSTFETLSLRNKAPKEKIGEEEFARILLSINKKRGYKCCRKAKSEEEGKMIDGMSVAKELYENNYTPGQYTYQLLLNHKKYIPDFYESDLKNEFLQIWDFQKQFYPALLTETLFNRLENKNQIWAICKGPFDLKGISHKGSAEEKTLDKYKWRSEALTTQIDLETLAIVLQEINQDINKSNGYLGAIGDRSKKLYFHKMTVGQYLYKQLTTNKHTSIKNQVFYRQDYLDEFEKIWETQAKYNPKLTATLKKEIRDIVIFYQRRLKSKKGLINICEYEKKTIEMVKKNKIKMKVVGPRVIPKSSPIFQEYKIWQNINNLVFTPKNEKKNHLDLDVSKGTLTAIQRTNLFEELNLRGTLKISSVLKILGMKSKDWKCNFKEVEGNKTNHALYKVLQQIAKDEGHGVDWDKKSATEIKEELLILLTKTGIDPNIINFNINSEHPEKQTSYQFWHLLYSAEDDLKTNKEDEAIYGKNSVGLKKKLHLKFGVPVAYTFLFANVILQPDYGNLSCKAIKKIIPHLQKGLEYSEAVKLAGYKHTSSLTKEENLKRILKDKLEQLPKNSLRNPVVEKILNQMVNVVNQIIEHYGKPDEIRIELARELKKSAKDRKEMISYILKATKRNQEIKRTLTKAPFNLKHPSKNDIVKYRLYKELKPLGYKTLYTDKYIEPHMLFTKAIEIEHIIPKAVLYDDSFSNKTLAYSEVNLKKSKMTSYDYIDKTDHKNLEGFIQRVHDFYGKGKNEVSKSKYLNLLTSLDQLSHDFIERELKNTQYIAKKAKEILFDICREVHTTNGKITDKLRNDWDLLNVMKELNLPKYRKIGMTVIEERKNGNTVEQIIGWSKRNDHRHHAMDALVIAFTSKSLTQHINTLNAKNDQQSVKSIMINKKQEVKLKTNGLYVLPMPNFRTEAKLHLEKILISFKSKNKVVTNNINIIKIKKGTLKKVQLTPRGKLHKETIYGHSKKEIVQKEKIGSSFTLDKIHTITQPKYRAAVLKRMAEYQNDPKLAFGGKNTLRKNPIVLDDGTKMPIMVTTKSFQDIYTIRKGIGPDLKIEKVIDPKIRKLLYKRIEEHNGDRKAALSNLETEPIWLNETKGIAIKKVTMSGVSQVEALHTKKDHRGKVILDANKNTQPVDFVSTGNNHHVAIYRDPEGKLQEQIVSMFEANARVNQNEPVVNKNFNKEIGWEFLFTLKQNEMFVFPNEEFDPNEYDLLDEKNHYKISPHLFRVQKLSTKNYFFRHHLETTVELKKELKNITYKPQLGLLGIKGIVKVRTNHLGNIVQVGEY

SEQ ID NO: 9403 - protein, 1033 aa, unidentified
  REGION 1..1033: note = Description of Unknown: Cas Enzyme sequence
MKDYVLDKKTEPASNDKFLSGLVFGFDVGTGSIGYAVRRGSEFKDVGVLICDSEGSDLSKRRDLRRQRRTLRSKKFRRQWFAKELAKLGLPKSESALDDPITLRLRALNGEKVKPEELHAALTHLFKRRGYSKVPWANVEKAARETAKPKNDDDERKIKEAVKEMKVKLGDKHPCQFLAEEKARVGKSPTTNWARKIYWPREVLRDEFLAIVAAQNKNFPQLAEKADWLLYGDSRSKEKNGETFHVFFKATEARNPGVLGLRWPRFDNRGPALDSLQPVDEQGRPLHVVRKNKEAFTKAQWELALMNFRVLDAATRQKRDPRVDFPIFIENVRNEWNKKGKVTEARLKKLAEPFKDKFLLIEDQKPLTPETGSGRARYSSPTLNLIRNEINEGRRVDPPQPILRRNGENAQQALNRYLADIKHPAVRHRLALFLGILKQLIKAHGQPDIIVLEAVRSLALGQKAKNELNKRNELFRKERENAREQLLSNHESISRKAIQRYRLWQEAKGRCPFCLQTIERTDLGRGADIEHLVPRAIVDCNEFYNLTVAHIKCNRELKGDRTPLTAFGGTAQWEGIKANAENCFTGRKLEIFLSPDAEQLIEQKSDLQHTAYIARVIRHISLIQLGWLNDAGRDPTPEKQNPALSFQVTNGQLTSRLRKAWGLNQILHPLPPGKRWDELTDEEHIQFIEKNRGDLRHHALDAMVIATTLPWLAHRTYGATDEFGRHGWWTQDEKQRSKAVNPLFPNEGQMHDVVKKEIERVVVRHHVSRSNHQQAYATTLYAKKAKDTYVAREVFTSLTPKNLGSIWPETFALYCEAAWRRYADESPNIEGELKRTKNCVPENFTRKLCFSHFQKWRQDDCPEFYWPKEIKIPIRNVRLISVKDDTAVIPFSPGTHAFVKRTGFKEVQIFLAEDERSFVPVFVPYWKNDKLICDKPIKQNTKPVAIIRRGQTIEIKKALAAGSPPGKYRVVTTMQAQVKLVPAHLQNKPETLVAFGMKSFGANPPWPDFIRALGYELPHPPSVKPQSESPHQA

SEQ ID NO: 9404 - protein, 1453 aa, unidentified
  REGION 1..1453: note = Description of Unknown: Cas Enzyme sequence
MNSKLICPIAIDLGAKNTGIVSGSITDKAEFSFKGAVISVDDKTSWSMTDRTARRHQRRGIKRRKMAKRLFWLILLHEYEIKYKNLTVRQQEAFNGLFNRRGFTFASGGDENKERDEIIKSSEIEIINIFENKVPELFADKKGDLLDRISQNQKLPESIPFFEHKLDKSVFRDWAKESNLIEDSEIEELSKSFEKTYKALKDYYQSALREQMGSKHRREYLVEIKKDIDTYFKNEDLSFSRLFEKKVDSEKLYRLIGNISNLQLRVLRKYFNQPEGGSKEKLHIDIWDKEKLRILIWRWIESWHVDKNEGEIRQYRSEMQSNRNLKKGGNIISFLTEISPEKTIPPYEDQNNRRPPECSSMHLDAEKLDKLFPGWKELCCVIHANFKTDIDMGKIYSDDTCREVNIENSKELCLLLQRYLDRSMRLDSLEIRKIVSKNEKERKNYISDKIESVLGNNLTKLLYFDLAPKYYSEIQDARNGLWDELNHNSILKRCGKNPPHKNNISHLLVGNILQHDFDEKSYMKFIDECWKTPITGRTTLSSMCVKIEDIRKRYGNSFNEFYKELLVSIEIHNKNVKNEKKIIEFKPSDGIEQDIYDVYKRIKPASEVISKYLCHDSSVSEKYSNPFTLAQLSNIIDKDIHGFSKDCKICSYENKWRMQLNKYTTEDKTDYCANAVRLSSDTVRPFDGMMARILDNQAEEIVKLKIKEIDEIIKTNSKSDLVIPVCIEQNSFNFTSDLADIKRSSKRKDLLKRKEASQKREEEYFTNKEQRIIYASKGLCPYTGEQLDVKGEIDHIIPRAKTKKISNTIIDHEANLIYCSRKGNQIKKDKEYSLSNLNAKYLNNLYGTANTKDIETQIETSIEKIKKLRQTFVFTDLSENEQRDFRHAFFCDKLKDSLLDYLANQIKARVNGTQAFFAKLIIRKLRKHLESKGLRAEFIVIKIPSSKEGGVSFIRKKIAELRADIAKQPIQPIYSHIVDAACVLYLSFNENEIFNKISAPVVFKTTDDISLFEEILPKSFSIEKGEKRKIYERETKIDFSSVQIFKDGIFAEHFVPVIINAEGLSFGFNLKNRSICVKNAELWFNEIKDYLNLKDIYRDKTIEELVVLSVNGFIQISFDKTKCLELLQKASRDVSLYSENESKVKILEGLRYTTARMNLEDIVFLKNNKKITGIVEALKTDLFTFKVNFKSLGKDFGSFHELQLILPSINEAKDFHTLIKRTCDITDGEIDYSELFIKIYDEKFNNSQQSISCRKQKTRKTSLPVIAAPSGGFRLRRKNKDDSSIYQLVASNAYVSGFDENLKNISIAKHFSKSRNIALISEFNNFENIKTSISLNQWITVEPFEPYIDIIDEIQACPGTKSRFYIVLKLKNETFLRDMVTKEYLNSISGNILNVYGVMKKNDYKSDFFKGSLDKPRETIFIKELSDDYIKLRYEAEGRKIKDLYLKSLKNGG

SEQ ID NO: 9405 - protein, 1381 aa, unidentified
  REGION 1..1381: note = Description of Unknown: Cas Enzyme sequence
LQKYKTNIMKKILGLDLGTTSIGWALVNEAENNEEKSSIIKLGVRVNPLTVDEQQNFEKGKSITTNADRTLKRSMRRNLQRYKLRRENLIEILKENGFITDETILSENGNDTTFETYRLRAKAAIEEISLEELARVLLMINKKRGYKSSRKVKSNEEGQLIDGMEVVKQMYENNLTPGQYSLSLLKKGGKNLPDFYRSDLEAEFDKVFDKQMKFYPDILSLDLKEELRGKKRDAVWAICAKHFKENGFELVGVKRQGKIAEQKEENYEWRTKALSEKMELEQFVIVIQQINIQLNNSSGYLGAISDRSKELYFNKQTVGQYQMAELDKNPNYSFKNQVFYRQDYLDEFEKIWETQSKFHKELSADLKKEIRDVVIFYQRPLKSQKGLISFCEFENKQVEVEVDGKKKIKTIGLRVCPKSSPLFQEFKIWQVLNNLSVNGEDLEQEEKEALFAELSIKEKLTKTEVLKLLFENHKDLDLNYKEVEGNRTQAALFKAYQQIIELSGHGEYDFSKMSYSEVMEIVEPVFKGLGYNTEILHFDSSLEGKEFEKQPAYQLWHLLYSFEGDNSKVGNEKLVNKISTLYGFEKEYAKLIASVTFQSDYGNLSTKAMRKILPYMKEGSEYSVACEYAGYRHSKKSLTKEELDNKVYKEKLELLPRNSLRNPVVEKILNQMINVVNCIVDTYGKPDEIRIELARELKKSAKEREEMTKAISQVKAEHDKYRAILQNEFGITNVSRNDIIRYKLYLELKDNGYKTLYSNIYIPQEKLFSKEFDIEHIIPQAKLFDDSFSNKTIESRSINIEKGNLTAFDYVKEKYGIQGLSDYQTRVEDLCKKGLISKTKRNKLLMQEADIPSGFIERDLRDSQYIAKKAREILEDLVKFVVPTTGAVTDRLREDWQLINVMQELNWDKYDKLGLTEYYQDKDGRQISRIKDWTKRNDHRHHAMDALTIAFTKRSIIQYLNNLNARSDKSGSIYGIEQKELYRDSHGKLKFNPPIPLDEFRAEVKHHLENTLISIKAKNKVTTQNINITKRKGGVNKTEQQTPRGQLHNETIYGSIKQYVTKFEKVGSDFNAEKIVTVSKPAYREALLRRLQEFNNDPKKAFTGKNSLEKNPIFLDKACSKQLPERVKTVSLETVYTIRKDVSPNLKLDKVIDANIRKILEARLKEYDGDAKKAFSNLDENPIWLNKEKGIAIKSVTITGVSNAIALHEKRDKDGKLILDTDGKVQPSDFVSTGNNHHVAVYRDAAGNLQENVVSFFEATTRLNIGLPVIDKNYKSDEGWKFLFTMKQNEYFIFPNKEVGFDPNEIDLLNPDNYALISPNLFRVQKIAIKDYSFRHHFETTVDGKNDLKGITWKRCSLSGIIGIVKVRINHIGQIVSVGEY

SEQ ID NO: 9406 - protein, 1798 aa, unidentified
  REGION 1..1798: note = Description of Unknown: Cas Enzyme sequence
MKKILGLDLGTNSIGWALIEIDHEKRVVKIIGLGSRILPMDAGEIKNFESGSTKIKSSAAIRTEYRGNRRLNERYLLRRDRLHIVLDLLDALPTHYKLEIDFTNKKGEKCGQFKTNKEPKLAYLPKQKGEKAKFLFMDSYQKMLNDINDEKVKNEKHKRIPYDWTLYYLRQKALSEEISLDELAWVLLSYNQKRGYEKTEVEDKSTKDTEFVEELDLRVLDVFEKEKEGKKYFEIHLDGNDKFTYNEYSDIQMTFKDDLKEVVKTSKVDDEGNIDKQKTEYKIIDIYPLKIQKFDYEKIETQHVYTLTYQNGWVETQSSKKNNNFRYKNALNKSYDYIVETLYDNKGNLKFQQGKERKLREPDFGDNSSDWTLLKKKTEKEALAFNSNNGFLYENGDVKKFISPKIYNILKNDAIKGIQTKIIGGIFQVVDRDFYREELNQIIDTQRKIHTNLKDKEIFEKCVKTLYPKNEKHRESLLANKETIRHLLVEDILLYQRPLKSKKSEIADCKHEIRYWKNVEDKNGNPIEEVDVETGEVRIKKEPVYIKVISTSHPCFQEFRIWDKLHDLKLIQLEKEVNGKLSTNQDITKDFFKSSKEYQELFDEFNNRKSLNQDQFLNYCKKKFKIDYNQKNSNFAWNFPEDEELKGNETRVSFATRFKRCGFSNYRDFLTLKKELELWHYLYSVNYRERTANNKKSIRTFFNTYFKNFQIEKEVKEKIINDFSNYPKFASNYCSYSEKALKKFIPIISLGERDNEYYWTSEKWYKDWQATLEERKLEILKRLKNIDFNADKPDYSKVEHTDIDLSKGELPFPKGLFNVFREFSEPEDFNKLNLTRASYLIYGRHSELAFAKYWQSPEQIRKELHQELKQHSLNNPVAEKVLLEMMQIVADIWEYYGKSAKDFFSRIHVEVGRELKKSAKEKEAETKRMSSNKSQNKRLRQILEDFLTNQAYNANPNNSDHFERLKIAEEGAEHKSNIDKKFYEENEKLKAENITKKDIDEILKKTRITQQEFEKYKLWIEQGYRSPYSGRMIKLTDLFDGKKYNIDHVFPQASITNNSLSNKVVVEVELNKLKGDKTGREFIQQQNGQEYLGIPVCTEDEYVEIVKSQFSGTKRYILLSKEIPKGFISSQLNTARHIARKAMELLSHIVREEGEIEFRSKNVLPVTGAVTSELKQAWKLNEVWTELVSPRFIRLNKLTQSNLFGEWQKSKNGHDYFDCNLDQTIRDKNEAYNIKRIDHRHHALDALIVALCTEEHVNYINNINANAKSDDYGKQKQIENYRKKLKRKIMFSKKDDTDNEKDWYYMLPGEKRMDNAKNSDRSSVIEVSYNFKEHDTFHSDYRKMILTALQHTIVTFKQNLRVINNRVNYYQAEPNTKKRVAQEPKTKKDINNSSNKYNWGIRRSLNKETFYGKRIVNNEERRVGRELLNITFKKDKIKKVSDEKVKQILLKHLSQFDTVEIPFEEAIIYFDALLEKEEFEAIINDNDENIKTNSELIDYLKNNKFKYKKTDYSKLNVFIDKVKSRDFRQELQFKDKIKENPEIAFTPEAIEKMNESEEIKRLNNGENHKPIKKVQIWQSFGKERPLSENQLSVKSKQYVVTAADSNLYLGFYERTYRDENNNQITDRKFQDIGLTELIEHLKQETSKRFNPLPNGIFDNEMNKYNWKFTLSPLDLVYVPTKEEIDCPELVDIENLTKEQIERIYKYVDGSENHANFIPYSASTPIWRFHGDKIKKQIFDELNEKNKLSISEKDLIQNEFGLGSQQDKNQNMIDGKTQIKKICWKLETNRLGQIKKVSR

SEQ ID NO: 9407 - protein, 1821 aa, unidentified
  REGION 1..1821: note = Description of Unknown: Cas Enzyme sequence
MKRILGLDLGTNSIGWALVEIDHEKKIVKIIGLGSRILPMDAGEIGDFERSGKIKSTTAQRTEKRGPRRLNERYLLRRDRLHLVLDLLNALPAHYKLEIDFTNSKGEKCGQFKTNKEPKLAYFPKQKGEKAKFLFMNSYKEMLDDINSDNVKNEKRKRIPYDWTLYYLRQKALSKKISLEELAWVLLSYNQKRGYEKTEVEDKSTNDSEFVEELDLRVLDVFEKEKEGKKYFEIHLDGNDKFTYNEYSDIQMTFKDDLKEVVKISKVDDEGNIDKSRTEYKITDIYSLKIQKFDYERIDAKNKYTLTYQNGWIETKLTANYFNFKYKNALNKPYDYIVETVYDNHGKFKTQQGKERKLREPDFGDNSSDWTLLKKKTEKEALAFNSELGLVHKNGEVKKYISPKIYNVLKNDAKNGAQTKIIGGMFQVVDRDFYREELNQIISTQKQFHTNLADRDIFEQCVKTLYPKNENHQKSLLENKDAIQHLLVEDILLYQRPLRSKKSEISDCKYEIRYWRDIVDTETGEIHPKKQPVYVKAVSTSHPYFQEFRIWDKLHNLKLIQLDKKVNGKSSTNQDVTKDYFKSSKEYQELFDELNNRKSLNQDQFLTYCNKKFNIGYKSKSNDNNFVWNFPAEDEIKGNETRVSFATRFKRCGFSNYKDFLTQKKELELWHYLYSVSYKDRIANNKKSITTFFNNYFNDFEIEEKVKEKIINDFSNYPKFKSNYCAYSEKALKKFIPIINLGEYKEYSWLSEKWYKNWQAVLEVRKLEILERLKKIDFNTDKPDYSKVEQTNVDYSIGELLFPKGLFNVFRDFNSQEEFKELNLTKASYLIYGRHSELAFAKYWNSPDQIRKELHQELKQHSLNNPVAEKVLLEMMQIVADIWEYYGKGEQKFFSRIHVEVGRDLKKSAKEKKAETKRMSSNRAQNKRLRYILENFLKNQPYNANPNNSDHFERLKIAEEGAEHKSNIDKKFFEENEKLRTEKITKKDIDEILKKTRISQTDFIKYKLWIEQGYRSPYSGKIIKLTDLFDGTKYNIDHIFPRASVTNNSLSNKVVCELEINELKGNQTGREFVNNPKKRIVSCAAHKTTGDKEGLTEILDDQKYVALVKQHFYDKKRYILLSKEIPKGFISSQLNTARHIARKAMELLSHIVREEGEVEFRSKNVLPVTGAVTNELKRAWRLNEVWTELVAPRFIRLNELTQSNLFGEERDSKGHKYFDCNLDKTIRDKNEAYDIKRIDHRHHALDALIIALCTEEHVNYINNINADAKSDDFGKQKQIEKYRQTLKRKIMFTKKDETDNENNWYYMLPGEKRMDNAENSNRNSVIEMLYHYKDFDTFHSDYRKMILTALQQTISTFKQNLRVINNRVNYYQAEPNTKKRVAQEPKTQKDINKSSNKYNWGIRRSLGKETYYSKIDIGERENKKLITKSNFFFNNIDAIVNPDLRNQIKKVKDISVSEDDFKQNLKNNFKNIKVECISYKIAGRFNNELDSTFNSDKIKKIVDLEGNTKKILFNHLMQFDTIELPFEEAIIYYNALLEKDEFEVIINNNDVNIKTNTELFNYLRNNKFNYNKVDYSKLNVFIDKVKSRNFRQELQFQDKIKEHPEIAFTPQAIEKMNEKDELKRLNGGKDHKPIYKVKTFEGFGNQRAISKDTMSIKSKQFVVNDAGTNIYLAVYEIDDKTKISRKNSIRLFREISIFDIIEFQTATNSNNLPIEKFIFNDEGEKYNFLFTLTQNDTVKINYDNSDIIFAFNRYSKGDVYFRPINHAYEIYKYEVDLRIDKDTGKLGGSQVNETTSFNGKQIKNICTKLNINRLGEITDKK

SEQ ID NO: 9408 - protein, 1852 aa, unidentified
  REGION 1..1852: note = Description of Unknown: Cas Enzyme sequence
MKKILGIDLGTNSIGWALVEIDHEKGVVKIIALGSRILPMDAGEVKDFESKGKIQSSASQRTENRRARRMNERFILRRDRLHLVLNLLNALPKHYKLEIDFANAKGEKCGHFKANKEPKLAYLSKYKDQKAEFLFKESYQEMLNELGIGNKKHSRIPYDWTLYYLRQKALKSEITLEELAWVLLSYNQKRGYEKNEVEDDFDELSKKLEEFGLTKTTQAAININKIEIESLSLKVINTVKDKNSLGEFYRIELDNGYSYNEYSNKVLTEVDNDIDEVKIIERLTILNDEGNYIDTNKTIYKIEDIFNLTVREVVQKEKDKYIKFYTNGWQTETKYNDFKKFKTKGEFEEDIFVTRLYNEKGEIIIPSKKNDELILKKSDNPFVDFKLLDPNKASNWKLIKKKVEKDALKFNSQNGLIDEKDGKRIIKKYISPQIYNTLKKDALSGNRTKIIGGMFQVVDRDFYREELNQIIETQKQFHNELKSKELFEQCTNALYPKNESHAKALLTNKTAIQHLLVEDILLYQRPLKSKKPEIADCKHEIQRWVDVLKKDGSPIEEIDKETGEIKLKKQPVYLKVVSTSHPIFQEFRIWDKLHNLRLIQIEKEINGKIETNVDITEDYFTPDTYEKLFELLNNHKTLSQSKLIEFLKPKFKEKKEDYKNFVWNFPEDEEFKGNETRVSFAIRFKRCGFTDYAEFLTQKKELDLWHYLYSVNYKERTANNNKSATTFFNGFLKVSDDNPVVADDVKEKIIKDFANYPKFVSKYCAYSEKALKKLLPLMRLSNKKTTDFWTTEQGYAKWQQSLEERKEEILKRKTEIDFKQDDIDWGKHTDNFAKVPFPKGLFNAFESFEKIEDFTKLNLTQASYLVYGRHSELAQAIHWNSPQEIRKNLHHELKQHSLNNPVAEKVILEMMQIVAKIWETYGEKEEETDDYKKLFDKIHLEVGRELKKSAKEKETISKNQSANKSQNKRLRQVLEEFLSKAPYNAIPQNNDHFERLKIVEEGAEHTKNMNRKFFEENEKIKKAKITKKDIEDILKKPQITKEDFDKYKLWIEQGYRSPYTGLTIKLSDLFDGNKYNIDHVFPQASVTNDSLSNKVVCELEINKLKSDKTGREFISVYGEKEIYCSAHNSKVKINNDNEYVDTVKTQFSGPKRFILLSKEIPKGFTNSQLNNMRHIARKAMELLSHIVREEGEVEFRSKNVLPVTGEITSKLKKTWRLDQVWKELVAPRFIRMNELTQSDLFGQWQTSKQGQKYFDCKLDDTIIEKDESFDIKRIDHRHHALDALIVALCTEEHVNYINNINADAKSDKYGKQKKIEKYRETLKRKIMFSQPNKEDPKEKDWFYMLPGEIRKQDAETSSRETVFEKTYFYKELDSFGQDYKAMILTALQHTVVTFKQNLRVINKTVNRYKNSPNTVVKQNTDNGQKPNWAIRRSLGKGTYYGKIDIGERENRQLLKNIDFFYNNIDTIVDKSLKQQIQEIKDKSLSEEDFKNKLKEKFKNITIKCIAYKAASRYNSNLETFSSNKITSITDKINSISDKGIREILFNHLKQFDTVELSFEEALQYYDAVLEKQELQAIITDSETNFKSIQDFATFLQSNKYTYKKVDYSKLNVFIEQVSKRDFRNEEKFKNSVIQHHEIAFSPEEIEKMNKPENLKRLNNGKNHKPIRKVRTYTGFGNEKRISSNVFSNKYNQFVKMDKGANLYIAIYEIEDKSKVSRSSPIRIFKEISLFDLIEFQKSANTFDLPIEERICNEVGEAYKFLFTLTQNDCIKFTSNDKEYFYAFNRFTGGDIYFRPINHAAEIYEAEVDLKINPKNKKLIGSQTNETTSINGEQIKNICWKLKVDRLGNISKW

SEQ ID NO: 9409 - protein, 1436 aa, unidentified
  REGION 1..1436: note = Description of Unknown: Cas Enzyme sequence
MKKILGLDLGTSSIGWALVNEAENEGEKSEIIKLGVRVNPLTVDELLNFEKGKSITTNADRTLKRSMRRNLQRYKLRRENLISILKDNNLITHESILTENGNRTTFETYRLRAKAATEEITLEQFARVLLMINKKRGYKSSRKAKGSEEGTLIDGMEVAKILYNEHLTPGQYCLQQIKNGKKYLPDFYRSDLQQEFDKIFEKQMTFYPELLTKDLQRELRGKKRDAVWAICSKSFKEKGFELVGIKRQGNSAEQKLENFVWRDKGLSEKLDLEQLVVVLQQINIQVNSSSGYLGSISDRSKELFFNQIAKSDGSTRAQTVGEYQMAILKNNPNASLRNMVFYRQDYLDEFNTIWEKQAEYHKELTEELKREIRDVVIFYQRPLKSQKSLISFCEFESRKVEITVDGKKKIRTIGSRVIPRSSPLFQEFKIWQILNNIEVYGKGRKNRKQQEPSLLNISEDPLKNSGKRKLYQEEKELLAAELTIIKELKKADVLKLLFDNHKELDMNFNSIQGNSTQAALFDAYKQIIELSGHEVDYEKKSANEIIKAVEEIFSGLGFNTDILYFNSDKPLDEQPMYKLWHLLYSFEGDSSKTGNENLINKIKELYGFDRESAKILANVTFQDDYGSLSARAIYKILPRMKQGEDYATACAYIYNKHSKNSLTKEELEKKVYKDKLEILPKNSLRNPVVEKILNQMINVINSIIDNYGKPDEIRIELARELKKSAKEREELTKSIAETTKLHEQYKSILSKPPFNLQYISHNDIVRYKLYEELKENGYKTLYSNTYISPTTVFSGDFDVEHIIPQSRLFDDSFSNKTLELKSINIEKGNKTAYDFIKEKYGETGSENCLDVYLIRIEDLRKKGVISKTKYNKLKMQEKDIPDGFINRDLANSQYIAKYAKTMLGELVKFVVSTTGSITDRLREDWQLVDVMKELNWEKYKSLGLTEEITNGEGQRIRKIKNWTKRNDHRHHAMDALTVAFTKRQYIQYLNNLNARRVSDYQGISNAEKEEHDNFSIAAEDVILNTRDVLGIEKKYLYRDDKNKLRFKPPIPLDEFRAEAKHQLENTLISIKAKNKVTTKNINITKKKGGVNKKEQLTPRGQLHNETVYGSHKEYVVKEETVSAKFNSEKIALVANPEYRKALAERLQQFGNDPKKAFTGSNALSKKPIWLNELHTKQVPEKVKTVSFETIYTIRKEVSPDLKVDKVVDKKIRQKLETRLKGFEGDAKKAFSSLEENPIWLNEEKGISIKRVTITGVNNVESLHEKRDKYGNYVLDKNGNRQPVDFVSTSNNHHVAIYRDAEGNLQENVVSFFEAVNRRNLGLPVIDKNYKSGDGWKFLFSMKQNEYFVFPNEKTGFNPNEIDLLNPDNYSLISPNLFRVQKMATKDYTLRHHLETNVETNNQLKGITWIRTGLNGLLNIVKVRINHLGQIVSVGEY

SEQ ID NO: 9410 - protein, 1500 aa, unidentified
  REGION 1..1500: note = Description of Unknown: Cas Enzyme sequence
MKKILGLDIGTNSIGWAFIESNAYENPETLNGSIIQLGSRIIPMDADSMNKFESGNPESKAAGRRQARGARRLNQRYKLRRTRLIEALKILKWIPETFPTDFKKLDKHNINEYLPFSEKLKKEVADFFGISGMKTTKGDEYEISEDWIIYFLKVKAIHSQISLPELARILYHYNQRRGFKSSRKDNKFEEESTEIKYPLNEKWIEIVTVTSITETGKGEGKDRDYTFYELTCKTSDLEFTAIKKRKNPLDWLNKNIEVEITKKTTKDQKVNYTIAEVDQNAWESRKAALEKDIEKEHLTISEYYLQNIKKDRNYPIKQRIVDRKFYQDEFKLIWQKQSEFYQKEFDDKIKIAEIADSFYTYNKEKNKEIKGKDLFHLFFNDIIYYQRGLKSQKGLLANCQYETKSYKTKDGEIKEVGIQVTSRSSPSFQEFRIWQTIHNLKIIKKEETINNKIKINIDVSAEYLTPENKEKLFELFDGSAEVTHDSILRLFDFKKDKIENGEKTFDHKLNYPDDKNFIGNETKALFRKIFKKHNFIEEGEKYLSNKELFNQLWHIVYSLPEEKEIVNALNNKKYFDFPESIIKHISKLPEFKSQYASLSSKAINKLLPLMRIGKYWNSDDINKNTTERINKIIDGEFDETISDKVREEILKLNFGTVNQFTGLPTYIAAHVVYGRHSERANESKYETIDDFKIKEVIPYNSLRNPVVEKIIRETLSLVKDIWKNEKLGRPDYIHVELGREMKNNNEDRKKISEANIKNRVERERVANLLKELNYPNFNADSPSDIDKFRIWKENGGKEGEEIFDTLFKKSNAEFVKDADIEKYRHWAEQNYQSPYTGKAIPLSELFTEKYQIDHIIPKAKFYDNSFGNKVVVEAEVNAMKDNRLAIQFIEEYQGREINLTDGKKVTVLSLDHYKRFAEEVFTNKKKKRYLKLYEVPEDFIERQMNDTKYISKNIAQFLRPIAIGNETDEGVIYSSGSITSDLKNKWGLNKLWKEILKPRFERLEGILGEPLILPNENKEGDYHFAKDYKRIDHRHHALDALVIACTSRSHIKYLNSLSSLSNNKKDIAKYDEWAKWKYLLNKKKQLENQENGMTEFGAPWERFYLDAKEAIESIVVSHKPTSKLISKAINKYYKWVEVEKDKWEKKIHFQTAPKDDDKYWVAVRQSLFGQPLGKIHLAEYKKGIEIKAVIKVQIQFLNRENKNWNTEDWRIAKSVIRKQVDSLIRNFNGDEKAILKYLDNNPLKDEQGNKIENFDLLQFKKYASKRVTIDESFTKDKIANMPYSELEKNWLTRLLKQHLLEYNNDSKQAFKGEALETLYRKAPYPINKVTRKEGGQKIELNNKLLDGDKGVNQYFLVEIKKEIDKKTGEEEKNIRKYSTPNFLDCIERLAKGLPIHDESPDSKYVVLSPGDLVYVPEEGENLNQIDWNNKKKIADKIYIMKSSSTSTCYFLPMTVASIIEKGEFESLSKSEKTKEGDRVIKENFIKLKVDRLGNISPIAL

SEQ ID NO: 9411 - protein, 1286 aa, unidentified
  REGION 1..1286: note = Description of Unknown: Cas Enzyme sequence
MSKKILGLDLGTNSIGWALIEVNENNKPIRIIAMGSRIIPLNSDDRDQFQKGQAISKNQDRTIRRTQRKGYDRKQLKKSDLKKILKDLNIFPSEELMKLPSLDLWKLRSDAVTEDISAQQVGRILYMLNQKRGYKSARSEENQDKKDTEYVAEVKGRFAQLKERNQTIGQYFYENLSMANKNDSYFRIKEKVYPREAYIEEFDIIINTQRKKHDFLTDEIISKLRNEIVYYQRNLKSQKGLVSVCEFEGFETNYTDKETQKEKTVFVGPRVAPKTSPLFQLCKIWENVNNISLKIKNPEGSKYKWADRIPTIEEKKEIANYLFQNPTLTFAELLKILKLKKDNVYANKQLLKGIQGNITYSEIEKIVGSKSSLLNFDIQIIPGKHSSVLVDKKTGEVLAEEESLQANPALEKEPLYQLWHTIYSIKDLKECKNALVKRFAIDEVVAEKLSKIDFNKQSFGNKSNKAIRKILPYLMQGYDYSQACSLAGYNHSNSLTKDEQEKRLTADKLELLSKNSLRQPVVEKIINQMINVVNAIFEKHGKPDEIRIELARELKQSKDERNDADKRNSDNKKLNDEVANRLAELKLPATKRYIQKYKFIFPSSNRNLKDAQVANQCIYCGEHFNLSEALSGDNFDVDHIVPKALLFDDSQTNKVLVHRKCNSTKTNQTAYDYISKKGETQLNEYLNRIDDWFKKGIISYGKMQRLKVSYEEYLERKKNKKETEADKKIWENFIDRQLRETQYIARKSKEILQQICNNVTATEGTVTAKLRELWGWDDVLMNLQLPKYKELDQTIIKEWTSDHGKRKHQKEEIVNWTKRDDHRHHAIDALVIACTKQGYIQRINTLNSTETKDEMQKEIDAAKLKFGKNYDENILKETNEIVKNHSGKLTQLDEYIITEKSFTTAEVSKEAEKILISFKAGKKAATNGVRKVKVKGKKKIVQKNIIVPRGALHEQSVYGVIKVENKNKPIKYLLENPEKIISKKIRDLIESRLKENDNDLKKTIATIKKKPIYLDEKEEQVLEKASCYKEEYVIKYPIQNLKAKDVLFIVDEKIKAIVKERLELHNNKEKEAFKSTLWFNEKKQIPILTVRCYTGLSAVEAIKKDEQGKDIGFAVLGNNHHIAIYKDDDGKQVQHSCTFWNAVERKKYEIPYIVKNTHDLWNGLLGKELQQSFLDKLPPDNLELLFSMQQNEMFVLGLPQEEFDKAIQQNNKPLLSKYLYLVWSIADNNYWFRHHLETKNSELKSIMGAKESKRLYNIRSVGALNSLNPIKVRLNHLGEITKIGEY

SEQ ID NO: 9412 - protein, 1230 aa, unidentified
  REGION 1..1230: note = Description of Unknown: Cas Enzyme sequence
MKKILGLDLGTNSIGWALINSDSENNNNKILGMGSRIIPMSQDILSDFTQGNSISQTAERTQYRSTRRLRERHLLRRERLHRVLHLMGFLPKHYDEMIDFENHPGKFLPETEPKIAWSKNDEGEYEFIFKKSFEEMMADFKANQPELLTDGKKVPYDWTIYYLRKKALTQKIEKEELAWILLNFNQKRGYYQLRGEEEDEENPNKSIEYHALKVTHVEADEAEKNKSDIWYTIYLENGWTYRRSSKIPLFDWIGVTKEFIVTTELNDDGTVKIDKEGKEKRSFRIPSEDDWTLLKKKTETDIDKSKKTVGTYIYDTLLEKPDQKIRGKLIRTIERKYYKKELKKILTKQKEFHPELKDRNLYRSCVVELYPNNKAQQNNIRNKDFTYLFIEDIIFYQRPLKSKKSLISNCKFEYRTYKDKEGNIRKAPLKCVPKSHPLYQEFRLWKFVQDLRIYEREKKINGKLYIDYDVTNEFIKTKEDLVNLFDWLNKRSGIKQNTLLSSYFKVKKTNKTDKQLPYRWNYVEDKEYPCNETRFSIINRLEKINDLPDNFLTNRKEFELWHLLYSVIDKNELEKALKKFAAKNNLPINEFVDAFVKFPPFERDYGSYSEKALKKFAAKNNLPINEFVDAFVKFPPFERDYGSYSEKALKKLLPLMRMGKYWNYEAIDLNTRQRIEKLLTGEVDETIHDKVREKTSHLTDEKQFKGLPEWLAAYVVYGRHSEMSEYTKWNTYHDLNNYLQDFKQHSLRNPIVEQVIMETLRVVRDCWEKYGNIDEIHVELGREIKNPAEKRKKITKTITQNENTNLRIKALLIELANDGVENARPYSPTQEEILKIYEEGVLNSTIDIPNDIEKIVRKATPTKQELNRYKLWLEQKYRSPYTGEIIPLAKLFTPAYEIEHIIPQSLYFDDSLSNKVICESEVNKLKGNQLAYEFIKTHHGEKVELNFGKTVEIMSKEAYEKFVNENYRNNFFKRKKLLMDDIPDEFIERQINDTRYITKVVKSLLSNIVREEDEQEPTSKNVIVTTGQITNTLKRDWGLNDIWNEIIYPRFERLNRLTNSTLFGQWVNENGKRFFRTQVPLDLQKGFSKKRIDHRHHAMDALVIACTTRNHVNYLNNESAKSSNRETRYDLRNKLCKKVKTDDKGNYIWQFIKPWETFTQDAKIELENIVVSFKQNLRVINKTTNYYQRYVNGKKVIDKQTKGDHWAIRKSLHKDTVAGQVNLRFKKKVS

SEQ ID NO: 9413 - protein, 995 aa, unidentified
  REGION 1..995: note = Description of Unknown: Cas Enzyme sequence
MATVLGLDIGSNSIGWALLDNEEEKIVDAGVRVFQEGVNRDTKGSEISKHAARRAARSARRTRNRRNYRKDKLFRLLVRNGLLPQSKTELQNIFNMDPYLLRAKGLDEKLAPYEFGRVLYHLNQRRGFLSNRKSGKSKEDGVVVKSASAIQQAMLQEQVRTLGEYFSKQNPHEQRIRGHYTFRAMYEDEFEQLWQKQAAYNGHLLNDVLKKAIKDETIFYQRPLRWDPDTISNCQLEPNQKCCPRADWHARRFRILQTVNNLKINNPDGTQAELTEPQREILLKELYSRNEVPINSALKQKLRLLERQLFNVEEKAIADKEVKLKGDEFAAQLKKILGKKDFEKLEDADLIEINDALIDDSIDDADLISRLMDQYGFTEEQAKAVVNISLPQKYAAFSRLAIQKLLPHLEKGLLTHEAIEAVYGQPQAPKDIKVADRLGFPEDLRNPIVNKALWEVRKVVNALIREYGKPDSIVIEMAREVKGSQRERDEIRLQQWKQEQENKRAEEELKKIGIHKPSRDDIIKYKLWEECGHVCPYTGKPISQTALFGDHPEFQVEHILPYSRTLDDSYMNKTLCWVHENINKGDQTPYEYYAEKYPEQFEAILQRIAVLPYPKRRKFWQKEVELDKFIERQLNDTRYINRKVVEYLKTLGVAVRGSKGQITAELRHQWGLDSILNSELPGLKNRQDHRHHAVDAAVTAVVNQKHLHALAQSKYKRNDAAFAPPWESFRSDLEDRVNRINVSHEVTRKVSGQLHEETNYGLTGLKDDKGQDIYVYRKPLDALTPPMVGKIVDPVVRSIIQARLDEFGIRPGGKGTIPKEVWKEPVYMKSRSGVKVPIKKVRIRDVFNNMIILKDKEGKPYRAVAPGNNHHIEIFEYTDKKGNIKRDGIVVSMFEAVHRSRAGKPVVCRDYGDGRKFVCSLAKNEMFMLEVDGEYILHRVQKIIQDGRIVLRPHTFAGQVSDSDNPPFVQRKNYNTLQGYKVFVDPLGRIFPAKD

SEQ ID NO: 9414 - protein, 1124 aa, unidentified
  REGION 1..1124: note = Description of Unknown: Cas Enzyme sequence
MKQTLGLFIETESIGWSLVRDSSRSEIIDMGTRVFSSFVNHIGEGEREISNATIRTQSRNDRKIYLRKIYRKRQVLAFLAANGLCPLKSKDLVKWYKDKKPSIRTQIMDVWFALDPYEFRAKGLEEKISKFELGRILYHMTQRRGKIMSDIENKTKAKTLLEGLPVANRLGIHHTYDHLKNNHLGAYLNTIKPKKNKPFVYGNKRIRNRYLDRNMFINELHALLDTQQKYHSVLTDDFKQTLMGDDYSSGLLFFQRPAQYKRLGGGNMGCKYEAHKTAMHKSHPLQEWYDIYVWINSIRYNGNKLTNEQREKALSVALKFSSFMFKKVRSALEVDDADAFNYEDSTRMFLSHTLVQLSRIQAFGSRLFEFTQEEQHDLWHDLHFYTDKNKLKERLVYKWGLSKINASTVARLKLKSGYGSVSMKAGRVILPFLIAGHQTRAAAVLGSIKHAIGFEKWRQMSQEKIEAIIYFVEAAISDSSIDEKRWIADFQNTFGIKLPLDKLYVAQQHEGIETLPVNAEENSIIHREYKPIAQKPIFELRKIVNKLIQEYGPIDEINFVLSSQLKTNAKNRKAINIDKKIREQQLPKVLKAVTAAGQNPTHSNLLKYKLWLEWSKTCPFTNTPISEEMLFSEEVSITYILPWKRFFNDSDKNKTLCMRFLMDEIRDKTPYEYFKQQPSGIWEKLKTRVLEQLMNGSSKHYAYQKYRHFIMSIYAEDVVNKEFNDQHHLATKVKYYLSQVSPKVVAARGNSISSLRRKWGIRSLGAYENKPRHHSSREPALNALVTALNAPYYLEELRHWNRYEPDVYREVFPTPWNRFTQDVLNFYNKIAVSIDAENKVIRLLKNKKSEAICLSPKGKLHKDSFYGKRVGPDGNEAFHIRKPIKSLTTAKQVSKIVDHNVRELIYDHIDLNGGFENGKIPRNALITSTDTGWETNIFLPNRNGDKVPVRKVRMRENVSNAVQLSDGMNKYVNPRNNHHVMIYKTLDGQFKEHIVSFWEAVKRLRNNDPVYQLPDDGRSVVTTLHINDCFVLGMSDDEIKEHLDEGRSLWENVYRVQRISSRYYEFRHIYDLDVYNQTYPNYVRILNFGDKKTGWLTHNPYKISISLLGKITPVFNPLKVPEMQ

SEQ ID NO: 9415 - protein, 1364 aa, unidentified
  REGION 1..1364: note = Description of Unknown: Cas Enzyme sequence
MKKILGLDLGTNSIGWALIDKDEQKILGMGSRIIPMGTDKLDYEKGAGITKNADRRMARTIRKMNKRYKLRRNKLLFILNELGILPGQFQFKNGIPEPTKLQDLELLPIKKGTLQLTSLSHYQLRVKALTNEIAAKDLGKILYQFNQLRGYAGGSNNDGDAKKIKEETNEEPEKKKSYEVITQKATILNIEKSERTFKAKGGKNKGQELPLFNVTFLLDDEEKEGTTMLQSLEIGKEEELEIRIKQTKNGENIIVALPQKTNWKKQMEATEEIIKTEKLFVGQLLLRDLLNTKWAKVRNRVILRSRYQQEFDAIWEEQTKHHSILNNCSKEKLITIANYLYPGKSDTQNKLRVEAIEGGLKYIIKEQVIYFQRPLKSQTELISKCQFEKEEKVIPTSHPLFQEFRCWKQINQLYIRSKEGFYNERKGKTIYKYSDRYLTNEQKNEIYLKLQNQKQVGFSDVAKVVGLKNDKTEYLNGLNVKAKLKGCDTTIAIKKILGDDFNTIIKHDKEIVLKIWDSIFDLNNSGNEYDVNSKKVSSLINILKPSTDENNAITIALKLAQNINYPRKYASLSAKAINKILPLMQLNAVGTTDTIKENFENIKHAIATGELKEGIEPYMVDYINSNPNILETGGMMDSFGASLVYGKHTAADINATIKNYHDVKYNPNRNLRNPVVEQITNEALQVIKAIWKEYKFNPNELEIRIELARDLKNSAAEREKIYKGQLNNQKQNNRIKERLAEEKMPITDENFLKYKLYEQQKYVSPYSGDTLEISLFDEYEIDHIIPKSRLFDDSISNKVLVEGFLNKEKGNRTSWEYISQQNTKYKICSILPFIDMVNENYFGRKKKNLLLEKIPTDFIERQIKETQYIALAVKTELAQIVGSKNVKSSTGEITSFLRSRWGLRKLFMELTESRFKQMELWDSSNKWVNRYFDKEQKRNVYEIKHWSKRYDHRHHSIDALVVALTEQSDIQRLNNLNKELQDWLIVHKDEIQLETKEDETILEAFFNLEEKCREEIQKRIEGFRKFDSPLNDLINQARTHLEAMVVSHKPKDNLTIQFNDKTKKKEIKIRSALHEATLYGKHNGQDTKTMSISNLTAKDIEKIIDPVLKTEINKHRNKSEYGSMKESFSGEGLKAFNESRFQRKKPESLKPPVFKVKIYYNTKKVKESSLQRLYENNDKLSVKTGSNYLFLVMEKKGGKERVFDIVSLYDAADIAKSEWKNQTQDFKKKIYADYLTINKADKVLFALQQNELVYLPENIDDPILDFTPDRFAQWISQKENKSKFNKRVYKVVKFTGKDCFFIPHNYANTISIAKDLTDEQKEQLKKQYGEKKIPKKELNFEEFGSFGTSAKTEVNENFVKILID

SEQ ID NO: 9416 - protein, 1109 aa, unidentified
  REGION 1..1109: note = Description of Unknown: Cas Enzyme sequence
METRYILGLDIGIASVGWCLLGENRIIDLGVRTFDKAETPDKGESLNKARRDARLARHRLAQRAWRLKKLARKLKHHGLVDTTDFFQYTNPALVSLWHLRVQGLDRKLERDEWARVIYHLCKHRGFHWVSRAAEKQAEDDTKSEGGRVTTALKDTRKRIGNYRSAAEMVLYEFIKPAQAENGLPLFDKIGQPIPLGAARNKQGQYDKALSRVLLGEELTKLFTEQRRFGNPFSTQELEAIILGNGDCKSGLFWQQKPMQSVLHMLGKCTFEKDEDRAPKHSFTAERQIWLSCLNNLLIQIDGIRRHLTEQEKAVALSLPYQQAGDTYKKGGFTYKQLGSALIKAGLLPKDGFRFAGLSYPSEKQKTEGKAKDPESATLVKLPGWQQLRTTLKNAGLETEWEGLAAAAFDGQPEILDEIAKILSIYKDDDEARAELNKLPLPSHERMVEALLDIHFDKFHALSLKALYKIVPHMETGARYDEAVAAIPEYGHHSQLHKPGDGQYRTLPPLYAKRDKDGRMVFADDADIPRNPVVLRALNQARKVVNAVIRRYGSPMLVNIEMARDLSRPLDERNKIKKEQEAYRDRNEKSKAEFARHFGIIGAPRGGDFEKWRLYHEQQCKCLYSLRPIELERLLEPGYVEVDHALPYSRSFDDSKINKVLVFSSENRNKGNQTPFEYLQGSESSERWMLFESYVRSIYRHSNKANKLLRKDFGPKEAEEFKERNLNDTRYICRFFKNYVERHLKLADGSEAKRCVVLSGQMTAFLRARWGINKIRSESDRHHALDAAVVAACTHSMVKRLADYAQNKELAQIRGGFVDASTGEIIGKQHFPKPWPHFHHELEARLKIDKPEVLREEMARLGSYDESALEGLRPLFVSRAVQKRGTGAVHEETIRSAKALDKNKSSVKTPLEKLKLSALQNIVGASDPRNKALMDLLAKRLNDFDDDGKKAFAVPVRKPAKDGKGSIVKTVKVLTTQNIGMRVRGGVADLGDMLAVGVFKAEKQYFIEPEYLASAAVRISSPAMPPHAEFLFYLRKNDYLEIKLGDQTYRGYFVMYESDGRLTLRAHDQPKPDKAYFRKSVASAQDIRKFHVDTLGNIHPAKPEPHRGLA

SEQ ID NO: 9417 - protein, 1538 aa, unidentified
  REGION 1..1538: note = Description of Unknown: Cas Enzyme sequence
MRKILGLDLGTNSIGWAIVNAKPVQREDGTEYLKPESIEMAGSRIIPMDAATLGSFDAGNSVSQTAARTGYRGVRRLRERFLLRRERLNRVLDCMGFLPEHYSAELDRYGKFLSKEIEPKLAWRPSKDGKYEFIFMDSFNEMLEDFRQHQPDLLKEGRKVPLDWTLYYLRKKALSRPVSGEELAWILHNFNQKRGYYQLRGEEEEENAKQRVEYYSLGVVKVEESGDRRGDDVWYNVHLENGWIYRRSSRYPLDWVGKKKDFIVTTSLDDEGNPKLDKDGNVRRSFRAPNEDDWTLQKKKAEMDIDQSGYTVGEYIYNTLLINPEQKIKGKLVRTIERKYYKQELIQILQKQLELNKTLQDRELFERCLEALYPRNEAHRNNILCKDFVYLFVEDIIFYQRPLKSKKSLISNCPYEFTQYVDKETGEIIDSPIKCISKSHPLYQEFRLWQFIDNLKIYERTKTVNGRLCSDVDVTDEFLKDEEGYVALFDYLNDRASITQDVLLNKHFNIKKPKGKDAVYPYRWNYVEDKEYPCNETRATMLAGFKKAGIPAERLDYKMTEALWHILYSVSDKQELNKALAKFANKNQLGEDFVAAFAKTKPYDNDYGAYSAKAIKKLLPLMRRGKYWNYDAIDQKTAKRIENIINGEFDESLRQRVREKAIGLTEESHFRGLPVWLACYIVYNRHSESGDIVKWERPEDIDAYLNGFKQHSLRNPIVEQVILETLRTVRDIWKKSGSIDEIHVEMGREMKNPADKRAKMSQQAVINENTNLRIKSLLAEFANPEFKIDNVRPYSPTQQDILRIYEDFALSNLKQDDEDYEFVRKMSTTAQPTHNEVLRYKLWLEQKYVSPYTGQVIPLTKLFTSAYEIEHVIPQSRYFDDSFSNKVICESEVNKLKDKQLGYEFIKNHAGEKVQISMSNKSVEIFSTQAYEEFVKQHYSGIKLKKLLMDDIPDKFIERQLNDTRYISKLIKGLLSNVVREKLDNGEYEPEAISKNLIPTNGYITDLLKKDWGLNDVWNSIILPRFQRMNEITGRTCFTAINQQGHEIPAMPLELQRGFSKKRIDHRHHAMDAIAIACTTRDHINLLNNEAAKSGNSANRYKLSRKLRRYESIQIEKDGERKKVDVAKEFIAPWPAFAVDARDALNDIVVSFKQNLRVINKATNYYQRYDDSGSKVFAEQKAGDNMAVRKPLHKETVFGLVNLKLKKTVSLTEALKNPSMIVDRDFKYRVKQMFKAGLDAKIIKKELESDSSVANRVEVYYYTSDTNDRYYATRKALDSSFDEKTILNSVTDTGIQKILLAHLSRCDNNPELAFSPDGIDRMNRDIVQLNDGRYHQPIYKVRKYEKADKFAVGQTGNKRTKYVEAAKGTNLYFAIYRTEKIDKETGETILGRSFATIPLNVVVERLKQHLKPVPEVNENGDKLLFWLSPNDLVYVPTADEIESGHISEPIDKERIYRFVDTSSNNGTFTPYSLAKVLFSYSFNNQKKLNIDYPIQDELGLGSPRSKNNRSLTGEIIKDICVPLKVDRIGNILNQVNII

SEQ ID NO: 9418 - protein, 1033 aa, unidentified
  REGION 1..1033: note = Description of Unknown: Cas Enzyme sequence
VSKESRTILGLDIGTNSVGWAVLSHEGGMPTGVVAAGVRVFEAGLDELETDARGKSRNMQRREARSIRRRLERQARRTSRLANFLQTVGLLPLADIRDSAARHEFFKRLDCSMESPYQLRRRGISERLEPYEFGRALYHLAQRRGFLSNRRSAPKDEDEAGKVRQGILDLEREMASVGARTIGEYFASIEGGGTRIRDRYTGRHMYEQEFDALWNTQAGFAPDVLLPDLREKIREIIFYQRPLKSQKRFVGKCELEPKYRRASWEHLSAQRFRYLQTVNNLAVIDKSTGEVRALSSEEREAIIERLEATAEATYSSFRGRGGIPSLRGTVFNLERGGEKRIKGNRTAAQLAGVFGLERWRDLTEADREAVVEDVRSIVNDGALARRGQRKWGLAPEQAKRLTEIRLEPGHCAFSRQALDKLLPHLRQGAKLYDAIEAVPEYRERMNRLTEAVDELPSVLSALGDIRNPLVIRSLTELRRVVNAVVQRYGKPDFVRVELARDLRQTAKVRLELSKKMRQNEQARMRAAERIRKETGIQNPSRDDILKILLAEECSWRCPYTAEPFGIHDLLGRSPQFDIEHIIPFSRCLDDSFMNKTLCHADENRKVKHSRTPWEAYGRTERWEEIMGRVREFKGPGRWAKVRRFEMREAEHNAFINEFCSRQLNDTRYASKLAMRYLSMLYGGGRTQGVDAEGKRRIQASAGMITALVRHAHGLNGLLSRDDLKSRDDHRHHAVDAVAVALSDTRTVMRLTAAARRAEAYDKLFKDVEEPWPGFIGDIKAVIDRVIPSRRLSRRVRGALHQDTFYGARTVDGRAVVHIRKPLAALHKGDIDDIVDPVVRAAVRRRVEEAGGDVKKAFAADVEKPYLSGGGGIRIPIRRVRLAKNLVTFPVGSAHRRRHVTSDANHHITLFEVCAEGGGAVRWEGKVVSLFEATQRLRRGEPVVRRDDCNGGRFLFSLSCGDVIELDREGTGRALYVVRTVPQSKQIRFVPIHDARRLKEIPKSGMTAVPDSLRRRNCRKVVVTPLGEVRRAAD

SEQ ID NO: 9419 - protein, 1061 aa, unidentified
  REGION 1..1061: note = Description of Unknown: Cas Enzyme sequence
MRRLGLDIGSNSIGWCLIEDDTRIVALGSRIFSDGRDPKSGASLAVDRRLARGMRRRRDRYVRRRSVFLETLVELGLMPADADEARLVATHDPYALRARALDDALTPHEIGRALFHLNQRRGFKSNRKAERGQKDSESGLIETGARALDAAMQAAGARTLGEFLARRLGEGKAARVRLNGEAQAYDFYPQRAHVEDEFAAIWAAQAPHHPALLTDAARDRLARTLFWQRPLKEPKVGLCLFAGKNGVPGDEPRLAKAHPLFQERRLYEEVNQLAITEPGEPAVPLTRDQRDKLVMVLQGKREQTFEQLAKALKLQPGQSFNKASAARTKLIGNEVRAVMKDKKRLGDDWLHLSPARQWEIIQRVQDEEDKDKLHAFLTQDCGLSDERAQAVAKAPLPEGHGRIGETATRAILEHLKAGVIPYSSAVELAGWHHSDERTGEVLDRLPYYGELLSREIPPGTFAETDAANPEIYWGKITNPTVHIGLRQLEKVVNAVIAVHGRPDEIVVELARELNLSEEEKKKHQQRIKRDTEDAQRRGRMLEREGIADTGSNRAKLKLWEELAERPQDRFCPYCGTGGPIGIHSLFSDAVDIDHVIPYSRSLDDSAANKVVVHRACNRDKGNKTPFERWGHDAERWDKIAAQVAKLPRAKQWRFGPDAMQRFEVEGGFIARQLTDTQYLSRMAGKYLRSLYPETGEGSRKVQVATGRMTALLRRVWGLNSLLPDHNYVANPHSNAPKNRLDHRHHAIDAAVMAVTTPGLLKRIADAAARAEAQDLDRLFADLPQPWAGFREELGEKVNTVTVSHKADHGRKHPPAPGRDSTAGRLHNDTAYGLTGEMAADGKTPIVVHRVPLLSLKPADIASDTRIPDPALRQALADATRGKAGKDFEAALRGLAQAHPVFKDLRRVRVREPLSVIAIRDKAGRAYKAYKGDANARFDVWRLPNGKWVPDIVSMFAAHQPGGGDRRPHPAARKILSLRQNDMLAIERDGNPAQIVRVVKFSMNGNIVLAKDAEAGPLKARDADADDPFKYVYSSATGLKGLKARQIRIDPLGRVFDPGPRE

SEQ ID NO: 9420 - protein, 1374 aa, unidentified
  REGION 1..1374: note = Description of Unknown: Cas Enzyme sequence
VANEKIFLGLDIGSNSVGWAVTDGNYKLKKFKGNLMWGVHLFDEAQQSADRRMFRTARRRLDRRQQRIALLQELFAKEILNKDEKFFLRLKESALLPEDSDNRKHNIFFDNDGYGDKEYYAQYPTIHHLIVELMKNDESHDVRLVYYACAYILAHRGHFLFNVEKDNIEKITDFKPLYKKFYSDLTELCENPAFGENAEIMERVLKKHISVTAKDKELKQLLFGGKVPKDIGMIKYELLTKLICGGTVRLSELFRKEEYAELEKNSICVKNADFSDTLESLEGQIDELHFALIASVKAMYDWSLLVDILHGETMISKSKVEVYDKHKADLKELKYFIKTYLNKADYDAVFRDISDKANYVSYVYNASSDADRNKYEKCSQEDFCKFLKHYFDFDKITPLDDDKERFEKLKQKCEDNELCPKQVTTDNRVIPYQLYYAELKIILDNACKYLPFLNEKDEYGTVADKILKIMEFRIPYYAGPLVSGEKSANAWLKRKADGRIYPWNFSELVDEDESENEFIRRMTCKCTYLAGEDVLPKYSLLYSKFMVLNEINNIKVNGEPISVEAKQGLYHEKFVASKARVTKKRIKEFLVSIGEYSGEVEVTGIDDTIKSSLRSYHDFKELIKDGKIKEFDVEKIIERITVTTDIKRLKNWLEQEYIQLSASDVKYISKLKYKDYGRLSRRFLEEIIPVDTDTGEVLEEKNIITALWESNNNLMQLLSMGKGYSKAIEQFNNNYFDQHPDEKSISKRLKNMYVPTAVRRSITRTLDIVKELKAILKNAPDKIFIEMARGEGDTPKGRRTKSRRDQIIEYLDNSDAENIDELRDQLGKTDDGRLRSEKIFLYFMQLGKCAYTGKSISFDELDDNTKWNIDHIWPQAKIKDDSIDNKVLVDTNANGAEGDKYPISPDIRSKMSGFWHALYKKNMMSEKKYQRLMRSTLFTKEELSGFIARQLVETRQSTKAVATILKEIFPGSEIVYVKAGIVSEFRQEMNILKCREINDLHHAKDAYLNIVMGNVYNTKFTKDPLNFIKSGERYSMKLFKKDQSGKESGLLTGIVKRGDTIAWDPETSFDIVKKMMSKNSIRYVRYCYKRKSGQNGGFFDQNPLRKGKGMVSIKKDLPIEKYGGFDNATISFYTIADIRNKGAVLVAIELLYSERFENDVDFARKYIAEKLSNDMKTAIKPDEIDFPMKKRIVKINTVLELDGYRVLIAAKQNTSIKFVSIESLILDNNYIQYAKKIFSYLEKSENGKKYNINSYAGINLDSNIALFDVLVEKCRMKTFSKMYKELGEKISDSKELFIGYTLEKQAAILSNMIELLKTGRKTGVDLSDVGGKSHSGVKTLNTFLFKVKDYKTIRIIDQSPTGLLEKKSVNLLEL

SEQ ID NO: 9421 - protein, 1058 aa, unidentified
  REGION 1..1058: note = Description of Unknown: Cas Enzyme sequence
MPEMQKNYRLGIDLGSTSLGWCMLELDDNNNPKEIINMGVRIFPDGRDAESHKPLAVKRRGYRSQRRNLDRYLERIRKLITYLMENGFLPEDERERNEVFQVNPYELRSKALDEPLSPAEFARALIHLAKKRGFKSNRKSVSDSDGKKLKAAIDNLKDELQKTGDRSLGEYLWHLYNQKTGNESHLKASIKFRYKDEGPQTKSIFPTREMVISEFEEIWSSQSKFNPRLTDEHKERIRDIIFFQRPLKPTSKGNCELLPEYQRAPKAHPLFQEFRIRQDLNNMRVVDFDNETHDLTDEQYQKLFNLLDRKEEVAFTSMKKELWGKQADEYQFNLEVSDRKKLQGNKTYHAFHNKKAGQLSHWWDSQNKETISKVIEVLVSDYDDDDTLQKLAKLGVDNAVASRLLEISLPDGYCRLSIEAMQRILPFMRDRMVFSDACKAAKIDHSEEWNGEVFPDGNLPYYGEKLKRESIELNRKTGDKLADKHGKINNPTVHVALNQLRLLVNALSVRYGAPKQIVLELGKEARMSADKINELNREIRKNEALNNKIRKFLKDHDQIINHDNMLKVRLWWELGDDPLERRCVYSGDQICVTELFSHNIEIDHILPFSRTYDDSNANKVLCTHWANQNKGNRSPFEAFGDSPGWQDILSRANKLKDSKKWRFRSDAMKNFEDEGEILARMLNDTRYMSRVAMKYMWYVCGKNNVWSVTGKHTGLLRAKWGLNSALGESDAKDRTDHRHHAIDAFVIALTTRSLVKRVSEKIANTQFRKIEKLDPPWPGFSHDEFRTRVNSIKVSYKPDQINPRALASRNQTGGALMKDTAYGFIKDSAGNIMTDPNNPRNCLYTLRKAVTDITEKNWESIALLDHDPRRMELAEIANRYSGNSFKEAVKDWARRWNISKVKMVFSKNSRGMVAIKDKQGRVFKYMFSEEKLFSDIFIKDPKDENGKWEIEIVNSHNAHQPGFTPKWKREYPKGKLLMRVYKNDIIAIDSGHDTREFLRVRMMTKDALYLRLINIAKKPKELEDIGEKYSARKLQKLRARKAGIDIIGRVFDPIVNEA

SEQ ID NO: 9422 - protein, 1073 aa, unidentified
  REGION 1..1073: note = Description of Unknown: Cas Enzyme sequence
MKERYRLGVDLGSTSLGWCMLKLDDNNDPTGIINMGVRIFPDGRDMEKHEPLAVKRRGYRGKRRNLDRYLERIRALISYLLENGFLPEDERHRNEVFKINPYHLRAKALDEQLSPAEFARALIHLAKRRGFRSNRKIQSDKTTKITEGIENLRKQLDETGARTLGEYMWKLYNKNPDHPNQKTLKKRGVEAYPHKMGHHIDQPIKFRYEANPDNPNLIFPTRDMVQSEFNSIWNAQARFSDIYTEEHRQKIEELIFHQRPLLPTVKGKCQLLPEFDRAPKAHPLFQEFRIRQDLNNLKGINLFTNETFELSKEQYDTLYKLLSTKAEVKFEAMRNALWGKQHGDFRFNFETENRNKLLGDQTHAALHKKGNEDLAPLWDSWTMERKNKVIEVVISDLDDEPALVELTEAGISPKTAARLLELKLPDSYCHLSVEAMQRLLPLMRQRVIYSEACRQAKLDHSGEYNGEIFDSGNLPYYGEVLSRETIALNRKCGDAEADKHGRINNPTVHIALNQLRKVVNAITARCGAPEEIVLELGKDIKLGKEEKAHLNKIIDQNRKENEKIDALLAEHGLPVNHQNRLKVKLWWELGKDELDRRCVYSGHQISITDLFTHKIEIDHILPKSRTYDDNNANKILCIAPANHYKGERSPYEAFGQSRDGYDWQDIISRASNLKNSKRWKFNSDAMDNFKDKEKVLDRMLNDTRYMSRVAMKYMWYVCGNNRVWTVTGKHTSMLRGKWGLNTALGEDDSKDRTDHRHHAIDAFVIALTTRGFIKTLAKNIGSSRERFISELLPPWPGFDHNEFRKKVNSITVSYKPDQINADKLAKRNQTGGALVKETAYGYAGPDPDNPKYHLYTIRKAVSELTRKNIKNVVRADLKNELEQLASKFPDDDFKVEIKDWAARNNIKKVKLALSMNPAVMVPIRDKNGKAFKYMDSGENLFADIYLSKPTDPNCKWGIEIVGSYYAHRPGFVPQWKKDHPKGKKIMRVFKNDIIALDGPDGKRELRRVRKMTNSMLYLRPINIAKKPQVDSTGKQVSEDKGEAFVMSTLQDLNARKAGIDIIGRVFDPIVNEQ

SEQ ID NO: 9423 - protein, 907 aa, unidentified
  REGION 1..907: note = Description of Unknown: Cas Enzyme sequence
MPKTLGIDLGTNSIGLTLREENDFIWYGVYTFRKGVGEGKSGEFSFAAERTKNRSSRRLYNARRYRKWETLKVLIEFGFCPLSKENLNNWKHYKKGTGRTFPIDDILFQQWIKLDFNGDNIPDFSSPYQLRRLLITEKLDLSILENRYKVGRALFHIAQRRGFKSSRKSGANEKTAVYKGSNETKTIGRNEYENLIIEHGSLGAAFAFLEDQNMRIRNRYTLRVDYQNEVKRVIEFQKVKDIGFNDAIDKAIFYQRPLRSQKGLIGKCTLEPNKSRCPISHPKFEEYRAWSFINNIKYRNKDTNQFEAIPISIKEKLYKEKFFYVSKRDFAFKEIRKFINTNGGKDWELNYNIKMDEISVPSCYVSARLKSVFGENWETYQKEVTRTNKKGEIETIIYSIEDIWHILFNFEDEEYFIEFLSSVILLEEEQIKELSTLFNAFPVGYANLSLKAINNILPFLREGIIYSESVILAKIPEILGKKLFEDNKTEILQAIQEKVEQVRFQKTAVTITNNLIFKYYALDYDQRFAWKDNEYKLAESDLNDIDTASNEHFGDKTWSKLDLILKEELLYKVAILYQDFFASIKREHIAQPHLVNSVKDSLYQSFHISTKVLNKIYHPSQIDIYPKKEGQEFLLSPKTAAFKNPMAYKTLYKLKDVMNYLIDKGIIDNETKIVVEIARELNDSNKRWAIEKYQRDREAENIEFSNAIAELIKDPEFSGIASPNNNSDTDKFRLWIEQTENPEEVFKVVQTINKDKQLSVSQKDIQKYRLWKEQNCRCMYTGKIIRLTDLFDVNKVDFEHTIPRSKSFDNSLANLTVCYSDYNQKIKKNQMPTELLNYSDEWNGYSAIKPRLEDWEKKIESLKNQIETQKRNSRLAIDKETKDEAIRQKHLRQMQYDYWRNKVERFK

SEQ ID NO: 9424 - protein, 1055 aa, unidentified
  REGION 1..1055: note = Description of Unknown: Cas Enzyme sequence
YQELRLWKFIQDLKIIEREKDINGKLNTDVDVTIEFLKTEDDYVELFDWLNKTKEIKQDTLLSSYFKIKKKKGEEKLSHRWNYVEDKEYPCNETRAQFLNRLSKVSNVAENFLNKETEIQLWHLLYSVEDKLEIEKALKSFTVKHNLGGDFVEVFKKFPPFKKEYGAYSEKAIKKFLPLMRMGKYWQLDNIDEKTKLRIDKIISGECDETIQNRVREKAFKLNSIIDYKGLPEWLVSYIVYDRHSESGDISKWKTPEDLEAYLRTFKQHSLRNPIVEQVITETLRTVKDIWKNYGDFTEIHVELGREMKNPADKRKTMTAQITDNENSNLRIKYLLAELINHSDVENVRPYSPSQQEILKIYEEGALNNPDFEIPEDIAKIAKQSQPSKSELIRYKLWLEQKYRSPYTGEMIPLGKLFTSAYEIEHVIPQSRYFDDSFSNKVICEAAVNKEKDNALGYEFIKNNEGRIIELSFGKTVKIFTVSQYEDFVKQYYGKSRGKMKKLLMEDIPESFVERQLNDTRYISKVVKGLLSNIVREEGELESTSKNVISCTGGVTTILKQDWGLNDVWNRIVTPRFERMNELTKSNNFGQWTNKDGKKVFQTEMPLELQKGFNKKRIDHRHHAMDALVIACATRSHINYLNNESAKPSAKESRAGLKTKLCYKSKTDDKGNYKWQFYKPWNTFTEDAQVALENIVVSFKQNLRVINKTVNKYQVIENGKKVIKTQEKGDNWAIRKPLHKETVAGIVNLRLRKTVTLSAAIDQWEMLVDKSLKTKIKQLINEGFDKKKILKFFVEQENKWLGSDITKMELYYFSNDKEVLVASRVSLDTSFGAKKIESVTDTGIQKILLNHLANYNEQPELAFSPEGIEEMNKNMVAINNGKFHQPILKVRTFEPKGNKFNVGVTGNKKDKYVEAAKGTNLFFAIYADENEKRSYETIQLNIVIERLKQGLPEVPETNDKGDKLLFHLSPNDLVYVPTEDENVSAPLKIENKERIYKMISSSGTQCFFIPNIISTPILQTIELGANNKSEKAWNSQMIKQVCIKLKIDRLGNISL

SEQ ID NO: 9425 - protein, 1039 aa, unidentified
  REGION 1..1039: note = Description of Unknown: Cas Enzyme sequence
MRNNASSQNVLGLDLGTNSVGWALLEYKDEAAVAVRAAGVRIFDAGVEGDIESGKDKSRNMKRREMRQQRRQAERRARRRRRIARVLQKHGFLPNGNVYDDCARDAMLKELDRDIYAKHREKDKGQAKSLDQLPYFLRARALDAPLAPFELGRALYHLGQRRGFLSNRLTPSKDQDEGVVKKSIGELHENIKASGARTLGEYFADLDPHETRIRNRCTARQMYLDEFEAIWEAQKSHFQQLKDEEFKAELHRALFFQRPLKVQKYLIGSCELEPDHKRAPWACLEAQRFRYLQKVNDLALISPDGRRRLLTPEERQVLLSQLDEKDELTFTTARRALKAPKGSVLSHEEGGEKKLVGNRTAAALQKVFGDRFKRFTPEEKYQVVEDLLSIQNAEALTRRAKSAWALDDERAKQFASLRLEPDYCRLSRKALSRLLPLMETGMAFATAKKEIYGGEGVKMILDGLPIVQESGIEVRNPVVQRTLTEMRRVVNAIIEEHGKPDIIRLELARDLKKPRAQRKEIWQRNRQNEKERLAAAACVTKETGNPHPKRDDILKAILAEECAWHCPYTGRQINMHDLVGDTPQFDIEHIIPYSRCLDDSFMNKTLCYHEENRARKRSRTPWEAYGGDPDRWEEIIERVKRFNGSGRLPKLQRFQARELESFEEFSNRQLNDTRYASTLAANLLGFLYGGQIDVDGRRRIQAGRGQVTSQLRSAWNLNKILGDGGQKSRDDHRHHAIDAVAIALTDSATVAMLSRAAANAEKAGRRAWWKEIKVPWNDFLEDVTKLCDEIVVSHKVSRKLSGPLHEKTNYSPERETADGKSVRHVRRPVVALSRGEVDAIVDDAIRQRVQEALSKVGGDPGKLEAADNQPFLVTRDGRRIPIKSVRVRKPVNAFKIGSKHRERHVAPGSNHHMEILAALDKKAEIKWVDAVVSRYEAFRRKTQRKPIVQREHDPDMQFVMSLAPGEIIELDEDGGGRGLYVVRSISKDLIEFTSIKDARRQDIIKKAKAWGKRRVNYLRRANCRKVVIDPLGRIQSAND

SEQ ID NO: 9426 - protein, 1251 aa, unidentified
  REGION 1..1251: note = Description of Unknown: Cas Enzyme sequence
MKRILGLDLGSASIGWALISESENNGNVNREILGLGCRIIPYEGTEGKDFEKGTGESRNSIRTKMRTVRKGYDRYQLRRKYLVQELIKHNMYPTDELKGLPKMQLWELRSKAVSEKVSLPELGRILLWLNQKRGYKSSRSDSNLDKKDTEYVAKVKSRHQLIKEQNLTIGQYFYQQLKNDPFFRVKENVFPREAYIEEFDSICNEQKKHYPDILTDELISKIRDEIIYYQRPLKSQKGLVSVCEFEGFWRKGNDGKEYFVGPKVAPKSSPLFQLAKIWENINNIRIENKQGNNVEITLEQKKALFEHLDNNEKLTPTDIIRILGLKKNECFFNKQLAKGINGNTTKCAILNCFDDVSKYAHLLKFDVEVIETGKQTYLYDNSTGEVINEKTIKYIHPKIEKEPLYVLWHTIYSISDQDECSRVLQAKFNIEKEIADKLSGIDFTKQGFGNKSAKTLRKILPYLMEGDGYSEAMCYAGYNHSNSLTKDENLKRELLDKLKPIPKNSLRQPIVEKILNQMVNVVNAIIDKYGKPDEIRVELARELKQSKDERNETYLNITKRERENEQIAKKLQEFGLRATRNNILKWRLYEEMDNEDKKLNAICIYCGQPISLVEAIKGTDVDIEHIIPKSKLFDDSQSNKTLAHRHCNSGKGDMTAYDFMKSKPTEVFNAYIERVSKLYANKVISKAKRDKLLMTESKIPENFIDRQLRESQYIAKKAREVLLSISHNVWTTSGSVTAELRRLWGWDDVTMNLQFNKYKELGLTSFVEWESEHGKNKHRKEVITGWSKRDDHRHHAVDALVIACTKQGYIQRFNTLNSSKTKQDLIADVEKKSLEFKEKLSLLEKYIISEQPFTVKEVEEKVAEILVSFKAGKKVAVIGKRKVGKKGNKKVVQTGIIIPRGALHEESVYGKVKTVERKPIKYAFENPHLIVLPKIKKLVEERLSKHENVKDAIASLKKEPLYIDKNKQVLLEYASCFSSDYVIKYPVDINFNKVDKVVDGRIKQILQARLNKFNGKPKEAFKDIQRGDRVIKWYEDEGLPKPIKSVRCYTGLSAVVPVKKDENGNNIGFVKPGNNHHIAIYTDSEGKKYEHVCTFWHAVERKKFGFPVIIKNTNEVWDKIQQKPEGTYPEEFLEKLPSPNLTLELSMLQNEMFVLGMAPEEFSDCMVKNDVKAISNKLYRLQKLTIKPSSGQIDIVFRHHLETQIIDDINSKMSKRFYNIQSLGVLFSLNPIKLKIDCIGNITAWNITDRV

SEQ ID NO: 9427 - protein, 979 aa, unidentified
  REGION 1..979: note = Description of Unknown: Cas Enzyme sequence
MKIKLGLDLGTNSIGWALVKHDFENKQGEILGMGTRIIPMSQDILGDFGKGNSVSQTAERTKYRSARRLRERFLLRRERLHRVLNILNFLPEHYASQIDFEKRFGKFKVETEPKLAWKNIEGQFSFLFQNSFNEMLEDFKTNGQDLKIPYDWTIYYLRKKALYQKIEKEELAWILLNFNQKRGYYQLRGEEEEENPNKLVEFYSLKVVDVLADEPQKNKSDIWYSLVLENGWIYRRASKISLFDWKDKTRDFIVTTDLNDDGSVKTDKEGNEKRSFRAPGENDWTLVKKKTEQQIEQSHKTVGMYIYETLLGNPKQKIKGKLVRTIERKFYKEELRQILEKQKEFHQELQNDDLYNDCIGELYRNNEAHQLTLSKKDFVHLFIEDILFYQRPLRSQKSFISNCTLEFRKYKDENGAEHTQYLKAIPKSNPYYQEFRLWQWIFNLNIYRKDNDENVIKEFLTTTQDVENLFEFLNNRKEIDQKTLLKYFKLNEKTHRWNFVEDKKYPCNETRTMISTRLEKVENISDDFLTREIEHKIWHIIYSVNDKIEYEKALKSFALKHHLDESSFFESFRKFPPFKSEYGSFSEKAIKKLLPLMRLGKYWDYANIDKFSNDRIQKIINGEYDENIKDRVREKAVHLRSEDDFQGLQLWLAQYIVYGRHSEASITGKWNSADDLEEFLKDFKHHSLRNPIVEQVITETLRVVKDIWLKYGKGAKDFFNEIHIELGREMKLPADDRKKLTNQITENENTNLRIKGLLAEMMTDNTVENVRPFSPQQQEILKIYEDGVLNSGIEIEDEYLKISKTAQPSPSDLKRYKLWLEQKYKSPYTGQIIPLNKLFTPEYEIEHIIPQSRYFDDSFSNKIICESAVNKLKDNYIGLGFIKQFGGTIIELGFEKSVKIFDIDEYEYFVKKHYVNNRSKRNKLLLEDIPEKMIERQINDTRYISKYISGILSNIVRLEDGSDEGVNSKNIVPGNGKIT

SEQ ID NO: 9428 - protein, 1173 aa, unidentified
  REGION 1..1173: note = Description of Unknown: Cas Enzyme sequence
MSDKGNNSAVTVPDLSLAFDVGHSSIGWAVLQARAGQHPALLGCGAVIFAADDCLASVRRGFRRQRRHIRATRQRIARMRRLLAHLGVLGDGQLEAPGCAWPWLLAARVLRGGKALSWPELWDVLRWYAHNRGYDGNRGWSRQDEASAEDSEKEKRAGELLAEFERKHGRQGTMAEVFCDKLEVDPLGEVKSSMRRVRDLGAAFPREGVEAEVERILRAHAGVLPQVDDRLINALMRDHTALPTPDRPPPARYGQRLGDGSLSPGGLLFGQLVPRFDNRIIARCPITFERVYQAAKAETGDEENARHEAEKRAKVPSARCVEFHRFRWAMELAKIKIAAAGKGEPRNLTAAERRAVNAAMEQKGYLTKSELTGAVRGQTGGLPDNLDQILTHPDAERALVLDPVRRYIHGEQLVSALWPVLPERVQKRLRGQWRRGHGINVGEVLEACGGARPAAEAACERYLDAQNTKKRRKDAPLTGEALRRRVLRVELPKGRAPYTRPVMREVADFVLGTDRHPSEEGGPLYRSEAIRQAQLQRALDEQTNNHLVRHRLKLLVGDAEAKAGKRPGRRKLNGLFRDLADTYAGGNLGRIGRITIEVNRELREMSGKTAQEQATLLGRQLAHFKGVAKKLAQAYEGLGVHVGPGLIRKGRIAEDLGWACPYTGKLYDALDLLHRRVDKDHIVPRAERASDSLDSLVITFAEVNKWKGKRTARRFVEEEQGKAVPGLPQLTIKSLAAYLKDVEALETFKGHEDDQRRKKNRKRLLLVRDYVEKEFTPGDLTQTSQLVRLCAQALEREYLGLDHKPVVTSLPGAVTGAVRKSWSLSGCLAAVNPLVLNPNDPGQDGKPGVRTKTEIRSITHLHHALDACVLGFASHVLPRDGGAWELLVKRRLGADEQRRARQLLGGAAAITQEGELRLADLAPALKEQICGRLKERRVVQHLPADLSGLRCKETVWRVFDPEDTHPNARRLARWLVEEKVPVPAPEARTALIICRKRRNAGADGEDAAGGKVFRETKTWQWVYDIKDKTALLGLAPEGDAAAAKLKRIKAVKVLGDNFGLALDPEPTLIRPHKVWHQLNALRLRNGGKPPRLLRIGSLVQVRQKTPRSDYRGVWMVRGVQLDQRAGYLLDLSPADQILYRGQPGCFRNVSVATLLKCGLDILKVPLTGVAPAQ

SEQ ID NO: 9429 - protein, 1482 aa, unidentified
  REGION 1..1482: note = Description of Unknown: Cas Enzyme sequence
MKRILGLDLGITSIGFAYVTEGKTPEESSIVQIGVRVNPLTVDEQTNFEKGKPITTNAERTQKRGARRNLDRYQLRRSNLIETLTDAKIISTETPLTEIGKDSTFDTWRLRSKAATDKIEKEEFARVLLAINKKRGYKSSRKAKNKDEDEGQIIDGMEVAKRLYDENITPGQLVFQMLQKGKKYIPDFYRSDLQAEFNNIWKFQKQFHPDILTDEFYEELQGKGQRATSALFWSKYQFNTADIKDIEDSLKTVDTIKLNNREKKRLQAYKWRNDAISTQLGKEELAYVITEINNNLKNSSGYLGAISDRSKELYFNKETVGQNQYKQLLKNRHTSLKNQVFYRQDYLDEFEAIWTEQAKHHPELTQELKAEIRDIIIFYQRKLKSQKGLISFCEFEVKEIEVNGKKKTIGLRVVPKSSPLFQEFKIWQNLHNVVVRKKGTKKRLTKDPNQALLFGDEKEIFILDQDAKQYLFNELNIKGNLSASSTIELLGYKPADWEINYSELEGNRTNKALYEAFLKIIESEGYDVKELLKVKSNRDEIELNDIKVSADEIKSMVKEIFKSLNINTKILDFNAELDGKEFEKQASYQLWHLLYSYEGDDSASGNEKLYQLLEAKFGFKREHAQILANIALQEDYGNLSTKAMRAIYPYIIENQYSTACEFAGYRHSKHSLTKEEIEKRELKSKLELLPKNSLRNPVVEKILNQLVNVVNTIVDKENDKLESEGKPRDFHFDEIRIELARELKKNAQERAEMTTNINAAKIIHEKIAKLLQSEFNIQNPTRNDIIRYRLYEELKNNGYKDLYTDTYIPRERLFSKDIDVEHIIPQAKVFDNSYSNKTLVYRDINLKKSNQTAYDFIATEFGEEGLKRFEQRISNLFEFGKKNKDEGISKAKYHKLLKTESQIGDGFIERDLRDSQYIAKKAKELLFQITPSVLTTTGSITDRLREDWDLINIMKELNLPKYRALGLTEMEERKYGQQVEVIKDWTKRNDHRHHAMDALTIAFTKRSYIQYLNNLNARSKDSSWQNISNKDDSYSIETSDLKISTRDVMGIEANELHRDKDGKLRFNLPIPNFRQEAKEHLENIIISHKAKNKVITKNKNKINTKNGKLTKIELTPRGQLHKETVYGQYQFYQTKEEKIGTKFDEATIMKVSKSEYRNALLKRLYENENDPKKAFGGKNSLSKKPIYLDEAETVKVPEKVQLVWLEKDYSIRKDVNPDNFKDEKSINKVVDVGIRNILLHRLREYGNDANKAFSDLDKNPIWLNKEKGISIKRVTISGVNNAVPLHHKKDHLGDIILDTDEKPIPVDFVSTGNNHHVAIYQDEKGNLQEKVVSFYEAVIRANLGLPIIFNNPMEIIDLVLERNITDEIILNALPEKEWKFLFTMKQNELFVFPNEQTEFNPKEIDLMDPKNKKLISPNLFRVQKLGSLLSGFWFRHHLETTVDSNQTLKGITYIVIQSANNLKEIVKVRTNHLGDIVSVGEY

SEQ ID NO: 9430 - protein, 1168 aa, unidentified
  REGION 1..1168: note = Description of Unknown: Cas Enzyme sequence
MSAKQNISSPHPDLHLAFDVGHSSIGWAVLQTPAAPSPEPAAELLGCGAVVFAPDDCLASTRRGFRRQRRHIRATRQRIARMRRLLAHLGVLTPAQLAAPGGAWPWLLAARVLGGGAPLTWPELWDVLRWYAHNRGYDANRAWSRQEKPDTEDSEKAQRAHELLREFKRRHGRPGTMAEVFCDHLGVDPRGPVKSSRQRVRHLGAAFPREGVEAEVERILQAHKDILPGVDDPLIHALLRDHTARPVPGLRLPARYGQRQPDGTLRPGGLLFGQLLPRFDNRIIARCPIAYERVYQQVLAETGDREKARREAEKRAKVPAAHDADFHRFRWAMVLAQINIAVPGAPQPRNLSAPERNSLHAVMEQKGGLTKSELTQAVRQLTGRAPDNLDRLLALPDAERALVLDPVRLYCHRDPLLSVLWPALPARLQRRLRGQWRRGRALTVADVLAACGDARPAAEAALAQYLEAEAAKKKRAPDAPRIPDTPAGRVLRVERARGRAPHTREIMREAVAFVLATDRHPAEEGGPLYRSDAIREAQLRRALDEQTNNHLIRHRLKLLAGDDAAGPRALNGLFRDLANTYAGGDLGRLGRITIEVNRDLRELSGKTAQEQAQLIGQQLANFKSVEKKLTEAYAGLGVRVGPGLIRKGRIAEDLGWTCPYTGQLYNALDLLHRRVDKDHIIPRSERASDSLDSLVITFAEVNKWKGQRTALRFIEEEQGKPVPGLPQLSLRTLAAYRQAVEKLECFKGHENDQRRKRNRKRRLLLRHYVEKDFTPADLTQTSQLVRLCAQALQRLGLGCARPPVVTALPGAVTAAVRKAWNLTGCLAPANPLALNPDDLDDHGQPRPHNKTELRKITHLHHALDACVLALAAHHLPRDGEAWRLLLKRRLAPDEQRRARQLLGRVAAITPQGELRLNDLPPALKEQVSRRLRERRVVQHIPADLSGLRCDETVWRVFDPADPHPNARRLARWLANKNIPIPAPDAPTVLIISRKRNGADAAPAAGKVFHQTPTWRWVYEIKDKTALLGLAPEGDPAAAKLKRLKAVKVLGDNFGLALDPEPALIRPHKIWHQLAALRARNGGKPPRVLRIGSLIRVNQKTGRSDYRGTWRVRGVHLNQRAGYLVNLSPPDQIRYVGQDGCFQNVSVATLLKCGLEILKTPLSGVAAPP

SEQ ID NO: 9431 - protein, 1065 aa, unidentified
  REGION 1..1065: note = Description of Unknown: Cas Enzyme sequence
MALVFGLDIGIASIGWAAIDDEQAITPLLGLGSRIFVAAEVPKTGESLAKPRREARGMRRRIRRRAHRMARIRRLFYREGLTNDVVPEVLSNITADDSTPWLLRADGLDRKLNPRDWARALLHIAKHRGFKSNRKSEAGDKEGGKLLQGVTGNAKLLHDKNYRTVGEMVWKDEKFADYKRNKGGDYSHTVARDDLLLEIKALFEAQRGLGNTFAEVAFETDYTKIFASQRPVDDGEIADMVGYCTFEPDEKRVAKATYSAERFVLLSRLNNLMLIETGERRVLDAEQRKAIETMAHKSAKVTYKQIRKALDLPETVRFNLVQYKSGEIDKSEDATFAELKAYHQLRGVITKTCGELAWGNLTNQPDKLDAIATALTWYKSDDKIREVLAPEQLEPALLDAVLALSFDKAVALSLKALRNINPFLAQGLRYDEACKAAGYDHSAPSEAQPQQFLPYIPTDEVRNPVVLRALTQARKVINAMIRRYGSPTQINIELSRELSQPYSERKDIQGKQKEFQAEKERTVKQFNDTFGRDPRGDEFTKFRLWREYNYCAYSGVYLEPARLLEEGYAEIDHILPYSRSMDDSLNNKVLCTSKANRDKGNKTPYEYLNGDSASQQWHEYKIRIETHKAFRQAKRNRLLRVDFDEKAEQEFRERNLNDTRYISRFLQEFLKLNLQFAPSENKIKVQTRNGAVTSFLRAHWGLLKVRADGDLHHALDAAVVACTTQGFVKRVSDYSRKKELWASDKRTDDSTRDLEIVDTDTGEITATNYQKKDGRDFPLPWENFRADVKDALTEIFVSRAPTRKATGGVHDEKIRSTKRMTRENPITTSKTKLQDLTLASLENIPEKETRNANLYQALKKRIETGGKEPFAKPFYLGKHGEESDDAFGRLIKGVKLERTTKTGVLVRGGLADNGEMLRVDVFTKAGKFYLVPIYLADRVSGVLPNRAIRAATPEQDWPEIDASYQFAFSLCNNDLILISDKDGGDGAFLRGYFKGAHRGTGAINIEGHDRSWKKEGIGVQRLSTFKKLQVDVLGEVFEVKQEPRHKVNGEAREGALGYGLAESAD

SEQ ID NO: 9432 - protein, 1258 aa, unidentified
  REGION 1..1258: note = Description of Unknown: Cas Enzyme sequence
MGKVLGLDLGTNSIGWAIVEEERGEHKLIDSGVFIFSEGVKIEKGVESSKAAERTSFRLARRQKFRRRLRKYETLKVLIENKMSPLTLEELEKWAKYKKGFKREYPKSKDFLEWLKTDEATNKNPYYFRAMSAKSKLPLYEVGRALYHIAQRRGYKSNRLETTKANEDGKVNSGINEINKNIGTLTLGEYFYELYKKGDKIRSKYTSREQHYLSEFKKICEIQQFSKELSIKLEKAIFFQRPLKSQKGLVGKCVFEKSKPRCPISHPLFEEFRALQFINSIKVINEKRFLNDEEKLMIKPLFLRKSKPNFDFEEIRKRITNKNRDMTLNYTDWTLVSGCPTISQLIEIFGDDWININFEYIREKDNKKSIINYETIWHVLFNFDSVEKIKEFGINRLKLDEDKANKLSKIKLKQGYGSLSLCAIRKILPYLKEGLLYSYSAYFANLGKAVDEKNKNKLSEIKEDIKSLIDVFRNSKKVENIINSYIYKYRENHFSLKIEKEDFIKKLDSELGEDFISLNESERVTFIDEYFSLLEKMIKRNDFIKIKRLDEKIIELLKDKYDIPEQNLTKLFHPSDLDIYPDAKPAPDGKKYLGSPRTQSVRNPMAMKTLHQLKKLINTLIKENKISSNDTINIELTRELNDANMRAAIKRYQNELEKNKKECAQKIKDTLKIEPTETDILKYQLWEEQRHMCLYTGKKINISDFLSDNPIYDIEHTIPRSLSFDDSQVNLTLCHNDFNRNIKKNMIPQQLPNIEEILLRIEHWKEEYQNFEKQINKAKNSSKNSSSKEDKDKAIQWKNYLILKKDYLKQKYDRFLIKDIPSGFTNRQLRDTAIITKYARAYLKTVFDDVNSIKGSMTAQFRKIWGVQNEYDIKSRNKHSHHTVDAIVLASITGPKYNLLSTFYKDAERGLRPTFKKPWATFVEDIKKIEDEIIVKHHFEDKTLKQSKKKLRIRGKIKYPEGNDGKNKPIYMQGDTFRGSLHLDTFYGAIKRKDENNNEKLRYVVRKPVNSLKNEKEIDNIVDEGIRRKIRAVIERRTTDGKSFAEAISETIWMNEEKKIPINKVRYQMTNIANPIILKNHRDKSKDGQEYKENIYVTNDSNYMMGIYEGTIANKPKKDFILVSNFELAKSKNTKLPDEKNGLQLRQKLKRGMMVLLYENSKGEIDSIKDNVKELSKRLYKIIGFSSMTAQKKYEYGRISLRHHLESRASIELKEINISFKNNEEYIPQRMLLHSQFKALIENKDFLITNDGKIKFIF

SEQ ID NO: 9433 - protein, 1381 aa, unidentified
  REGION 1..1381: note = Description of Unknown: Cas Enzyme sequence
MKKILGLDLGTNSIGWALVNEAENSEEKSSIIKLGVRVNPLTVDEQQNFEKGKSITTNADRTLKRSMRRSLQRYKLRRDNLISILKNQNFISEETILAESGNSTTFETYRLRAKAATEEISLEQFARVLLMINKKRGYKSSRKAKGTEEGELIDGMEVAKKMYDENLSPGQLCLNILQAGKRNIPVFYRSDLQNEFDLIWNKQKEFYKDILTNELKETLKGKNEKQTWAICQTPFKIVGIKRTTKGEELKKENFAWRVKSLNEKIDLEELAVVLQKINGQIKSSSGYLGEISDRSKELYFTKQTVGQYQMSILAKNPNASLRNMVFYRQDYLDEFEKIWETQSQYHKELNSELKKEIRDVVIFFQRRLKSQKGLISFCELENQQKSVIVDGKPKIITIGRKVCPKSSPLFQEFKIWQILNNLEITNKINGEKRLLEQEEKESLFLELSIKDKLSKDEVLKLLFNNYKELDLNYKSVEGNRTQATLFTAYQQIIEASGHGDNDFSKMKYADVIEIVEGVFASLGFNTEILKFNADLSVNELEKQPHFQLWHLLYSYEGDNSNTGTQKLIEKISAKFGFDKEYASIISKISFQDDYGSLSTKAISRILPYLKGGSEYSKACVYAGYNHSKSSLSREELDNKTLKDKLDTLPKNSLRNPVVEKILNQMINVVNAVSETYGKPDEIRIELARELKKSAKEREDMTAALNQISTEHVKIKTILEKEFGLNHVSRNDIIRYKLYKELEPRGFKTLYSNTYIPAEKLFSKEFDIEHIIPQSRLFDDSFSNKTIESRSVNIEKGNETAYDYVAAKFDENFVHDYLNNIELLFKNGKISKAKYNKLKMRGTDIPNDFINRDLRDTQYIAKKAKSILEELVRNVVSTSGSITDRLREDWQLINVMQELNWDKYDKLGLTETIEGRDGQRIRRIREWTKRNDHRHHAMDALTIAFTKPSFIQYLNNLNARSEKSGSIYGIEQKELYRDDQGRLRFKPPVPIDLFRSEAKNHLQNTLVSIKAKNKVVTSNINITQKAGPENKRKQLTPRGQLHNETVYGQIQQYVTKEEKIGAQFTVEHIQHVAKKAYRDALLMRLSENNNDPKAAFTGKNSLSKNPLYIDEMHTSVVPEKVKLVFKEPVFTIRKEISADLKIDKVIDVKIRKILEERLAEFNNDAKKAFSNLDENPIWLNKEKGIAIKRVTITGVSNAVALHDKKDHLGKPIRDANGKKQPVDFVSTSNNHHVAIYKDSNGNLQEKVVSFFEATTRANQGLPVIDKEYNNKEGWKFLFSMKQNEYFVFPNESTGFNPTEIDLLNPDNYHLISPNLFRVQKISTKNYVFNHHLETKAVDGDLLKNKKVLHGITHNFIQTPQKLHGIVKVRINHIGAIAFAGDY

SEQ ID NO: 9434 - protein, 1140 aa, unidentified
  REGION 1..1140: note = Description of Unknown: Cas Enzyme sequence
MPNLLGLSLDVNTIGWALIDSETHQIQGIGTRVFPIGCENFASGKRELSKKAFKRYKKTSRLRYERARKRKIKVVEVLIKHGMCPLSKEAFVEWKKTKRFPVAELREWLQMNPYKLRERAVKEKITKLEIGRIFYQITIHRGFKISDRNSGFKENAMFSGMPKIDRLGILHTEKNTKNQSLGTYLSKILPEEKASYSQHNERIRNRFLAREMFLEETHQIWNFQSNFHHDLLPEVRNELIGDSENDPQELGAVFFQRPLKSQKFRVGRCEFEKNKTKCSVSSLIYQEVLAYRWLNSIKINGNPLDLEDREKVLRYFMTHRKFDFFAIRQLLGHHNVQYNKKDSDLIVGSFINSFLSSSRIFGSRWFDFDEKIKEDIWHSLYFFDHEEKLKEHAQRQWGLDDYQAQAFAKINLDKRYAPISKKAARNILYFLKRGISYDLSVILGGVKNSLGKNWETIAANDIEYIINRVLTLYKENKVFDFIPKLQEFLEEEMHFNAFQINKLYGQSMQASKETVNLFPVGSSADKEIYNFKNPLLINALFQCRKVINEIIKKFGPIDEIKAELSADLKVNKYQRYLHRLDHRRMERLRRKYIEELGKRAENIIPLNLIKFSLWEECKQTCPYTGAYIPLDILFTDQVSVVYIQPWQLSLNDSIWNKTLCMQSFTPNILDVPPYDYFNEHDPENWEMVVKRAARLFSNTKDYPSSHRKFKRFIKKYSHRNFIKHQLEDFNVLSKEVTVYLSKVVSKVSVGPGHSTPHLIEKWRLNQLFDWKTDSEQIIDYRYAAVVAYVNANRRKSYLEILAQQNKYQPQSKKASFPIPYQGFRNDLEYKVNSILVSHKIESKLISKRIQKSVKNDQVFNNICVSVRGSLHKESIYGKRKAPKGAQESYHIRKPLHTFETLHQINKIVDPIVLELVLEAVENAGGFNSDRFPRNAFFDIDAKERLIPKVFLPNAKGDPVPIKKVRIKELFNGAVNLKENINQHVNLRNNHHVLIYIDKDGVYQEEVVSFWEGVRRYRQREPIYQLPEDGAQFVTTLQINDLFILGLEDLEIPIDQESKSFLAKHLYRVQKLSSKFYEFRLVNDLFLSSTDAPAYVRINNFGSRKTGWQTYNPHKVALNAIGDLIAVKRDITIMNQIKNLV

SEQ ID NO: 9435 - protein, 1123 aa, unidentified
  REGION 1..1123: note = Description of Unknown: Cas Enzyme sequence
VKQILGIHIGTESIGWSLVQQSTNPRIVSMGTRIFSSFVDRLGEGDREKSAATLRTQVRNARNVYFRKNNRKKKVLFFLAKHGFCPLSLNALYKWQLGESTKSQAQKMEQWFALNPYALRAKGIHEKLSSLELGRILYQLTQRRGKVMASVEDDSNAKVLYNGLPSANRLGINQTNANLDDLHLGEYLNALLPKKETSYTYQSTRVRNRYLNRTMFLEEIDALLNQQQQHHKTLNEDFILELLGENRDKGLLFFQRSASYKRSRGSLATCPFEKNKQLMWLSHPMHELYELYCWVNTIRLYGKKLTDEQREIALKIALQFSSFLFKKVRVALEVDDPYAFNYDDSTKLFLSHTLVQLTRNNAFGAKFLSFSKNEQHELWHDLHFYSDKDMLEKRLRDTWKLSAAKAKTVASIKLKPGTGKLSMKAATSILDYLKEGHPTQTAIILGGVKNAIGQQRWKNFKELKQESIEHFIQAVIIEKDIHVMDWISDFEDAFNFKLNQNKLYLLNQENEDSLPISPEENHKILRSLKPVAQKPIFELRKLINQLISEYGVIDQIKFVLSNEVKVNAKYRKSLYISKKYREQTLPKIHNAVLEAEQNPTHTNLFKYKLWLEWNKTCPYTNTPIALEDLFTDQVSVVYIQPWSRFFNDSDKNKALCMSSFKENILDKTPYEYFSEQPSGEWEQVKTRVLEQLLKGSAKNVSYHKFRHFVSSVYSVDSISREFNDQHHLAIKVKNYLSRVCGDVVATRGNAISSIRRKWGISNLEAFNQKPRYFNTREYAINALVTALNKPSFLEELRHWNRYEPLPYRGVFPTPWKRFTSDVLLAYKNISASIDLNNQVVRKTVQTNSSKDGLSPKGKLHKDSYYGKRTTPDGIESYHIKKSISTLSTAKQISKIVDYSIRELIYDQIDLEGGFINGKIPKDALTKPTETGWESKVFLPNKNGDPVPVRSVRVRENVGNAVQVSKGQNKYVNPRNNHHVMIYQAVDNSFQEHIVSFWEAVRRVREKETLYQLPSEGRMIISTLHINDCFILGLSQKEIFERLQEGTSLWEHVYKVQRISSKYYEFRHIYNLDVYDQTSPNYVRILNFGERKTGWKTHNPFKISIDVLGNITPFYKPLKVPEMQ

SEQ ID NO: 9436 - protein, 1027 aa, unidentified
  REGION 1..1027: note = Description of Unknown: Cas Enzyme sequence
MAKIKYRLGLDLGATSLGWCVYALDEQDPPEPKSIVRMGVRIFSDGRDPKTLTSRAADRRAARQARRRRDRLLKRRQRMMEGLIRFGLMPSSTEERKALQATDPYELRAKGLDSPLNRQELGRALFHLCRKRGFRSSRKELKQDEKETGKVKTAISELRARISAAGCRTVGEYLAREHAERRPVRGRRRADGSYVLYLQRDMVADEFDQLWEAQRPYHPDLLTEEARAYLRDTLLFQRKLLPVTPGRCLFEEEEFRARLSSPLQQSFRILQELNNLRLISELDTRQLTLEERNTLFAHLQRHMKGTFAELRKLIGIRRGDSTRFNLEQESRRELKGDLVSAQFSRTGCVGEDWFSWPAEKQESLAKEVATAEDFDVLRSLLVAPPWSFSDAQAEAISRCNLPDDFGALSLKALGKIVPEMQKDVVTYDVAVKRAGYSHHSALHTGEIFSQLPYYGQLLRNHTSPANKAADEAERQYGRISNPTVHIGLNQLRHLMNALSKRYGPPNQIVVELTREFGLGPDKRREWISIQNENRERNQGYDAELERLGQPSTRENRQRLQLWEELGRDDALNRVCVYTGKGLSKATLFGDEIEIDHILPFSRSLHDGIGNKILCYRQANREKGNRTPFEAFSHSPSGYDWNAIQARAATLPGRKAALFQDDALKKFLGENSFLDRHLNDTAYLSRVARQYLSYICHKDSVWVSTGKLTAMLRGKFRLNELLSRDGGKNRDDHRHHALDAAVIGLCSRSLIQRISTAAERAERAGELRLLEGLELPWPAFRDELRTSLARVIPSHKPDHSKHAALHNDTNYGMRELATRRSAHTVVHRKHLTDLKASELDGIADPTLQQQLRAIFEQASSTKDLKGALEKFSTETGVRRVRILEKLAVIPVNDRRTGQPYRYVKGDGNYSYEIFNAGNGRWNGEVISYYAANQKDRHSSSGSPLFTIRKNDLMAVEENGTRSILRVAKFSEGMIALVDPREANVDARTREKGSGLRYIFKSPNALRPLRARMVGVDILGYVNDPGFAE

SEQ ID NO: 9437 - protein, 1122 aa, unidentified
  REGION 1..1122: note = Description of Unknown: Cas Enzyme sequence
MTHYVFGLDIGIASVGWAVLSEQRIIDLGVRCFDKAETAKEGEPLNLTRRQARLLRRRLHRRAWRLTQLARLLKREGLIADAKLFAKAPSFPDNAWQLRLQGVDRLLTPLEWARVIYHLCKHRGFHWVSKAEEAKADSDKEGGRVKQGLKHTGALMAEKGYRSAAEMVLAEFPGAQRNKGGQYDKALSRVLLGEEMALLFQRQRTLGSAHASERFEALILGSGDRRSGLFWRQKPALSGADLLKMLGKCTFERNEFRAPKASFSAERHVWLTRLNNLRVIIDGCSRALSDAERAVVLSLPYQTEAFKYKSLKNALVKAGLWSEEVRFGGLAYPSRAQAEGENAKDPEDQALVKMPAWHELRKAFKAAGQESLWKRISTPALEGEPALLDQIATVLSVYKDGAEVVQQLRGLDLPDPDVSITVLERISFDKFSSLSLKALRRIVPLMEAGMRYDEAVAQIPEYGHHSQLVKPGAEKHLYLPPFYEAQREYRSKNDRVGSMKFRDDADIPRNPVVLRALNQARKVVNALIREYGSPMAVHIEMARDLSRPLEERNKVRRAQDEFRERNDKAREAFESENGYRPKGAVFEKWLLYREQLGQCAYSHQPLDIGRVLDDPNYAQVDHALPYSRSYDDSKNNKVLVLTQENQNKGNRTPYEYLTALDGGQEGERWRAFVAWVQGNKSYRMAKRGRLLRKNFGGDEARGFIDRNLNDTRYICRFFKNYVEEHLQLAPRADGDLNRRCVVVSGQLTGFLRARWGLAKVRSDSDRHHALDAAVVAACSHGMVKALADYSRRKEIEFIKEGFPDPETGEILNPTAFDHAKRFFPEPWPHFRHELQARLFTDDLAALRADMQRLGTYPDDALVRLRTLFVSRAPQRRNGGAVHKETIYAQPDSLKARGGIIEKVLLKDLKLSDLDNLVEPHRNERLYSAIRERLQAHAGKADKAFGPDNPLHKPDKSGNPTGPVVRSVKLVRAKQSGISIRGGLAKNDSMLRVDVFTKAGKFHLVPVYVHHRVTGLPDRAIVAHKDENDWPHMDETYQFLHSIYPNDLIRITQKGASFSGYYAGCDRGSGNVNLWAHDRAIAVGKDGLIRGIGVKTALSLEKFHVDVLGRIYPAPPEVRCGLA

SEQ ID NO: 9438 - protein, 1051 aa, unidentified
  REGION 1..1051: note = Description of Unknown: Cas Enzyme sequence
SVCQKICSTQNRTTPSGNFQSAQNFIRISATWVKIWQNLSNVIIRKKGSPALKKKKPSSGDSSLHEPEEYIFDLDARVSLFEELNIKGNLTAKKALELLGHDANQWEVNFVKLEGNHTNQLLYKAYLDILEYEGYDIKELLHVKSNKDEVDLDDLNVPALQIKNMIKDVFGALKIDTSILDFNAELDGVDFEQQPAYQLWHLLYSYEGDDSNSGNERLYRLLNKKFGFTTEHAKILAGISFQNDYGSLSTKAIRRIYPYLKENKYSDACVLAEYRHSKNSLTKEELESRELKDRLEPIKKNSLRQPVVEKILNQMVNVVNALIDKENDQLEASGHQRNFHFDEIRIELARELKKNAAERAEMTSNINAAKLNHDKIVKILQKEFGILNPSRNDIIRYKLYEELKNNSYKDLYSNRYIAKEDLFTNKIDIEHIIPKSRMFDDSFSNKTLAFRDVNLRKGEKTAFDFMQIDTDDEGFELYLSRVENLYKLGMRSPEEGISKAKYKKLLKKESELDDGFIERDLRETQYIAKKARQMLFEVTRSVISTTGSITDRLREDWGLINVMKELNFQKYKALGLTETLERRSGQKIEVITDWTKRNDHRHHAMDALTIAFTRHSHIQYLNYLNARKDEHHKLHSVILAIENKETLSRPDADGSKKRVFKEPITNFRKIAKEHLEDIIISHKAKNKVVTKNKNKIAKNNHVQTTLTPRGQLHKETVYGQYRYSVKKEESVGAKMTYDTIMKVTKPAYRNALLERLKESGGDPKRAFTGKNAISRNPIFLNEAKTECLPEKVQLVWLEKDYSIRKDVNPDNFKDEKLIDKILDEGIKRIMKERLRQYGGDPKKAFTDLANNPIWLNKEKGISIKRVTISGVSNAEPLHYKKDHHGQFLVDENGNNIPADYVSTGNNHHVAVYRDENGNIQENVVSFYEAVSRKNQGLPIIDRSYNQHLGWQFLFTMKQNELFVFPNAQTGFDPLNIDLFDAENKKIISPNIFRVQKIAQKDYFFRHHLETNVENNPATKNFTWKREGTLGLKGIIKVRVNHLGDIVSVGEN

SEQ ID NO: 9439 - protein, 1501 aa, unidentified
  REGION 1..1501: note = Description of Unknown: Cas Enzyme sequence
LDFMYMSRKRIIGLDLGTNSVGWAVVERGEDTDDSKIIDAGSRIIPMTADAVSNYEKGKLQSAASARTAFRGTRRLYERAELRRSRLLRVLNILGFLPDHYRAMIDFEEHPGQFRNHAEPLLPYRKNEEGKNEFIFKDSFLEMLTDMKNHHPDLVADSKKIPYDWTIYYLRKEALSRPISKEELAWVILNFNTKRGYYQLRGQEDETSTDANKCYEVLEVAKVEETGANTKKKGYKWYTVTYTNGMTQPRTWKEAPCRVGDKVECILNYQVKKDGTPKLDDNGQQVCKISAPDPDDWTLRKKRTESIINKEHVTVGEYIYDHLMTNPQDKIRGKFVHTIERKYYKDELRAILDKQKEFIPELTDEDLLRRCSEELYHHNDGHRSIVERQGFTHLFVDDIIFYQRPLKSKKSLIADCPLEYYPYKKDGVWMHRPIKCTPRSNPIFQEFRLWKFIQDLRIYKREDEMDGRLVLDVDVTSRFFSSPEDYCQLFDWLKEKSEITQKQFLAYPAFHLGKDAKKYRWNNVDDDKRAYPLCPTHYDICKALKDVDGTPVLSTEQEQQLWHILYSVDDRFELEKALKHFAEKNLLDVDSFAQSFIKMKAFDKDYVRYSEKAYRRMLPLMRTGRYWNADNIDARTMSRIQHLVNGEADDSISNRVREICAKLDALEKYQFLPDWMVCYVVYNRHSEATDNQRWTTTEDIDQYLRKELRQGTLRNPVVESVLSESLRVVRDIWKVYGKPDEVHVEMGRDLKQNAAQRQKAMSTMLANQQTNLRIRCMLQEFADPDFHIDNVRPQSPSQQELLKIYEQGVLDNEDVPDDIQLIIDHIGDTKSNVSKSDMLRYKLWLEQRYQSPYTGQPISLARLFTTDYEIEHVIPQARYNDDSLNNKVICETEVNRTKGKMLAYEFIKTFGSMIIEGLGGRKFKILDTVQYEEFVKTHYAKNKKKMRNLLLDDIPTCNTSSQLNNTRYMARKALDIFSHLVRAEEKDEEATSKNVIACNGIITDRLKKDWGVNDVWNDIITPRFERMNAITQSTDYGQWVNKDGKRYFQINVPLALSKGFSKKRIDHRHHAMDAIVIACTTRGIVNYLNNASGADDKARYDLRHAVCFKNVDADGSGNYTWTVKKPWGTFTQDARRVLEHIVVSFKQNNRVITQTTNRYWHYCDGKKVMDKQTRGDHWAIRKSLHIATFSGALRLPEVKRVSLKVALQNIDAICDKKARRIIRHIINDGYHGHVDNATLLKYFKARKYLVEGVDFSKLDVRIIPDAPNYSASRVALDGKFTEKDIEKVTDTGIQAILKRHLEHYKTSKGSYDCAAAFSPEGLAEMNNHIAELNGGKPHQPIYKVRKKESFGMKFNVGKGTKSKQFVQQDDGGNLFFAIYVDEEGKRTFESIPLNIVVERMKNKMDVAPITNDKGDKLLFTLSPGDLVYLPQEGEHVVLPLDVRRIYKELSCNKHQCFFIPYSMASPINKDYEYKMEKSIDGEMIKESCVKLKVDRLGHVSV

SEQ ID NO: 9440 - protein, 1511 aa, unidentified
  REGION 1..1511: note = Description of Unknown: Cas Enzyme sequence
MSNNSSDAKKKYYLGLDIGTNSIGWAVTDENYHLIRKQGKHLWGSRLFSEAATAQSRRMQREARRRLERRRQRILLLQNIFSPEMEKIDPYFFDRLNNSALQLEDKPEALQTSPYTLFAGVGENKLTDKEYYDQYPTIYHLRLDLMRHPEKKFDLREIYLALAHMVKYRGNFLYEGEMSEESISSPESLKESFDALDEALADVSSSEEEEEDIPDVSAIRCSLKQANEIIALFQKEGKISLLQDGLKANLPEASKDASLWNVLKAITGSSLKLSALFPELKETLEEEDDLKVDFSDEDGWEKILLSAQIGEKRLEVLKRAKALYDARILIRFLKGKNSLSEAMVDRYELHHRQLVQLKKLWKEAIAKASTPEQKKIWKANYDSFFRVLHEKGEKDDASYSNYIGFTSEGGKKDTQSLDPMHRATTREDLYKKLLSKDFLPDGLLDSPSEEGNALSIRQAIAEENYLLRLNAKENGAFPYQLNLREMKIILDNQKAYYPFLGEKTKDFANPNTESYRICSLLEYRVPYYVGPLSQRDWKGKEPIRWACYKKGKEGVRITPWNFHDVIDEKASAKGFLDRLKSTCTYLIGEKTLPLASLTYQKYMVYNEMNGWLINGAPITTEDKDYLMDNLYRLRRGVSLANIENVLKRKYGQVVSLETTGTKRKVAREDIHANLSTYYDLKPYLGENFDRNPKKAELAEEIVEVLTAFEDRKMRYESLCELGLPVETAKQLSNRSYAGWGKLSEKFLTGLKTELVNTETGEAMEYSILDLLHLTPQNMMAIYFNSQYSFQAQVEKANEERKPSLEEILDADYTSPAMKRSLLQCVKHIIPELKKILGIEEFTSYFIEFTRQPDAIKKRTDSRKKFLDQVYSAAKKTLGEDDGFKNAEEELNKLSQDPDLDDKLRNRKLYYYFMQLGRDVYTGEKIQLDVLLSRNSDYDIDHIIPQAMVKDDSFMNTVLVSQASNRNKSDTYPIPRGIVTENGKKWIQVLNSIHIGNQPLMPKEKMERILRTETNPLQQDEVIGFVNRQLTMTNQSTKAVADVLRISDPHARIIYSKAENVSEFRRLFNIPKCREVNDYHHAHDAYLNIVVGNVYDMVFSHGNNRKFTAEGLEWKKSHNESLKTSVDFLFTRDERKFMSDKLVWKSKRYELDSQNHPLIDPETGSLKEKIEEPLGDPSRHNLPTIDLIRKTIAFNDPMVTQMVSEQSQSSGFFSKVTLHSAKAGNASYPLKQKAPFNTGDWAKKYGGYGDLVTPYFMLVKSEGKKDKKTGKIHHLYSIEGIPSIYLAGKDKKEAIFDYLVNNLGLKNPEIVIPKLLIRTALELPSADKNSFVRVSITGRTGSYLATINLTELHLPQEQYAYFKKIARVLGTNSSANEKPDLEKYKNIGHDSICIHSYPVLTENENLKTFDVLVSVLQRPCFKNLPEMNNVIETLPSKREAFASLDTLKQAIVLQSVLELVSCKPVREDLSAIGLSKALGSKRTSKYLPAGTKIIFTSATGFYEKAVFTVPED

SEQ ID NO: 9441 - protein, 1346 aa, unidentified
  REGION 1..1346: note = Description of Unknown: Cas Enzyme sequence
EVSMKKIIGLDLGVGSIGWAVVNEAENDNEQSNIVRLGVRVNPLTADEQSNFEEGKSITTNADRTLKRSARRNLQRFRLRRNELVKVLKENNIINEDSCLIENGKNTTFETLSLRAKAVNEKVSLEEFARILLSINSKRGYKSNRKALNSEQEDGQLIDSIDVARELNEKNITPSQYCLELLQHGKETFPDFYRSDLQNEFDRIWNYQKQYYADILTDEFKNHIQGRSKTNVTKIFLAKYGLYAEDIKGSKKDIKSKGLQLKVEALTRKLTKEELVYVVAEINGQISGSSGYLGAISDRNKELYFRNQTVGQYLHNIIKTNPHASLKNLVFYRQDYIDEFDRIWDTQAKYYPQLTSDLKKKIKDNIIFYQRRLKSQKGLLDFCLFESKEIEIIVDGKKKKKRTGLRVCPKSSPLFQEFRTWQMLNNLQIISETGEKRYLDIEEKDKLFEELQYTDKLKKSEFLKLLLNKAKGYSSNYEELIGNRTIAKLYSVAPSIKEEVFIFNSAEDLQSQLIFRLWLLLYSYEGDNTPTGNGNLIARLENEYGFSKEEAKGLANISFEEDYSNLSSKAIKKILPFLKEGYQYDEACLLAGYKHSEQSLTREEIDNKILKDKLDLLPKNSLRNPVVEKILNQMVNVVNALIEEYGKPNEIRIEMARELKKSAAERDSMTKAINDNSKLNEAYVKEIKDYYHFTHVSRNDVIRYKLWKELESNGFKTLYSNTYIPKEEVFDKKFDIEHIIPQSKLFDDSFANKTLELRDINIEKSNETAYDFVANKYGEEGLQQYLNRIENLLKSNKIGRTKYRNLKTKLTDIPKDFINRDLNDTQYISKKAKEMLLSIVKEVNTTTGSVTDKLREDWQIVNIMQELNWDKYSALGLTEVIENKDGQTIRKIKDWTKRNDHRHHAMDALTIAFTKHSYIQYLNNLNARSDKSGSIYAIEKKELYRDEHNKLLFNPPLPIDEFRSEVKKHLEQILVSIKAKNKVVTQNINKTKRKGGTNRVIQLTPRGQLHKETVYGKRQRYITKEEKVGGTFSKEKIMTVCRKDYREALLNRLEEYYNDPKKAFTGKNSLEKNPIYYNLALEKKVPERVKTVSFETIYTIRKEISKDLKLDKVVDVRIRKILEERLKEYNGNANEAFSNLDENPIWSNKEKGIAIKRVTITAINNAEALHDKKDNKGNLILDSEGNKQPVDFVSTGNNHHVAIYRDENGDLQENIVSFYEATARAINQEPIIDKNYNSDKGWKFLFTMKQNEYFLFPDDKGFNPTELTKDFILNEDNYSILSPHLFRVQKLSTKNYCFRHHLETKVENAKELNGITYKWQLGLNGIASILKVRVNHIGKIVAIGEY

SEQ ID NO: 9442 - protein, 1041 aa, unidentified
  REGION 1..1041: note = Description of Unknown: Cas Enzyme sequence
MPEQPKMTYVLGLDLGAESLGWAILETRDGEPVRIERTGVHTFEAGVEGDIESGKDESRAKARRDARLPRRQLWRRAARRRKVLHILQRHGLLPPGEARTPEQIHDLLLKLDADLRAAYLPAGDEVAAHLLPYRLRAKALDEKLEPWALGRVFYHLAQRRGFLSNRRSPERKDEDEGKVKAAIGELAADMKARGARTLGEYLAGLDPRCQRVRRRWTARTMFLEEFDRIWAAQAPHHPCLTEELRGQLRRALFFQRPLKSQKALVGRCELIPDRRRVALALPIAQRFRLLQKVNDLKVREPEGTERFLTPQEREKLARELDDKGDLKFDKVGKCLGLPQGVTFNLQEGGEEKLPGNRTYAKLKAVLGARWGGLSAADREQIVVELLSFQKPEALARRLMKVWNLDEPSATKLAEVRLEQGYARHCRKAIARLLPLMESGVPYATARKEVFPESFAAGTPVDRLPPVTDVLKDLRNPAVCRALTELRKVVNAIVRRYGKPECIRIELANDLKRPRKQREEISKRNRGRQKDREKAAEAIRSALPGLEPRRADIEKWLLAEECNWRCPYTGRSINAAALLGSTPQFDVEHIWPMSRSLDNTFANKTLCYHEENRARKGNRTPLEAYGSDPQRWEEILQSVRRFNGPLAWEKLRRFMAREIPQDFTDRQLQDTRYACRLAADYLGRLYGGRVDAQGKMRIEVRPGGLTAHVRNELMLHAILDDGGAKTRADHRHHAVDALAVGLTSQSMVQQLQTAAGRALQAGRRLFAPVPEPWTGFLEDARRSIGQIIVSRRPDRKVAGKLHAETFYSKPIPGADGDVRHVRKELRKLTLGEIQGDRIVDPVIRRLVQERHRQLGGGKPDSVFADPASHPVLRTRDGREVPIHKVRIRSKEKPWPIASGSRLRYVVAGGGTNHHLAIVARPGRRGRGEYWEDHIVSRYTAQQRLARGEPVIQKDWGPGRRLVMVLMPNDFIVMPDDRGVQQVYRVLSISEGDTELRLHCDARRAEDLKKARERVRVSGEKLRKLGGRRVEVSLLGELIGAHD

SEQ ID NO: 9443 - protein, 1061 aa, unidentified
  REGION 1..1061: note = Description of Unknown: Cas Enzyme sequence
MSAECQVRANEKNYVLGIDLGVLSLGWAVVEYAGDKPVGILKTGARIWEYSDASTLTVQKGQETPPGQERRQARQQRRQIFRRAQRLRRTCSVLQAMGLLDPGRRNSRARKQLWETVDQQAKEWLKSNIPGLADDPQLDHKFVYHLRAAALDHPLPKILLARVFFHLAQRRGFQSNRRVVSRSEEEGEVKNAISLLEHEISESGCRTLGGYFATLDPYTTRIRGRWTSRKMYQDEFERIWSAQIAINPGILDLSQKSRLFKAIFYQRPLKSQKRLVGRCSLEVIVRRGPDGPREVRPRQAALASLEAQRIRYMQRINDLEFTDPEGERRTPTQLEREQLYQLAETVEEISFSQIRKALGIPTGKKGAEWECNLERGGETKIPGNKTAARLRKILGNKTWDGFSESDQKKLVDTILAYLSPEALQSHLENVWKFDSDTARQLSNIELEQGYHSFSRRAIRKLLPLMHQGKRLNEAIKAVYGHTGRLRSVQERLPPVWKVMPELRNPLLVRALTELRKVINNLIRKFGKPQYIRIELGRELKLGKKRRQELAKEMRKREAERERAAKVIEETLHRKARPNEILKYLLADECDWECPYTGKKISVLTLLGDQPQFDVEHIWPFDRTLDDSFGNKTLCYHEENRQVKGNKTPFEAYSDSPDRWREILERVKRFKGPFAKEKLRRFLAADIPQDFPMRHLSDTRWITTAAADYLGYLYGGRIDSEGRQRVFTVTGPLTALIRRGWNLDGILGGPEKNRFDYRQHAIDAIVIALIDQAIVQQISLLSSRLWGTDRPTAVQLPEPWPSFYHDAKNAILNIVVSHRISRRLSGALHEQTHYAPPDNNGRTKIRKPLAALSAKEVENIVDDTIRKYVQHALANAEKKSPKEFFGNPENLPVLKGKNNHVAVVKSVRVWVSAKPVAVGNGDRVRYVKPGNNHHIEIYAIVDEHGNPVKYDGRCVTLLEAVQRKRRGEPVVCRNHGPNTRFLFSLSKNECIEWTNENGEKELLRVVGIADNDIEFRLLYDARPSNLVREAKDRIRGGYSKLFERRARKVLVTPLGEVLPAHD

SEQ ID NO: 9444 - protein, 1107 aa, unidentified
  REGION 1..1107: note = Description of Unknown: Cas Enzyme sequence
MSRILGLDLGTNSIGWAVVDPEEKQILGTGVRIFQEGVENLGQGQREISRNATRRETRSARRQHFRRKLRKKLMLELLRKHNMCPPAEDEQAMKEWFRMNPYVLRKKALYEEIRLPELGRVFYHMAQRRGFQSNSRIVKEDEGKIFEGNPSEGKIGINSTKEGMSSYPTLGAYLASIDTRNERIRNRYTTRQMYIEEFEKIWEAQNKFHPEMDFSLREAIGGRKMDKEKYGYARDGVLFYQRPLRSQKYLIGKCRFEPKKHRCPVSAIPFEKFRACQFVNTIECNGEKLSREDREKAVSFLLSKDKTTFKNIRKKINKLDSCYHFNYQDEDKIVGSQTISQLSSRKFFGEKWHQFSEEEQEKIWHILFSFDDKRLLKEYAMNRWGFDEEKARKIAGFGLKQGYAGLSRKAINNILPFLQMGFTYDVAAVLGGVKNAFGEEWEQLDEGKRQLVLDHIPEIVHSRKKGGFMNDVRTFLTEQFALDETRLKKLYHHSVETDNGEILDKLPVDTDADREIQAIRNPVVVKALFEVRKVVNGLIDQFGPFDEIRVELAREIKGSKEDRLRIRWEQQENEKENDRIRDILLQHNQPVNHENILKYKLWEECQHICPYTGRQIGIDQLFSGEVQIEHILPWSRTLDDSYMNKTLCFADENRNKGDRTPYEYYTEKGTWEEVRQRALTLFKNSPEFPKRYAKFRRFTQKQLDDDFARKQLNDTRYLSREAKRYLKKVCRTVNVASGGITAKLRYMWGLDSILNPGAQKKSRDDHRHHAVDALTMAALTLYHVQQLSHWNRYRRTGTEPRFPDPWEDFRFQAKRSIEQILVSHEKKNRVITRRMYKARKNGKEYRNLGLAARGPLHKEYIYGKRTTNGEEAYHIRKPLASLDTQAQVMKIVDPVIRGLVLNRIEKLGGFKGKKVPENTYVEMNENGETQWMIHLPGKQGEQVPVRSVRIRENLGYAARLKKDVNQHVNLRNNHHVMIYEDRNGNLNEQVVTFWEAVRRKINKEPLYQLPPDGEKIHTVLKVNDLFLIGLEISADMQNIPRERLARHLYRVQKLSSMYYTFRLHTASTIDNPSDEIRIVSFKKWKQLNPVKVRLTITGHITGIDKPC

SEQ ID NO: 9445 - protein, 1002 aa, unidentified
  REGION 1..1002: note = Description of Unknown: Cas Enzyme sequence
MSEITLGLDIGSNSIGWALLNLDENPSIINVGVRVFQEGVNRDTKGAEISKNETRRMARGARRNRFRRNYRKDKLLRLMKRNGLLPKEASTNGEIFLLNPYQLRAKGLDEKLSLHEFGRVLYHLNQRRGFLSNRKSGKAKDDGIVIKSAGELQQKMDAQGARTLGEYFSRIDITQERIRDNYTFRGMYQKEFDLLWEKQSSFYPEILTPELRQTIADETIFYQRPLKPTDELIGDCALEPDHKRCPRGDWHARRFRILQDVNNLMVCEPDGRKRILTEQERSIALKELFGRKEVGFDSLRKKLGLIENQTFNFEEGSLDKKESKLKGDFFASEMSSKKILGKKGWEALDIATQIEINDLLLDDNLADEEVVEMLKQQYGFSDEQAEAAIKISLPRGYMTYSRLAIQKLLPHLERELRTDEAVQAAYGHIHSVQDTGQTVDFLPLPEDLRNPIVNKALIEARKVINAVIQTYGKPGKIVVEMARDVKGNAKEREELRIKMNRNEKENERARHELIHNMGITRPTRDDILKYKLWQECGRECPYTGRPISQQALFGEHPEFQIEHIIPYSRCLDDSFMNKTLCYVDENRRKGDQTPYEFYKNSDQYEHMLQRIRKLPYPKRQKFTQKEVSLDEFIKRQLNDTRYITREILRYLKQLGCTVTGSRGKVTSELRHQWGLNSILESDLPGPKNREDHRHHAIDAVVTALTNQKHLHELAATKYAVAHDGFPVPWEGFRDAVAQAVNKIQVSHRVTRKVSGPLHEETSYGPTGLKDDKGQDIFVYRKKLEALTCPMVEKIVDPVVKEVVKTRLLEFGIDPKKKGSIPKEVWAEPLYMKSTKSAKVPIKKVRIRDVFNNMIPVNDEIGKPYRYVASGNNHHIEIFEYTDAKGNLKRNGKVISMFEAVQRSRQGKPVIYRDYGDGKRFVCSLAKNEMFMLEVEEGRHILHRVQKFGEVGGTIIIVLRPHTFAGKVNDSDKPPYIQRKTPNTLKGYKVTIDPLGRIFPAKD

SEQ ID NO: 9446 - protein, 1061 aa, unidentified
  REGION 1..1061: note = Description of Unknown: Cas Enzyme sequence
MTDDNTTHKRRYPGGHRVMPAGAVPARLALVMASTQARISYNTGIVGGQCGAVKRKVEIFLRSSTMAEYTLGLDIGAKSVGWAVVENGTRARIVAMGVRVFPEGVDREKSGLEKSKGASRREARGARRTRRRRTLRRTALIAALRGAGLAPADDGELAGLLSEVDPYPLRAKGLDEPLTPHEFGRVLYHINQRRGFKSNSKSAKQKEDGEIAKQAGLLQAAIEAAGCRTVGEYFARTNPEENRIRGHYTFRSMYEREFDLLWAKQAVYHPDVLTDHLCQQIRDRVIFFQRPLKPTDALIGECGLEPGEKRCAKAAWCARRFRMLQDVNNLRIHNPDGREVCLSDGEREIVLREMQQKAKVTFSSIRKKLNLLETQEFNAEYEVDEKGGRREALAGDAFSATMRSKKVFGNKAWDAMDEARKVRLNEAFVELEDDELVEVLAGEYGLSAEQMEAAMKVPLERGYMSFSRKAIEKLLPLMEAGKRTDEALDAVYPGRNQRAEGVGVERLPMPEDLRNPIVNRALVEVRKVVNAIAREYGKPKRIRVEMARDVKGSAKERREKHYKMLDNERRNAEVREKLRQDIGIARPTRDDVIKYKLWEECGHTCPYTGKHISQTALFGPNPDFQVEHILPYSRSLDDSYMNKTLCEVRENRVKANRTPWEAYGGDEQRFEQILQRVKTLPWPKRQKFQANELEGLDACIQRELNDTRYISREVVRYLKMLGVIVTGTRGSVTAELRHQWGLNTILDPTGSGEKNRADHRHHAIDAVVTAVTSNEHLRRLAESKYGNRGDGFAPPWEEFREEVEENVRQINVSHRVRRKVSGELHEKTFYGPTSETGIYVYRKDLTALTPAMVAKIVDPVVREIVEERLRACKIDGQRDKKIPKEVWNEPLYMRTTKSEKKVPIKKVRIRDVFGKTISFRDGSGSVYKTAKPGSNHHVEIFEYTNETDKSGRPRRDAVVVSLFDAVQRSKRGEPVVCRDHGPGTRFVCSLAINEMVLMDNGSGEMDLYRVQKMDVSKTVYFRQHTAATLEDEGTLIRKAAHVFEGYKVVVDPLGRVYRAND

SEQ ID NO: 9447 - protein, 1089 aa, unidentified
  REGION 1..1089: note = Description of Unknown: Cas Enzyme sequence
MKTYTLNSPPEDQSPVVRKWQESDFYSKAVVLGIDIGLQGIGVYLRKGPQELYAKTLLFDVPETGRLEARRQKRAWRHARKTRATRRVRLKALMERHGIPWVADEVLSKTDPFSLRHRAITGQLASPEALSICLRHLVDHRGFDYSAFAEEGAFPWGDGDSAKDVINWMNENFVNDEVAKDIVKKISQFDWNESDLEKFKSALKERKRWCKSNGIEQVLEKYHLENKPNLRTAARRHNFPRTMVEQHLRTIISRHMDLLTDPAVFLEELFFKPKTKSEKARAIFHYNRKTRAEAELVWRRRINKCPFAPDLGFGSIRVSPNSDPSVGAWKALEFLCMRRIEVSPKEGRAWLHKPSPETISKLVEIARQNRVLFTEKKKLTPWRDAKALLTTDITAICGKGVKPSKDSPMNESYFTQLEDIIKPTLANLRGNASISNAVAQLLFEIATASGTDFEPDTVKGRLNDAEFYNKRRSAFSTHVALYPQVEFLLGRRVHKGGAFKQASTGRLQRLFKELSEKLDGLECPDYCVVEVIRDAPRNQSQKAEYIKIQNERRKEREARFAERGSLDKGNSATRRRLALHHQQGGLSPYTGKSLPDPMDPSLEIEHLFPESRGGLSCDENLVLTTRDENDQKDNMTPREAAAENLPGWLSWSEMLKITSLMRWNRKKREVFAFEPTPGASIPDLGNTTRTSQLARQLVREVAAWMGADGDADAERKRIGTPSGWLAAQARKSWLEPEGYTKIRSSLVHHLIDAAVLSHIPPAEGLNLARYGGIFFNTKEGKTRALPEVGPKLEPWLVDSPALCSVEKPRSNSRTRSLGDETFWAILPPDEKGRRKTRQRTPLKHDDFTDGVALHAALVRMGIPSEKIPGMKALERWLVKAGGGSAAPLKLLDGTPVRNIHKFDGKGEFTMPLGWSAKPTKTGSLHGARLLDGKFDRMELWLGWNKKKGEWAYYTRLIPSKTALRHLEQTLPGWWKKSRIEVCGKLPPYARKVGTLRKGDQFLLPLGKDGKLSHSAPFVNWWFEVAAIRADGVLAMKSITHKSTDGTLMENAGIRALSQTPSSADVIARCMGFPEPKEKADELALKQTNP

SEQ ID NO: 9448 - protein, 1518 aa, unidentified
  REGION 1..1518: note = Description of Unknown: Cas Enzyme sequence
MTKILGLDLGTNSIGWAVVDKENRKIDDCGVKIFPEGVENVGQGEREQSNNATRRENRQKRRQYYRVRLRKIKLLEVLIEQGMCPLTVEELKLWKNWNKTLKSNGRQFPKSPEFSEWLKLDPYYLRFKALNENINPYEFGRILYHFIQRRGFVSSRKGKEDGTIYKGKDNMSGVDETKNLINSNTLGKSLYEIKPKDNVSYYKIFDENGKELRVRGRYTLRDMYIEEFDKIWEKQSINLKLNSKNILVKKVRFLKDSAIGKRSKSKIEHLKQSKGDDQVIVDGKKITTIDYKNFKEYLAGKIWYENGKIKFKSNESVLFWQRPLRTQKFLLSKCTFEGRKFYDKNINKWFYIGPSPILISHPDFELYRAYQFVNNITYGVKQNLDSEQKDLVIEFINKKEKDFDFAEIPKLLGLQSERFNFEDDYKVKGNPTIKQLKSFFSNEIWEKKYHEIWHCFHFYDDSDMLVEKLIKSYGLDENLSDKVKKVRLSEDYSNISLKAIHNILPFLKLGYKLSEAIILGGVRNAFGERWERFKSSHDEIINNVIKINRDKKNKEGEAVERIKIMLSDKLNQFGFIENDKAFRKLYHPSQQIEQKQQNDKLGNIENLRNPIVQQGLHELRRLINDLIEKYKNKGNENFYFDRINVELGRDLRNNKSKRYKIAQLNEENKKANNEAKERLAEFGLKPNRENITKYLLYKEIQSNSGNVICPYTAKSINIVDLLGTENRIQIEHIIPYSISLDDSFANKTICDANFNREKGELTPYQYYQKNGNPEIWGGAKSWKEIEHRTFKLLPYNKAKRFVSQTDFLPESFIQRQLNDTRFISKKAKEILSEICTDVRVLPGSLTSELRHLWGLNNIIQPVSDLELNDIVVDENETIPHIVIVDEYGRAVKAFPSFNLKPDGNKTHICIPGKIEKGKFNSYIFNDLIDAANYSSGKYWAMTKVVATHQYYSVFKEKPEIKENEILIKGRVQKGLFTHETLGRGLPVNVEDGSFWASFKINKTDFILANTGKKPKLKVGQLAYFGQISNGIFESNNYKCFTNFSNGNYWVILDLKLETINLFAIKYPKPLIKENQLVLQGDVNEDGEFIPEIDPDFVLRTQLAKGKFYTILEIVDDITEFYPLNAEIPKLEKGQSVIEGNVWLDKKTGEIRFDPKKNRDDHRHHAIDAIAIAFNEQSYLQKLSTYNAQLMDYRRGKNNKPTFDEPWDNFDIDVKEAVDKILVSHKQNKKVRTKISRKVNKNGKTYQSIGFSARGRLHREFYFGKHPRVLPDGGFETNKKGEIEYYYHIRKSITSIENSKHVEKIVDDGIKKIIEKRLTEVYNIDISKPYKIPEGFFFDNNKKPVLFLPNKNGDPVPVKKIRLRESIGNAVNLKSDLNQWVNPYNNHHVVIYKSYNGELKEEVVSFWTVIERQQQGEPIYQLPIDGKEIISTIQENDMFLLALNENQIQEINLQDKEPLSKHLYRVQKISSMYYTFRHHLASTINNEKEEISIRSFGSWIKYNPIKVRIDNLGNLKLIK

SEQ ID NO: 9449 - protein, 1191 aa, unidentified
  REGION 1..1191: note = Description of Unknown: Cas Enzyme sequence
MERILGLDLGVGSIGWALIEKEDTGNRIVDMGVRVVPLTSDDEKEFSQGNAITKNQKRRIKRGIRRGQDRFQQRRGFLERLLKKHHMFPDQALLKADKLELFGLRDKAVKEKVSLGELGRIFLHLNQRRGYKSNRKANTEENDKSEYLLAIAERQRVIQEKELTIGQYFYQELLNNRHFRVKQEVFSREAYIAEFNKIWNKQSTYYPEILSEELQEALRDNILYFQRPLRSQKSLVNFCQFENIELKETKENKILIRKVGPRAAAKTNPLSESCRIWESINNITIYDQTGERQTISLERKLELFSELQSKKEIKVNGILKILGFPAKQGFYADQKTEKTGLKGDELLINLKKILKDLPGAEDLLKLDLALVEVTRAARSTGDIMEFPEIDKEIEKTSYYQLWHCLYSIEDEGQLLRTLENRFGIPYELGKECAAMDLHKQGYTNKSIKAIRRILPHLMNGQVYSEACSSAGYDHSNSLTKWEKDTRELVQKLDLLKKGELRQPIVEKILNQMINIVNAIISEYGNPDKIVIELGRELKQSKEERNRTYSRNNKQEKVNKDHVKKLEEYGLRSSRKQIEKSKLFEELAEGAAKNTAICLYCGQPISYAAAMNGVEVEVEHIIPKSRLFDDSFMNKTLVHTKCNANKGNLTAFDYMQSQSEELFNSYITRVNGLVESGKLLSSKRAKLLMSASQIPDDFISRQLRETQYISRKAMEILLPVTRDIYPTTGSVTAYLRHTWGYDDILMNCHMDRYRQAGLTTFKDTQSGRKELIPDWDKRKDHRHHAVDALICASTTRSIIQRLNKMNKYVDLIDKDSNDPLARNLKVLLSDQRMFSTAEVQERVKVVCVSFKPGKRAAVKGKRRYRGEIIQQDVIIPRGPLSEETVYGKIMVMQKRVPVKQLFDNPDMIIKEYIRKAVKQRLHECGGDIRKAKSSISKTPILLEKHGNIPLEFATIWNEEYVVRYPLNDQFNKADKIVDPAIKEIVLQRLQKHGNDPKKAFRNLNEDPVFLDENNGITIRSVRCFTGLGNLKPVHKSKNGLTGAFDDTDPEAKDVDYVKPGNNHHVSVFEDENGKLYATMTTFWEATERVRQGLPVINKEHEAGYRFLFSLSQNEVFEYLEGTDRPVQERLYRVQKMSLNKFGDLNIWFRQQYETELDDSQNSKLLMKYINTRTVKHLREFNKVRVNIMGKIT

SEQ ID NO: 9450 - protein, 1392 aa, unidentified
  REGION 1..1392: note = Description of Unknown: Cas Enzyme sequence
MKRILGLDLGTNSIGWALVEENTKNPQENRIIKLGVRVNPLTVDEQTNFEKGKPITTNASRTLARSARRNLQRFKLRREHLMEILKKNKIVADESLFAESGKNTTFETQRLRAKSASERIELDELARVLLLINKKRGYKSSRKVKNDDEGQLIDGMSIAKKLYEENLTPGQYVYQLLISGKRQIPDFYRSDLNAELDKVWNFQKQYYPEILTDEFRKELEGKGQRATSALFWKTYEFNTAENKGSREEKKIQAYRWRNDAISRQLTKEEMAYVITEINNDINKSSGYLGAISDRSKKLYFNKETVGQYLYNQLQRNPHTRLKNQVFYRQDYLDEFEQIWETQSQFHPQMSKGLKEEIRDVIIFFQRKLKSQKGLISLCEFEQKEIEITQEGKTKKKLVGMRVAPKSSPLFQEIKIWQVLNNIELKNEEGKRYLDEDEKQVLFDEVNLKGTITGAKALKLLGQTDKTVKINFKNIEGNKTNQVLYDAYLKILYVEGYEILDLLKVKSNKDEVTLSDLDVSASEIKNMVRSIFETLNIDTEILEFNPELDGKAFEQQKSYQLWHLLYSYEGDNSPSGSETLYRLLNEKFGFSKEQAKIIGAVTFPQDYGSLSSKAMRKIFPYIKEHKYSDACVHAGYNHSKHSLKKEELKNRELKTQLEILPKNALRNPVVEKILNQMINVVNAVVEEYGNLDEIRVELSRELKKNAKEREEMTASINKATIEHEKYRKILQDEYGISMPSRNDLIRYKLYLELEKNAFKDLYTNAKIEKENIFTDKYDIDHVIPQSRFFDDSFSNKVLVPRQANLAKGSMTAIDYMETLGKESEGQFLSVIEDLFTTGAISKAKYEKLKKKGSDIGDGFVERDLRDSQYIAKKAKEILFQITPSVVSTSGSVTAKLREDWDLVNTMKELNLPKYRELGLTEMIENSKGEEKETIIDWTKRNDHRHHAMDALTVAFTTHNHIQYLNYLNARKDENHKQHANIYAIENIITEEIEKKNGKKKRRFKKPMEHFRSDAKKHLEEILISHKAKNKVVTQNINSTKKKVGVNKKQELTPRGQLHKETVYGAKLFLQKKEEKINVKFDQETILKVENKTFRNALLQRLEEFNKDPKKAFAGKNAVSKNPVKINDTENVPEKVTLAWYESGYTIRKPINADNFKDYKNIEKITDEGIKRILKKRLDEFNGNAKEAFSDLEKNPIWLNKDKGIAIKSVTITGVSNAEALHYQKDHFGKEILDEKGKRIPVDFVSTGNNHHVAIYQDADGNLQEQVVSFYEAVERVNQDLPIIDKSLNKDLGWQFQFSMKQNEMFVFPSEDFNPHEIDLLDEKNLKLISKNVFRVQKIATKNYMFRHHLETTVDENKALVGKSFINIRSCNPLLGIIKVRINHLGKIVQIGEY

SEQ ID NO: 9451 - protein, 1384 aa, unidentified
  REGION 1..1384: note = Description of Unknown: Cas Enzyme sequence
MKKILGLDLGTSSIGWALINEAEDETEKSSIIKLGVRVNPLTVDELSNFERGKSITTTADRTLKRSMRRNLQRYKLRRAALIKILKENKFINNEVILSECGNRTTFETYRLRAKSVDKEISLEQLARVFLMINKKRGYKSSRKATGQDEGQLIDGMSIARKLYEGNLTPGQLCLQILESGKKNFPDFYRSDLQSEFDRIWNFQKAYYPDVLTGYLKEQLVNKNEKATWAICERPMQLVGIKRVSKGFEARLETIRWRVRALSEKIDLESLAVVFQKINGQINSSSGYLGSISDRSKELYFRKQTVGQYLMSKLESNPNASLRNQVFYRQDYLDEFNTIWEKQSEYHSELSAELKKEIRDVIIFYQRRLKSQKGLISFCEFEKRQVEIESDGKKRTITIGNRVAPRSSLLYQEFKIWQNLNNIEVFHKGHLSRRNTSARVINAQLEGGERRFLDQEEKEILFKELFVREELKKPQILMLLFGNNKELDLNFTKIEGNKTFAAFYRAANEIVEVSGHERIDFGSQSADKISLSVKSILSALGCKPELFSFDSEIDPDKQLSYRLWHLLYSFEGDNSNTGIDGLIDKIAGLSGLQREYARILTNITFQDDYGSLSAKAIRKILPYLKAGNKYDLACMYAGYRHSKSSLTKDEIASKVLKNKLEILPKNSLRNPVVEKILNQLTNVVNAIIDEYGKPDEIRVELARELKNNAAERDEWSRMINEMTRAHEEIKKILQDEFALSHVSRNDIIRYKLYKELETNGYKTLYSNTYLPREKLFSKEFDIEHIIPQSRLFDDSFSNKTLELRDINLEKRDKTALDYIRDKYGDSGLEDYLDRIERLHNQTGQGISKAKYNKLRMSEKDIPKDFIERDLRITQYISRKALGMLGEIVRNVVPTTGAITNQLREDWQLVDVLKELNWEKYKALGLVEYYEDRDGRKIGRIKDWTKRNDHRHHVMDALTIAFTKHAFIQYFNNLNARYDKSSEVYAIEQKYFNDSKAKPPMPVNEFRTEAKKHLESVLVSIKTKNKVVTKNVNKWKNAGGIRRKDELTPRGQLHLETVFGCHNVPFVREIRVGNALTKDMIKLVTKPQYRDALLRRLIDNNHDPKKAFAGRNSLEKQPLYLNDQRTKQVPEKVRILSFEPVYTIRKQIDPGLNVDKVVDHKIRQILQDRIKEYGDTKKAFSNLDEYPIWLNKEKGISIKRVTVTGINNARGLHKKRDKEGHHITDSKGKSMLVDFVNTGNNHHVAIYRDANGELQENVVSFYEAVSRAINGLPIIDRDYRRLEGWRFLFTLKQNEYFVFSNQKTSFNPNNIDLLDPSNYNLISQNLFRVQKIATKDYFFRHHLETNVENNNMLKGIVWKRGGPGLLKDVVKVRVNHIGKVVETGEY

SEQ ID NO: 9452 - protein, 1596 aa, unidentified
  REGION 1..1596: note = Description of Unknown: Cas Enzyme sequence
MAKKLGLDLGTNSIGWAIRESDVDLRRQFLMDYKSYNEETDKDKKTLNNEFVDYGVVIFKKGVGDGKNGEFSLAAERRTNRSKRRLYNAKRYRKWELLKILIENNMCPLTLEELRLWSIGNWKQLEGKYKNSGRIYPIKNEFFQQWLAFDPTFFGQKGISNNNNLIRKNPYDLRCELLENEEENDNLKKLKTGRAFYHLVQRRGFKSSRKSGQSAYAKNEDIEKLKSEKPDFQISILAKNKLDNGERFRSSGVIQRKYFEDEFYAICRKQNLSNDLTEKLHNAIYFVRPLRSQKGLVGNCTLEKGKPRIPISHPKFEEFRALQFINNIKWRENGKKEFIEIPMLLKKKIFEELFFRKLEKGQNKGKISLENYFKFEEIIKDFSENGLYEFNYRNLPNVSTCPTIAALMNIFDTDWSEKFIQDKNKIGINWDGLQIKYTPKYGKIKRKIKDGKKLYVNKDFWEKTLRIDDIWHLLFDYIQTNDNAEKLEKFCTEVLGFDENKAKAFSSIDIPQGYGSLSYKAISNILPFLRDGIIYSEAVLFANLKKALGPQFEEKKEQAKIIITKTIKETGEKKELLNITNGLIQNFFADTEMTHAKGFDDIIKEMAWHDTTNKLKKHFGENDWNKKTETEKKTIENEVLTLYLRFLNGEQSKDEKASAKNNKEPDIDYYKIPRLDEAIKLNLKSGLNLDDKNLKYLYHPSDIEMYPASKTEKEFEINGYNHFIKLLESPQPPSKGWKNPMAMRTLHELRHLLNYLLKIGKIDKDTKIIVEMARELNTKNYRKAYSNWTKDKDNENINCKKSILELYGITDPSINDYNKYRIAVEQIINHELSENKNPIFYHKYNNFIETYLKTISISDKNKDILMSDEFYDYLMYLILNRDEFRKMLNFKIPNTSKWYHQLISTSFNFDKKRKELLEMLLKYRLWKEQKFQCFYTGQYISLTQLFSANYQIEHTIPRSISFDSELKNVTVCDSIYNSQVKKNCFPTDCLNYYEMRECKTVNGVMKCSPIKERVDKNILPKVKELYTRIKNLEVINIGLIDEEKRNANIQLRHYLQFELEYWEKKLITFTITKDKWKDKWKNSQLTDTQIISKYARAYLKTVFEKVDVQKGTVTNVFKKIYQIKGDEQKDRSKHSHHAVDAAVLTLIPGSAIREAILKEYYKAEENMQKYHTIPYEKYISSHVHDIENNILINHIVHNKTLTATLKNIRKRGNKTGKTANGDSIKGQLHEETYLGAIKPNIFNVKGKAIKDSETGKYLNKQINGDDVIWVVQRKNINDVDIDAIVDEALKNHIKSQLANKIEIKDVKDFADKQIRHIRFKKFSPSYDKTLKVKSHTYSSKYKHKLLYLTNNDSNYLCLFYKGVDNRNREIKAFKFINLFEFSNLENKKISSLSSNPKYNVFIKINRNNEFHLYLTNIINVGQKVIMYKDSIDEIARQNLVDLSNKIYRVYKFNNSGTDYIFLQNIIEARNDDDLKKAGYKTEGETEYNPSKYQPRLKLSADNLNCLFENIDFEIKPDGTINWKSDNNNSTEEPSAQYTSPKKITVSQSPEDAENSQLDYWAKLTPEQRFEKFLELMNRFYKFVKPDWSTKKIILDL

SEQ ID NO: 9453 - protein, 1534 aa, unidentified
  REGION 1..1534: note = Description of Unknown: Cas Enzyme sequence
MKKILGLDLGTNSIGWAVVSANDENNNPRKIEDVGSRIIPMDAEEMGKFNSGNSISKTAGRTKFRATRRIKERNHLRRERLHRVLHILGFLPEHYDNQIGWDRLEQKWYGKFIDNQEPKLAWNEINGKNQFLFMDSFNEMLKEFAVNQPNLVIGNKKVPLDWTIYYLRKKALLEKISKQELAWLILNFNQKRGYYQLRGEDEEDSTKTIKTRKYFDKKKILNIIDYGKEYKGLKVLVVELEDGNKGKIFKKEIPKWIGLEKNIIATVDVDISGKDKYDEDGFLSQRFSIPTDAEWDTEWKLIKLKTEKDLIDSQKKVGTYIYESLLQNPSQKILGKLVRTIDRKYYREELEEILNTQTKFHKELRDSTIYAKCVDELYHTNYSHRQNIANWSFTDLFVKDILFYQRPLKSKKSLISECPLECRYSYDGERRGIKCIAKSHPLFQEFRLWKFIANLKIYQREKIVDGKLHYDYDATQEYLKNEDDYVMLFEWLNDRKDIEQNVFLGQYLKLNKTKAQEFRWNYVEDKSYPCNETRAAILSNLKKANISNDFLNDDIEQKLWHILYSVEDKFEIEKAMTKFAKKYNLEENFIAIFKKFPPFKKEYGSFSQKAIKRLLPLMRMGKYWEEKEIDFNTRIRIDKIISGEFDEKIEKRVREKAINLTELGNFKSLPEWLASYVVYNKFSEAKEITKWENPKQLDEFISSFKQHSLRNPTVEQVILETLRTVRDIWIKQGHIDEIHVELGREMKNDKKERERLTKMVTENENTNHRIKAMLTEFKNAEYQIDGVIPYSPKQQEILKIYEEFALGNLNKEDRDFEFISKIAKNSQPSKSEILKYKLWLEQQYRSPYTGEMIPLSKLFTTDYEIEHIIPQSKYFDDSFSNKVICESVVNKNPYKDNQLGYEFIKNNEGRIVPELSNSHKTVKIFTKEAYERFVKENYSGVKGKMKKLLMDEIPQDFIERQLNDTRYISKEIKRLLSNIVRVKLEDGEYEQEATSKNLISVTGSITSQLKQEWGLNDKWNEIILPRFERLNEITGTNDFTAYNKEGHKIPRVPFELSKGFTTKRIDHRHHAMDALVIACATRNHVNYLNNESAKDENKRYDLKHSLCYKSKTDDKGNYKWSFIKPWDSFPQDVKHSLDNVVVSFKQNLRIINKTVNYYQKFDENEKKQFVKQLSGENWAIRKPMHKDTVYGEVNLRKIKDVTLNIALENPKAIVDKELKNKLIELQTTGLNSKKIKKYFAENKDVWSDTNLEKIKVYYFTKNTKERYFATRKPIDTSFNKDKIESSITDLGMQKVMLKHLELYDNNPELAFSPDGIETMNRNITQLNGGKNHKPISKVRVYEKADKFAIGNSGNKDKKFVEAAKGTNLFFAVYQVEKYNEKEDKIEVSRTYYTIPLNEAIERLKKGKKAAPETDQNGNKLLFVLSPGDLVYVPDKDEVTNSININHLNKSKIYLLTDSSDKTANFIPHTSSSIIFSLSKKEQEKRNISYCIQDEYGVGSPQSKNQKTISGEMIKEICVPIKVNRLGHIVSVGEY

SEQ ID NO: 9454 - protein, 1525 aa, unidentified
  REGION 1..1525: note = Description of Unknown: Cas Enzyme sequence
MNTKNILGLDLGTNSIGWALLAKEENANSKIINAGSRIIPISQDILGKFDSGVSISQTAERTGFRGIRRLRERYLLRRERLHRVLHILNFLPEHYSDKIDFKKRLGQFMPETEPKIAYKQSEEGRKAAFLFKKSFNEMLEEFAKRQPQLLENGKKVPYDWTIYYLRKKAITEKIENEELAWLLLHFNQKRGYYQLRGEEEEETPNKLVEFYSLRVTDVKDSGDRKGQDEVWYNVHLENGWVYRRTSKIPLDWIGKNKEFIVTTDLNDDGSIKKDKEGKEKRSFRSPAENDWTLVKKKTEQEIDKSKKTVGEFIFETLLNNPAQKIKGKLVRTIERKFYKDELKRILETQQSLNPALQDKALYKDCLEELYEYNETHKKSINEKDFVHLFLNDILFYQRPLKSKKSLISDCRFESRVFIKDGKKEIQPLKCIAKSHPLFQEFRLWKFIQGLRIYQREKEITGKLQTDVDITEELINSTEKIIALFEWLNDRKDVEQKPLLNWLLKPLKLKANNYRWNYVEDKIYPCNETRALILSRLGKVANVADNFLNPETMEAIWHILYSVEDKIDIEKALNTFAKKNNLDDLFVEVFKKFPPFKNEYGSYSAKAIKKILPLMRIGKYWNAENIHIQTKERIDKITSGEYDEKIRDRVREKSRKLESIEDFQGLPEWLATYIVYDRHSEAAETNKWTKVSDIRLLEQHRLRNPIVEQVINETLQVIKEIWKRYGNQNEKFFDEIHIELGREMKNTKADREKMSKQISENENTNLRIKALLSEMLNDNDYENIRPYSPMQQEILRIYEEGALNAEEGKIPEEILKISKQAQPSSAELTRYKLWLQQKYRSPYTGEIIPLNKLFTPAYEIEHIIPQSRYFDDSFSNKVICEAVVNKLKDNQTGYEFISNFKGSTIPELSTPNKTVKVFTIENYEKFIKENYAKSRGKMKKLLMDDIPEAFIQRQLNDSRYISKVIKNLVSSIVRGDDEQETVSKNVISSNGIITSVLKQDWGLNDVWNEIITPRFERLNGLTNSKNFGEWVNKEGKRVFQTQVPLELQKGFSKKRIDHRHHALDAIVIACATRDHINYLNNESALEKKSKEEKEKRRYDLRHKLCIKKYNDETKVNYRWLFKKPWESFTQESKAILNDIIVSFKQNQRIINKTVNKYQKWVKEPNEELVKKLVPQEPENNWAIRKPMHKDTVSGLVKLKFKKEVSFSVAVNNWDMIVDKNLRKEIKRLIDAGHDRKKLSKYFKDNNYQFNDKDISRIEIFFWDIDKAGKANNAASRVKIDETFNESMIKCITDTGIQKIMLNHLKKYHEEKNGKIIEHPELAFSPDGIDELNKNIKELNNGNSHQPIYKVRTYEPKGNKFNIGQTGNKRDKYVEAAKGTNLFFAIYESPNGKRNYETMPLNIVIERMKQGLAPVPEKNESGDNLLMQLSPQDLVYIPTEEQIKQNIKIDLRSAVQKNIGRIYKIVSFTGNRLSAIPYYVATSIVDKAEYTQLNKLESSLDKLSIKEFCIKLKVDRLGNIIPFQPRK

SEQ ID NO: 9455 - protein, 1080 aa, unidentified
  REGION 1..1080: note = Description of Unknown: Cas Enzyme sequence
MARTLGLDIGTNSIGWCLIEDGKKIIGMGSRIFPVGVKEDSYAKSGTEESRNAARRAARGIRRGYDRYKQRRGKLEALLTEHGMMFDKTTSLPTKKLYGLRKEALDRKLELQELGRIFFLMNQRRGFKSNRKEAAKDGDDAKKLTAYKQAMSDFEARLQASGLRTVGEYLASMFDDPPENWHNENEPRERIREHQRIKRELYQQEFDLIWAKQSSYHPAVLTAELKDQLRDKVIFFQRKLKSAKHLVSKCRFEPNKRVMAKSDPLFQEFRMWQRLRDIRVTHGENRVNDPLTNEERGTLAAELGGTASLSKTEIKDLLGFKRSATFNDIGEKLLGNVTVARIKDAVGEDWYWKQDPEKRSKLWHTLYFAEDEGWIEAYAQKSLGMNDEQAKRYAEVNLELDYGSISHKAAQKILPHLVDGLDFASACQQAGYHHSQRELDDPSRMLEAKLNTSKMEPIRNPLVQMTVNETARLVNAVIEEHGKPDLVRVELLRDLKKPKAVREKMRNSMRDKEKLRDEYRAFLQAKKVLPEIRMSDIKKFELWLELEYSVTALEQLDPDVDLMAFAKFADAVSSKDKDKFHLWLECGRVSPYTGEMIPLNKLFTEAIHVEHILPYSRSIDDSFVNKTLCEDHVNDAKGNLTPLEYFEQKRTPADLKAFKQRVKNFSQGKLDKFLATEVKDDFLNSQFTNSAYIGTEVRDLLRTTCKDVRVTNGQLTSLLRNRWSLNRLLNNEADQKNRDDHRHHAVDALVIACTTQSLVQKISSESKFDHTGWQQLPDIGLPWSTFRADVGAKLSGMLVSYKGGKRLLSTKLNKYRHSKAHEGKPEKYQRTVAVRGPLHEETLYGRITIQGKGTKEETYVVRKALTTLTKVEQLENIVDPIVRKTIQDHVAAHNGSLKEAMKIPVHMPVKESNKGKLIPIKSVRMRVNTEEMVELRPMTFVEPGNNFCIAIYEDTKGKRAFRTVSFFEASKRALNNEAIYPPEVEGKKLLMALQQRDLVVLYDKHVDEIQWGSPNWLAQHLYMVRKFDRLGRIGIVLHKASNVDLSKPKDRPEGTSYVVRVGNFSGLPVRLNELGQLVRK

SEQ ID NO: 9456 - protein, 1523 aa, unidentified
  REGION 1..1523: note = Description of Unknown: Cas Enzyme sequence
MKKILGLDLGTNSIGWALVTPEESKIWGMNSRIIPMSQDIIGDFEKGNSVSQTKARTGYRSARRLHERHLLRRQRLHRVLNLLGFLPDHYAKYLDRYGNFMNEKEVKLPYISEPNKKAEFLFKDSYNEMLVDFRKNQPQLFYLKPNGEETKIPYDWTIYYLRKKALSCKISKEELAWLLLHFNQKRGYYQLRGEDEENKEEKFEIIAQKVLSVKKGLKDKKFEKFEYSAELENGLIYKASFYSSIEHWVGQVREFVVKESELKDGTKKTSISFLPTFDEIDRMDKKARDKMYSKIKIKTEREISKTGKTVGQYIFDTLLQSPDQKIRGKLIRTIERNFYKDELEKILACQIALHEELRDDSLYKKAIEALYESNIEYRSTISKTDFKHLFVDNIIFYQRPLKSKKSEISDCAFEYRKFKNKEGKEVTKPIKCISRSHPLFQEFRIWQWMQNLRIYEREKYVNDKYQTDVDVTNEFLGSEVDYVRLFDFLFDRKEVDQKALLKHFKLNVKTHRWNFVDDDKKNYPCNETHVQIVNRLLKVEGVPAGFLTQEKETALWHILYSVKDNEEIKSALGKYAVKNHLDKESFIENFKKYPLIKCEYGSYSEKAIKKLLPLMRLDKYWNKEQIHPETKTRIVKIIYGECDEKIRNRVREKAINLTDIEHYRGLPLWLASYIVYNRHSESGDSQRWETVANIEKYLKEFKQHSLRNPIVEQVVTETLRVVRDIWKQYGNENERFFDEIHVELGRDMKNNAEDRKTISEGNLKNETTNLRIRAMLSEFVKPEYMIEGVRPYSPYQQEALRIFEDGIINSGIELDEDIEKISKSPQPTSAEILRYKLWLEQRYRSPYTGEIIPIGKLFTPEYEIEHIIPQSIYFDDSFSNKVICESVVNKKPYKDNQLGFEFISSKGGCTVPELSTKEHTVKILNKEQYQDFIKCNYSKNKTKAKKLLLEEIPEKMIERQLNDTRYISKLIKNLLSNLVRDERDDDGFTSKNLIPVNGAITNALKQDWGMNDVWNDLMLPRFERLNRIVGKEIFTTYNESHRKLIPTVPLEYRKGFQLKRIDHRHHAMDALVIALATRNHVNYLNNQTALDKTKKKSKEEKQKDRQDLKRLLCYKAKADAQGNYKWFFHKPWESITQDARYKLETTVVSFKQNMRVINKTVNYYQKFEEGRKQWVQQVKGENWAIRRSLHTPMPYGKNVYDFDVLKIHENIRKREFIIDDNIKKQINKLMDENDKKVGLVQSLLKKNPLIDRNGTKIIETAFRIRTEKFRKRKSIFDLANRSSQGGITSIDQAIKLINKVSDYSLRRDLLSHLQEYNRDLDKAFSIEGIEKFNQKRSNAVYKLPIAESGERRLQLGNKISNKHKYIESDTGANLYFAIYQNEAGERSYDSIPLNVVIERLKQGLIPVPEKENHILLFWLNPGDLVYLPSIDEKGNNPIFNQDEINKDQIKRIFVVNDFSGNTIYFTPCTHAKNIVPKEVDMFYDESKNKITGSFDNKTASFDGKQIKEACIKLKIDRLGNVSV

SEQ ID NO: 9457 - protein, 1325 aa, unidentified
  REGION 1..1325: note = Description of Unknown: Cas Enzyme sequence
MKKILGLDLGSASIGWAVINENEENSKTACEILGLGCRIIPYEGTEGKDFAKGTGESRNSLRTQARTARKGYDRYQLRRKYLVDILIKNNMMPDDALKALPKKQLWALRDKAAASEISPKELGRILLWLNQKRGYKSSRSDANLDKKDTEYVATVKSRHDKIKELNLTIGQYFYNELTKDEYFRIKENIFPREANIEEFDTICKHQPYLSQELIDKIRNEVIYYQRPLKSQKGLVSVCDFEGFWTKKEGKEYFVGPNVAPKSSPLFQLAKMWENINNIKINSRTGGDVVLTSEQKWALFEHLDNNEKLTQTDLLKILNFKKENCYVNKQLAKGLQGNVTKFAIKKCFASPNEYDNLLKLDLNIIEGKGEGYLYDKKTGEILDAKPIKFIDPLVEKEPFYQLWHTIYSINDQAECSTVLQKKFNIDKITADKLAGIDFAKFAFGNKSAKAIRKILPYLMEGAGYSEAMSYAGYDHSNSLTKEQNLERKLLDQLKPIAKNSLRQPIVEKILNQMVNVVNAAIEQYGKPDEIRVELARELKQSKEERNDTDKAMNERQRQNEKYAKSLAEFGLRATRNNIIKWRLYEEIDKQDKKMNAMCIYCGQPISLTEAIKGNDVDIEHIIPKSKLFDDSQSNKTLAHRHCNKNKNDQTAYDFMKGKSEQAFHEYVERVNMLYDNHIIGKAKRDKLLMTESKIPKNFIDRQLRESQYIATKAREILQSICHNVWSTSGNVTAELRHLWGWDDVTMNLQMPKYKDLGLTETKEWESEHGQNKHTKEVIKDWTKRDDHRHHAVDALTIACTRQGFIQRFNSLSSSKTREDMYAEVEKCSDLFNEKRSLLEKYIISQKPIEVKDVENAVSGILVSFKAGKKVAVKGTRKTGKKGNKKVVQTGIIVPRGSLSEESVYGKIKSIEEKKPVKYLFENPHLIFKPYIKELVENRLLHYDGDTKKAIASLKKEPIYLDKEKKILLEYASCLKEEFVIKYTVNTDFNKVDKVIDLKVKEILQNRLNKFNNKPKEAFKDVQHEGKTLLKWYEDEGLERPIKSVRCFTGLSAVVPVKKDENGKNIGFVKPGNNHHIAIYKDSEGNHVEHVCTFWHAVERKKYGIPVIIHDANQVWDKIAEAPEDTYPESFLVKLPLANWKLNLSMQQNEMFVLGMSQEEITLALESKDYMAISGKLYRVQKIFCNPLAKQIEIVFRHHLETQLIDDSNAKASRRFIKVQSLGALFSLQPFKIKIDCLGNISLTNPLNKSNRNSYDSDNTAKEPVNSYATTQKITIFQSPEDAKNSQLDYWAKLTPEERFERFLELMNRFYKFVKPDWSTKKIILDL

SEQ ID NO: 9458 - protein, 1533 aa, unidentified
  REGION 1..1533: note = Description of Unknown: Cas Enzyme sequence
MKKILGLDLGTNSIGWAVVNADEKVCENEETLLNLSGIDSSGSRILPMDAAQLGDFEKGNTVSQTNERTGFRGTRRLIERNLLRRERLHRVLDIMGFLPAHFADKLDRYGKFTDDSELKLAWKKGAEGTYEFLFKDSFNEMIAEFKKTQPQLFHVQSNGKEPKIPYDWTIYYLRKKALLQAISKEELAWLLLNFNQKRGYYQLRGEDEEKKENQLVEYHPLKVVSVEDSGEKKKDEVWYNVHLENGWIYRRSSKTRLDWEGKTKEFIVTTDLNDDGSPKTDKEGIVKRSFRAPKEEDWTLLKKKTELDIDRSQKTIGTYIYDALLEKPAQKIKGKLVRTIERKYYKEELRLILEKQKNFIPELQDKDLYIKCLNELYSINDDHKKNVRNRDFTYLFIDDIIFYQRPLKSKKSLIDDCPYESRFDKDGNKRTVKCMSKSNPIYQEFRLWQFISNLRIYQREKDISGNLKTDVDVTSEFLKSEEDIVALFDWLNDHKEIDQKGLLKYPAFKLGETIEKFRWNYVEDKTYPCNETRALMISRMKKAGIDKKNFLKEKEEERKEFEMKLWHILYSVEDKLEIQKALKKFAANNDLPDLFVEAFSKCPPFKKEYGAYSEKATKKLLSLMRMGKYWNDDKIDLNTKDRIDKIITGEVDETIRNRVREKAINLKSISDFRGLPVWLACYVVYDRHSEAKDIIKWENPSDIDDYLKSFKQHSLRNPIVEQVITETLRTVRDIWKQVGHIDEIHVELGRDMKNPADKRKKISEQISDNENANLRIKTLLTEFKNPEYEIENVRLYSPSQQDLLRIYEDGVLNSVSEIPEDVESILKKFKEIDEKKRPTSSEIKRYKLWLEQKYRSPYTGQIIPLAKLFTSAYEIEHIIPQSRYFDDSFINKVICESEVNKLKDNALGYEFIKKHHGEKVQLSQGKIVEILSVEDYVKFVKDNYSRSRLKMQKLLMEDIPDNFIERQLNDSRYISKVVKSLLSNIVREKDENGNYEQESTSKNLISTNGSITDYLKRDWGMKDVWNRIILPRFQRLNQLTNKKFTTINAEGHEIPYMPLELQKGFNKKRIDHRHHVMDAIVVACATRDHVNLLNNEAAKAQNQANRYQLSHKLRRYENIMIAGKERSVPREFIKPWDTFTEDAYAALEKIVVSFKQNLRVINKTVNKYQHYENGKKVFVKQEKGDSWAIRKSMHKDTVYGEVNLQKTKDVRLSEALKSISSIVDKVLKNKIKELVSQGYDEKKIIKYFENNKDVWAEVNLAKIKVYTFSKDTKDRYFAVRKSLDASFDRETIESVTDTGIQKILLRHLENKGNDPAIAFSPDGIDEMNRNIVALNNGKLHHPILKVRKYEKGDKFAIGEKGNKKAKFVEAAKGTNLYFAVYESINIDKKTNEETKSRSFVTIPLNVIIDCQKKSGKFWENTLDCVLKEKGIVTQDGRLLFTLSPNDLVYLPENGQIISDVASINKGRIYKMVSSNKTGCFFIQSNVAKSVVDKSEFTTSNKMEKAITGEMIKDICIPIKVDRLGNIIEVFKSV

SEQ ID NO: 9459 - protein, 1249 aa, unidentified
  REGION 1..1249: note = Description of Unknown: Cas Enzyme sequence
MKKILGLDLGSASIGWALINENVEDGITKNDILGLGCRIIPYEGTEGKDFDKGTGESRNSLRTKARTARKGYDRYQLRRKFLLETLIKNNMFPDETLKSLPKMQLWELRSKAVNSPVTLNELGRLLLWLNQKRGYKSSRSDANLVKKDTEYVATVKSRHDKIKELNLTIGQFFYNELVNDEFYRVKENIFPREAYIEEFDAICNNQKQYHATVLTNELIDKIRNEIIYYQRPLKSQKGLVSVCEFEGFWRKGKDEKEYFVGPKVAPKSSPLFQLSKMWENINNIKIGNRTGGDIKISTEQKWKLLDHLDNNEKLTASDLLKILDLKKDNCFVNKQLAKGISGNITKHAIRQCLGDLAKYEHLLKLELTIVETNSEGYIYDKSTGEVLETKKIKFLNPNIEKEPFYQLWHTIYSINDQEECSRLLQAKFQIEQPIADKLATIDFSKHAFGNKSAKVIRKILPYLMEGDGYSEAMCYAGYNHSNSLTKDQNLQRKLLEQIKPLAKNSLRQPIVEKILNQMVNVVNAIIEKYGKPDEIRVELARELKQSKEERNETDKSMSKRQRENEEISKRLAEYGLRATRNNIIKWRLYEEIDNQEKKLNAICIYCGQPISLIEALKGNDVDVEHIIPKSKLFDDSQSNKTLAHRHCNTNKNDSTSYDFMQSKSEQALNEYIDRVNTLYANHVIGRAKRDKLLMTESKIPDNFIDRQIRETQYISKKAREILQTICHNVWATSGNVTSELRHLWGWDDVTMNLQYEKYKAVGLTHTVDWESEHGKNKHQKEVITGWTKRDDHRHHAVDALTIACTKQGFIQRFNTLSASKTREDLKFEVDKRSIEFKEKLNLLEKYLVGEKPISVDEVENAVANILISFKSGKKVAVIGKRKIGKRGNKKVVQTGVIVPRGQLSEESVYGKIKIKEKKPVKYLFENPHLIYSPKIKSLVENRIVKYEGDTKKAYASIKKEPVYLDVFNKEALANGTCYKEEFVIKYTVNTDFNKTEKVIDKKIKEILQKRLDKFAGKPKEAFKDVQGENKTLIKWYDDEGLERPIKSVRCFTGLSAVVPVKKDEQGNDIGFVKPGNNHHIAIYIDNEGNKHEHVCTFWHAVERKKYGLPVIIRNANEVWDKIQLQPEGTFSESFLEKLPDVKWILLMSMQQNEMFILGMTNEEIEMAFFNKEYKTISEKLFRVQKMSLKPSSGQIDVVFRHHLETQIIDDSNSKISNRYINIQSLKALFLLNPFKVKIDCIGIITKFNN

SEQ ID NO: 9460 - protein, 1325 aa, unidentified
  REGION 1..1325: note = Description of Unknown: Cas Enzyme sequence
MKKILGLDLGSASIGWAVINENEENGNTACEILGLGCRIIPYEGTEGKDFAKGTGESRNSLRTQARTARKGYDRYQLRRKYLIDILMKNNMMPDDALKALPKIQLWALRDKAATSEISPKELGRILLWLNQKRGYKSSRSDANLDKKDTEYVATVKSRHDKIKELNLTIGQFFYNELVKDEYFRIKENVFPREAYIEEFDTICKHQPYLSQELIDKIRNEVIYYQRPLKSQKGLVSVCDFEGFWTKKEGKEYFVGPKVAPKSSPLFQLAKMWENINNIKISSRSGGDVVLTSKQKWALFEHIDNNEKLTQTDMLKILNLKKENCYVNKQLAKGLQGNVTKFAIKKCFASPNEYDNLLKSDLNIIGGIGEGYLYDKKTGEIIDAKPIRYIDPLVEKEPFYQLWHTIYSINDQKECSNVLRKKFNIDKITADKLAGIDFAKLAFGNKSAKAIRKILPYLMEGAGYSEAMSYAGYDHSNSLTKEQNLERKLLDQLKPIAKNSLRQPIVEKILNQMVNVVNAAIEQYGKPDEIRVELARELKQSKEERNDTDKAMSKRQRENEDITKRLAEYGLRATRNNIIKWRLYEEIDNQDKKMNAMCIYCGQPISLTEAIKGNDVDIEHIIPKSKLFDDSQSNKTLAHRHCNKNKNDQTAYDFMKGKSEQAFHEYVERVNMLYDNHIIGKAKRDKLLMTESKIPDNFIDRQLRESQYIATKAREILQSICHNVWSTSGNVTAELRHLWGWDDVTMNLQMPKYKDLGLTETKEWESEHGQNKHTKEVIKDWTKRDDHRHHAVDALTIACTRQGFIQRFNTLSSSKTRDDMFAEVEKCSDLFNEKRSLLEKYIISQQPIEVKDVENAVSGILVSFKAGKKVAVKGTRKTGKKGNKKVVQTGIIVPRGSLSEESVYGKIKTIEEKKPVKYVFDNPQLIFKPYIKELVENRLSQYDGDVKKAIASLKKEPIYLDKEKKNLLEYATCYKEEFVIKYTVNTDFNKVDKVIDSTVKEILQNRLNKFNNKPKEAFKDVQHEGKTLLKWYEDEGLERPIKSVRCFTGLSAVVPVKKDENGKDIGFVKPGNNHHIAIYTNSEGNHIEHVCTFWHAVERKKYGIPVIIHDANQVWDKIAEAPEDTYPESFLAKLPQANWTLNLSMQQNEMFILGMSKEEIALALEINDYKAISDKLYRVQNISIIPSSGQIYIIFRHHLETQNISDANAKKSNRFINVQSLGALFSLQPFKVKIDCLGNISLPKPSNKSNINSSESDNTAKEPVNSYATTKKITIFQSPEDAENSQLDYWAKLTPEERFEKFLELMNRFYKFVKPDWSTKKIILDL

SEQ ID NO: 9461 - protein, 926 aa, unidentified
  REGION 1..926: note = Description of Unknown: Cas Enzyme sequence
MKLSIYVNLRAIGWNITDGISVVKAGIKRLNISFDNYYEYLAGLPVTKRINKRMKAQQRRNLWRYKSRRSNLIKLLVKNGYSSKQEYSGDDMLKLRVKALNEKLSNDALFHVFMSLQKKRGYKTLRGVDVSENSEYLKQIDQHEENLKQFPSIAAYMLTLTDRKNVVLRRNSYIAEFDKICQRQGITGDFYKQLFNAIYYQRPLKKPVVSKCKYEKNREVCHASNPIYQEFRIWRDVMNIELFAPDGTELEISMDIRRKWQSDLMSGINLTKPRCLKDLGIKRAVGYNWYSGKLLAGHPVIKEFKKIGYKGSELHLWQDVFSATDDEFLSTILLNKYKLSSDHVNAILDLNFHALGYADFSTKAIKKLLPLMEQGMKLKEAIMQVYGKVDFEEVHLRNVILEQHYFSAKSLADALKKEYDITEVAFEIDPMLKAGNKNRKEMAKNKRKTEKWQKENRSVTGGNSYNELKLQLWEEQKGICPYQPDKPIPMEELFTDKYNIDHIVPKSKIYERSYVNNLLCPSDLNERKNRMTGLEFAEFLGVREKYLELVETYSEVKKHFLLMKPEDIPDNYVSQRQSSDYNTKCFATIAKGSVNIPNKLISRYLKEWKFNKYPDGDARQSLAKSFVIANMSQETIKYFDTLKIHGEGIHSLNLYDIQPNIKIIDVVDIIETAPVFMPRIKYVRKSKFGYYPKGSLHAETVFGQRKEKFRNSKGEIIEKIFYKVRQPLAKLTPNMVSNIMDKAIQRIIMQRIEKAGSHEAGILDMLETPPYFNGKPIKRISIRQNSDALVPLHSTDGNGITGKAGKFGRKIDFVSASSYYATSVSNVDGKPVRKNIRLIDFVNNLNGLQEILTADIWLKQNDILEINGKQYFIIGPGDAMSVRPVYQLNAKDEIKLKAENLKNIKLLKVNQIGEIIKVYKFKINEC

SEQ ID NO: 9462 - protein, 1042 aa, unidentified
  REGION 1..1042: note = Description of Unknown: Cas Enzyme sequence
MKYVLGLDIGITSVGWAALNLDEKRVEGLGVRAFNAAENPKNGASLAEPRRLARSARRRLRRRAGRLRRAKELFVNCGLVLADRRDTAFETVPGQLSPWQLRAEGLDRQLSGKEFARALFHIIKRRGFKSNRKNVAKDKEGKLLDGENAGNLQIMTEHHYRTAGEMYERDEKFSNRKRNTTNSYMNTVYRDLLEDEIRVLFDRQRQLGSPFAGAEFESALLEVFKWQRPYASGDDIIRLIGTCTFETGEPRAARNSYHAERFALLGKANSLTYSVNGDRPRLTEDQRAVVERLAYNNAKVTYAQVRKAAELPDEARFSGLTYLIRPEKDADLEESLKCESATFFELKGYHALRKACSKDGLWEQVKQNPDLMDDLAYALTFYKTDEDIQAHLVERGVDESVIDAVQECGFTKTANLSLMAIKKILPHLEKGLHYSEACAEAGYNHSGSYGGEKKPKLPPIPVDMIRNPVVLRALSQARKVVNNVIVRYGSPYEVHIELARDMGKSAEDRRKIEKRQEENRKEREELEERFRETFKREPNGTDVLKWRLYSEQSGHCAYSMKQIDANRLFEPDYLEIDHILPRSRSFDDGRSNKALVLTGENRNKLNKTPYECFGHDETRWAEYEGWVKAIIRDRRKRDNLLRKNYDERQEKEWKERNLNDTRWIAREFASFVSENLLFAAPENKQPLKCVNGQVVAQARWLWGLSKDREENDLHHAQDAAVIAALVPHQIQMMTEHSKVIETRQSYIDLETGEVIEWKENERPRLPYPWKGFRKEVLSKLPSIMVSRMPQRKVSGAIHEETIRSVKQLAAERISAVKKPLTSLSEKDMKNLFDPEHNERLYEVIRQRMAEYGNNAGKAFAEPLHKPLKDGSPGPVVKGVKVCQTQNTGVSVRAGIADNGDMIRTDVFRKQNKKEIWQYYLVPVYVSDMIAGKLPDRAIVAHKPYEEWHLVDGTYEFLFSLHPYDLVRVGDFLGYYRSCHRGGGSLEMCETNNAQVEKSLGAKSASVIQKYEMGVLGDYYPVHREIRRGLADDSDLDSGEAES

SEQ ID NO: 9463 - protein, 1053 aa, unidentified
  REGION 1..1053: note = Description of Unknown: Cas Enzyme sequence
MSKVLGLDLGTNSVGWCLLEDELNNEKIIDIGVRVFEAGVNDINTKNEQSRNAERTAKRQARRQNRRRKQRKSKLIRKLKELNFISELDKTEFLSINPYQLRAKAIYEQVSLVELARIFFHIIQRRGFKSSKKQKLDEKEKGAIFDGSNDIIGINQLKDVLNSGEFKTIGEYFATLNSKNQKVRSRYIDRSMYESEFELIWEKQKEFYPELLSDKNKLIVKNKNVFFQRPLKSQKKLIGKCIFEKDKRRANLSSFESQEARMLQQVNNLKIISDMRRTDEEQALTKNERDKLLDYLYNHESFKFDKNLKEFKKLLSIGQSERIKLNLEHQGKLDGMKSLFKIKEAFGEKFDDIYNNKNKLHVIWNTLNFAEDEAWLKEYAVKRWNLNETQAEKFAKINLEVGYASLSLKALNKILPFLRDGYLYNEACDLAGYNHSLADEIIKKTDLLPKIPKIANPIVMSSLYQMRNVVNNLISKYGKPDTIRVEMARDLKLPKDKRVEIQKSNKERENDYNKIREILISEMSVPNPKRDDILKYKLWQECKETCPYTGKSIAANQLFGKHPSFQIEHILPYSRTLDDSYMNKTLCYVEENIEKGNRTPYEFYSYKKDEYDKIKDRIKGFPKFSDSKIKRFYTNDIEEFYKIEGDSDFISRQLNDTRYISKAAKNILKYICDDVCVTKGEATAKLRYFWGLSNLLKNKDEKEVENENIEQETEEKQNGKKIRTDHRHHAIDATVIACTTRSFLQRLSTYHGVVGYIDRENDAIRERFQNPWNNFRSDLEKAIQNIIISHRFKNKVTGGLHEETYYSKLYDINKNERTNEKGIPLYAIRKKLENLTAKEIKNIVDPVINELITNFLVSKGIDINKSNKIPVNTFSETLFAPSKNPEIKVPIKRVRVAVPSTSMIKLKDYNVWVEPGSNHHIVIYSDDKGKIDFKTVSLFEAAKREANKLPAISKELPPNCEFILTLQRNEMLLVGNVPETFDINNKSTYNQIFDLVYRVQKMDKSGLIVFRKHFVTATNDKDNTGVFRRHHNTLFDSSIRKIVVDSCGFISYE

SEQ ID NO: 9464 - protein, 1262 aa, unidentified
  REGION 1..1262: note = Description of Unknown: Cas Enzyme sequence
MKKILGLDLGSASIGWALINEKEENNKTTSSIIALGSRIIPYEGTEGKDFAKGTGESRNSLRTQARTTRKGYDRYQLRRKYLEDILIKNNMMPTDELKKLPKMELWALRAKAVTQEISLQELGRLLLWLNQKRGYKSSRSDANKDKKDTAYVAEVKSRHEIIKEQNITIGQYFYNELVKDNFYKVKENIFPREAYIEEFDAIWKCQERFHQVLNNCPSESLARFGKSMFPSTNQEHLRNEIIKMGLYNLIKNFIIYNQRPLKSQKGLVSVCEFEGFTVKKGEKEYFVGPKVAPKSSPLFQIVKIWEIINNIKINNRKGEEIIITTEQKKAIFEHLDNNEKLTPTDLIKILGLKKDDCYINKQLAKGLNGNVTKNAIKQYLGKDYDNLLTFELHTVIEEGEVYLYSKKTGEVLNAKQKMHIAPNVEKEPLYQLWHTIYSISDQEECSNALQTKFKIDTDTANKLASIDFTKHAFGNKSAKVIRKILPYLMEGDGYSEAMCYAGYDHSNSFTKEQNLDRKLLDSLKPIAKNSLRQPIVEKILNQMVNVVNAIIEKYGKPDEIRIELARELKQSKEERNDADKSMSKRQRENETIIKRLEEYGLRATRNNIIKWRLYEEIDNEDKKLNAMCIYCGQPISLTQAIQGTDVDIEHIIPKSKLFDDSQSNKTLAHRHCNRNKNDMTAYDFMKSKPDEELQKYIERVNLLYSNHIINKAKRNKLLMTESKIPDNFIDRQLRESQYIAKKAREILQTICHSVWTTSGTVTSELRHLWGWDDVTMNLQFPKYKAIPEMTEIKEWESDHGKNKHKKEVIKDWSKRDDHRHHAVDALTIACTKQGFIQRFNTLNSNKTREDMSHIVDECSVEYKEKMSLLEKYIVSQQPISVSEVQKAVGNILISFKSGKKVAVPGTRKIGKRGNKRVVQTGIIVPRGSLHEDGVYGSIKQYQKDSNANEVRFTNNIVKKYKLGIGAQGFVFTGKETYEVKEKLNKKTNIIESVTTDKIKNTLDSIVDKGIRNAVLKRLNRGFEKDKTYKDDVKKALENLKNLDKDPIYLNEEKKIPIKTVRCFTGLSAVVPVKKDEQGNDIGFVKPGNNHHIAIYIDKDGNKQEYVCTFWHAVERKKYGIPVIINNTNEVWDKILLQADGTYPNSFLEKLPKPNLSLELSMQQNQMFILGMNKEEIELSISNNDYKAISDKLYRVQKMSIIPSSGQLDLTFRHHLETQLSDDNNSKICKRFIKAQSLNSLFNLQPYKVSIDCLGNIVDVKEK

SEQ ID NO: 9465 - protein, 1062 aa, unidentified
  REGION 1..1062: note = Description of Unknown: Cas Enzyme sequence
MSIEETVLGLDLGVNSIGWGLLRCEDGMCKSIIRTGVRIFEAGMDGEVEQGKEESRNKKRRDARSQRRQIDRRLRRHKRLARLLQKNGMLPSGDLKSGQGRHELLLRLDRDIFRKYETEIEAENKHHFANTLPYWLRARALTQPLERHELGRVIYHLGQRRGFLSNRKAPRKDEDRSVVYEGIVRLHDSMRETNSKTLGEYFAGVDPTNPEESRIRNRWTHRDMYKKEFEALWEAQRTHHEGLLNDGLKKAIEKVMFDQRPLKIQKELIGKCQFENFAHGAKRERRRAPWGLLSSQRFRLLQTVNDLWMEDRDRNHIPLTEEQRQLLIDTLETQGDMTFPEVRTLLGLKRTTRFSLERGGEKKLPGNRTNAALRIIFGDRWDTLPTDEKKQVVEDLRSIEKARILAQRGINVWGLSEDKAHQFSQIELEPDYCNLSRLAIEKLLPLMEQGMALQTAVKQVYGTEIQADGEDIPVWSAVDALPPVIQAPLGELRNPTVFRILNELRKVVNAIIRQYGKPDKIRIELARDVKRTKKERQRIWRANRDRERSRERAKARILEEMGNSKPSRDDIEKVLLAEECGWECPYTGKRINMASLLGESAQFDVEHIIPLSMSLDNSFNNKTLCYLEENRSVKKKRTPYEAYSSDSDGWQQIISRVKKFSGESMEAKLRRFMLHGDELKAFLEGFVSSQLNDTRYASRLAAQYCGLLYGGEFRKHVQVSKGVITAELRKAWQLNSVLGNGGSIKSRDDHRHHAIDAIAIGLSCPSMVKKVTELAYQAEQQGHYRWWKLIPPPWEGFLEEVKKSIEAIVVSHKTKRSVNGAFHKATLYSPPKKDTEGKLCVHIRKKINDLSKTEINKIVDPIIRQCVQDKLVEIGINDPKKAFAIWTNHPQMLSKKKQPIPIHKVRIIDRDPVFKIGEKERERFVSTDTNHHIEIFEKESSSGSKQWEGRVVSLFEVIRRKANRNNTIQKEYIKGYRFIFSLSPGDMVEMEDSSGTRELFVVCGISQYSSGQVNLDFKQHNDARPISQISRQGRTRTPDTMRKSGIKKTTVTVLGDIRWAND

SEQ ID NO: 9466 - protein, 1083 aa, unidentified
  REGION 1..1083: note = Description of Unknown: Cas Enzyme sequence
MTYKMARTLGLDIGTNSIGWCLVEDGKKIIAMGSRIFPVGVKEDSYAKSGTEESRNAARRTARGIRRGYDRYKQRRAKLEALLTEHGMMFDKTTSLPTKKLYGLRKEALDRKLELQELGRILFLINQRRGFKSNRKEAAKEGDDAKKLTAYKQAMSDFEAKLKASGLRTVGEYLASLFDDQPANWHNVNEPRERIREHQRIKRELYQQEFDLIWAKQSAHYPALLTTELKDQLRDKVIFFQRKLKSAKHLVSKCRFEPAKRVMAKSDPLFQEFRLWQRLRDIRVTYGDRVNDPLTNHERGTLAAELGGKASLGKTEIKDLLGFKRSATFNDIGEKLLGNVTVARIKDAVGEDWYWKQDPEKRLKLWHTLYFAEDEGWIETYAQKSLGMNDEQAKRYAEVNLELDYGSISHKAAQKILPFLIDGFDFATACAQAGYHHSQRDLDKADRVLDAKLDTSKMDPIRNPLVQMTVNETARLVNAVITEHGKPDLVRVELLRDLKKPKAVREKMRNSMRDKEKLRDEYRAFLQARKVLPEIRMSDIKKFELWLELEYSVSALEKLDPNVDLRAFAKFAAAVSPKDKDKFRLWLECGRVSPYTGEMIPLNKLFTEAIHVEHILPYSRSIDDSFANKTLCEDHVNDAKGNLTPLEYFEQKRTPAELKAFKLRVQNFSQGKLDKFLATEVKEDFLNSQFTNSAYIGTEVRDLLRTTCKDVRVTNGQLTGLLRNRWSLNRLLNNEADQKNRDDHRHHAVDALVIACTTQSLVQKISSESKFDHTGWQKLPDIGLPWSTFRTDAGEKLSGLLVSYKGGKRLLSSKLNKYRHSKAHDGKPEKYQKTLAVRGALHEETLYGRITIQGKGTKEDTYVVRKALTSLTKEEQLDNIVDPVVRKTIQDHVAAHNGSLKEAMKQTVYMPVKEKNKGKLVPIKNVRMRVNTEEMVELRPKTFVEPGSNYCIAIYEDAKGKRAFRTVNFLAASRKALKKLPIYPKEYDGKTLLMALQQRDLVVIYDQHPDEIQWNSPNWLAQHLYTIKKMDKNGKIGLVLHKASNANPDFPKRYPAGTVAMKTAGTIKALPVHITTTGQIERK

SEQ ID NO: 9467 - protein, 955 aa, unidentified
  REGION 1..955: note = Description of Unknown: Cas Enzyme sequence
LMPADPEEAKKLELLDPYELRANGLDQPLPLAHFGRALFHLNQRRGFKSNRKTDRGDNESGKIKDATARLDQAMMLKGARTYGEFLHMRRRSATDPKLVPTVRTRLSVARRDHSEKEESGYDFYPDRRHLHEEFEKLWAVQSNHAPSVLTDELHDEIAKIIFHQRPLKEQSVGLCLFSGHHGIPDRDKRIPSAHPLNQRRILMETVNSLRVSTRGEAARSLTREERDQIVHALDNKGHTKSLSGMSIKLKALGKIIKLRSDQSFTLETANRDAIACDPVRASLSHPDRFGPQWSTLDYGAQLDVVERIRNVQSDSEFTNLVDWLMTAHSLDRDNAQEVANAPLPEGYGRLGLTATSNILEALEAEVITYSGAVAACGWHHSDGRTGEVLDNLPYYGEVLERHVIPGSYDPQDDHVKRYGRITNPTVHIGLNQLRRLVNKIIEVHGRPDEIVVEVARDLKMSEDQKAEAARNIKKNTEAAKARSLKLEELGVPNTGANRLLIRLWEDLSDDVMSRNCPYTGKRISIGMLFDGSCDVDHILPYSRTLDDGFANRTLCLKEANRLKTNKTPWEAWGGTDQWDVIVSNLKNLKANKAWRFASDAMERFEGENDFSARALKDTQYLSRIARSYLETLYDGGDGKSHVWVVPGRLTEMLRRHWGLNGLTALTDSDAQTVKVKNRTDHRHHAIDAAVIAATDRGLIQRISKMAQRDEADGAEQVARSVPPPWENFRRDVGEQISKIIVSHRADHGSVDPTDRALGKDSTSGQLHNDTAYGIAQDNTVVSRKPLTSIGPNVIALTTGGINIRDKDLQKHLARVTRNLEGKEFEAALVAFAASPKLPDHSDNPYLGIRRVRLEENLQRIARIEVSDKSGKPYKAYKGDSNYCYEIWRLPDGKFEAQVLTTFEVHQREADRRPHPAAKRLMRVHKRDMILLERDGEEIVGYIQSLHVKNGLSIAP

SEQ ID NO: 9468 - protein, 1388 aa, unidentified
  REGION 1..1388: note = Description of Unknown: Cas Enzyme sequence
MKKILGLDLGTTSIGWAFVKESDIPGESTIEKIGVRVNPLTTDEQTDFEKGKPISLNADRTLKRGARRNLDRYQLRRDNLIQVLKENHVISGDAALAETNKNTTHTTYQLRAKAATERIEKEEFARVLLMINKKRGYKSSRKAKNEDEGQLIDGMAIAKRLYEENLTPGQLCYQLLKEGKKYLPDFYRSDLINEFEKVWNFQQQFYPEILTNTLKKEIEGKGKQVTAAIFWNTYQFNNPELKGTRDEKRLKGYEWRSKAFETQLSKEEVAFVIAEINNNINASSGYLGAISDRSKELYFKNETVGQYLYKQLQANPHTRTKGQVFYRQDYLDEFEKIWETQSKFYNELTADLKTEIRDIIIFYQRKLKSQKGLIGYCEFESEKKEVIVDGQKKIKTIGAKVIPKSSPLFQEFKIWQNLNSVLIQNKETKETLSLDQETKETLFNELNIKGNLSKNEVLKLITDNPIEWDLNFNTIEGNRTNQSLYDAFVKIAEFEGNDEIAMKNLSATALKELVRNLFSTLNINTSILNFNAELEGKEFEQQASYQLWHLLYSYEDDNSNSGNEHLFELLERKFGFRKEHSKFLASLNFQDDYGSVSAKAIRKIFPFIKEHKYNAACALAGYNHSSSKTKEENQNRVLKEKLELLPKNSLRNPVVEKILNQMVNVVNAIIAAPNLGKPDEIRIELARELKKNAKEREEMTLSINKANEEHQKIQKILIAEDGIKNPTRNDIIRYKLYQELKNNGYKTLYSNTYIAREKLFSKEFDIEHIIAKAKLFDDSFSNKTLEKRQVNIDKGNDTAIDFVSTCYGEKELIEYKNRVEMMFKSKEGAITKAKYKKLLMKGTEIGEGFIERDLRDSQYIAKKAKEMLEEICRTVISTTGSITAKLREDWDLINVMQELNFEKYKKLGLTELIEKKDGGLKERIIEWTKRNDHRHHAMDALTIAFTKHNHIQYLNHLNARKDEASKFHKLINAIEQKETELYIDSEGKKKRKFKPPVENFREVAKNHLENVLVSFKAKNKVATKNKNKIKTKKGESVKVELTPRGQLHKETVYGRLKQYKTREEKISAKFDEYTILKIANAKFRFALLQRLKENGNDPKKAFTGKNALNKNPIYVDFEKKVQVPEKIKLVWLEDDFTIRKDVTPDLKIEKVVDIGVRKILQSRLDEFNGASKEAFSNLDKNPIWLNKEKGIAIKRVTISGVKNAEALHTKKDHFGKDILDENGNKMPADFVSTGNNHHVAIYRDEHGNLDERVVSFYETVERLNQGLPIINKTFNQDLGWQFLFTMKQNEMFVFPAEDFDPKEIDLINPMNYKLISQHLFRVQKFSKVSYGNSAVRDYVFRHHFETTLNDMKELREVTYKQLKSLALFDKIVKVRINHLGQIVKVGEY

SEQ ID NO: 9469 - protein, 1067 aa, unidentified
  REGION 1..1067: note = Description of Unknown: Cas Enzyme sequence
MDGLSYTLGIDMGIASVGWAVVDVKKQFVDSGVRIFPAAVEAFNTAKEKRPNQDRRMARGMRRRIRRKAERRALIRALLTDLGWISKDDEEIEKWLTLDVYELRHRALFEKITLAEFARILLHFNQRRGFLSLRKSLEAASDKETEGLLGSIHALEEQIQDTGSITFGNFLYQEFQKNGIKAKLRGKAFSRKLLHQEFSKIWEIQSVYYPDVLTESLRYGTLGPKGYQVVKPEKLPAGQTLLESYGLENIIFFQRRVWWPKSSIGMCELELGEKRAPVVDRRFQEFRMLQEINNLRILDHSVKGAPEERLLTPEERGICLAYVTSKDKPKLEALKKELCQKSRNLPAPSQVVFNLEAGGRITISGTPTDAKLSSKSSYGPTWYKLPDNVKNRIVEILSQPDATDEDIIASLREVEGIDPAAIPKLASAVLPSGYGHLSIKALEKLLKPMRDGLLYMHKDYAKSAMAAADYPRRDQMQHDDLAELPRLEELANPDSPIFDRNQPIISSPLVTRSLTELRKVVNGLIRKYGKPAAIHVEMARDLKMSGKKRDEHQKRTRKFEKERQDAVAVLEEYKVVPTKDAIQLVQLWEQQGRLCPYSRKIITPTQLLGGHGDVDIDHIFPFSRSGDDSLTNKVVCFAELNRDKKNRTPYEWLADQYPDRYEEVIQNTKHYPHGKAKRFLAKEIPEDFASRDLNDTAWMAKAARHYLSHLFPSGKNRVLGTKGHYTAFLREHWGLHNLLRNDGIELKNRDDHRHHALDAILIALSDQGTIKQLLARQKFRSSFQEAKEEGKRLYHLRHEGDKLDAPWPNFRTAVESSLNAIWVSHRPSRKVSGPLHKETNYGKTHDGLLVVRKPVQSLSAKEVEGIRDGAIRTLVKEFISNHGGDIKVLKTLSHEEPLSMSSGIPIHKVRVAIPYAHLTIRKGGPHETHVQSASTHHLAIFSLGDGKHHFEPVSLYEATRRLRAKEPIIQKHFAGMPPEAEFMFHLCSGDSMMAEIDGVHQLFVFNTMASSTGQTWFAYHTDAAKGHADPQTGRSLLRSCMPGSFGKNFPKAHKVEILPTGEIRNAT

SEQ ID NO: 9470 - protein, 1060 aa, unidentified
  REGION 1..1060: note = Description of Unknown: Cas Enzyme sequence
MARVKYRLALDMGANSLGWCVYRLDANDDPDKIIRMGSRIFSDGRDPKTLASRAADRRLARHARRRRDRVLKRRHKLMRVLVQSGLMPADESSRKQLQEIDPYALRARGLDQPLAPHEFGRALYHLARKRGFRSSRKDSRGEEAAKETGKVKLAIAALREKVRAAGCRTVGEYLAKQHASRAPVRARRSNDGGYVLYLQRAMVEEEFDALWCAQQPHHPQLLTDSARDDLRDIMLFQRRLKPVEPGRCPFETGEYRARLCAPLQQRFRTLQELNHLRVRDGIDERPLTLAERNAMLAELEADAGPKPVSFSRLAKLAGLRKADFNFGRDVKRMGLKGDAVGARFAADNALGSGWCDLTPEQQYALAVLVEQADQTETLETALLALPAGSPAETEILKGIFDGAERKTVAGALHSLPLKLDGAQARQIASFNLPDDYGNLSLAALSRIVPELERDVVTYDEAVRRAGYLSHSQFHTGEIFMRLPYYGEVLRSYTTPMPTAKNEDEHKNGRIPNPTVHIGLNQLRQLVNALIKRNGLPHQIVIELTREFGASGEKRREIISRQKENQERNERYDSQLRELGAHVNRENRQRLQLWEELGKNDAMDRYCVYSGLHLGKAMLFSDEIEIDHILPFSKSLHDGIGNKILCTRQSNRDKGNRTPFEAWGHTDRWADIEERAERLPEHKRKLFQEHALETFLDGKDFLARHLTETAYLGRAAKQYLTYVCPQNEVWVSSGKLTGMIRGKYGLSKLLSEDGMKNRDDHRHHALDAAVIGLCSRSLIQRMAHAAEEAEAHGENRLLERLALPWPGYREELATCLAAIMVSHKPDHGKQAALHNDTNYGWRGEPDKRGNPLVGRRKPIESIKNAADATSIASENLREEIVRLLTPLSAAKEIKAALLEYSARTGIRRVICEERLAVIPIRDRRNGEPYRYVKGDGNYCYEIFRKPDGRWGGEVISSFEANQKGFNESSTEARNGSPLVMRVCKDDIMAITVDGKKRIMRVAQFSTGKILLAEHYESNVSERARRGEFTFLQLGVGTVKKLGARLVGVDILGYVNDPGFRE

SEQ ID NO: 9471 - protein, 1056 aa, unidentified
  REGION 1..1056: note = Description of Unknown: Cas Enzyme sequence
MRRLGLDIGTNSIGWCLIEDDERILDIGVRIFSDGRDPKSGTSLAVDRRDARAMRRRRDRYLGRRSAFLRKLIEHGLMPADADEAKLIAELDPYTLRARALNEKLEPYEIGRALFHLNQRRGFKSNRKAERKSKPGEEGKIASGAKALDRAMAEADAETLGQFLADRATKRVRLDSDNQEYDFYPQRRHVEYELERIWQEQAKHHPALLTEVARAALHRILFFQRSLKEQEVGYCTFAGLNGVPANERRLPKAHPLFQQRRLYEEINQLRIVSAGAADRSLTIDEREKLVLKLQDKKKVSFDSLAKIIKLDEGERFNKQSENRKELIGDEVRAELADRKRFGTRWLHFGLDEQLQIIERLQNEEDPETLLGWLKDEYRLDDEAAEAVASARLPEGYGRFGETATRRLLEALKADVVTYDKAAEAAGFHHSDHRTGEILDRLPYYGEILTREIAPGKEEYGDPLERRYGKITNPTVHIGMRQLEKLVNAVIAVHGKPDQIVVELARELKLNEKEKDEHKRRIKRDTEAAIARGKKLASEGFAGTGANRMLLRLWEELNPANPLDRRCPYCAEPIGIRQLFTGEADIDHIIPYSRSLDDSAGNKVVAHRNCNRVKGNKTPWERWGHDEDRWEKISGQVARLHKSKQWRFGPDAMERLERDGGFLARQLTDTQYLSRLAGKYLRSLYSDKGEGSGHVYVIPGRMTSMLRRKWGLNSLLPDHNFVENEHSNAPKNRLDHRHHAIDAAVTAVTTRRTLQRIAKAAGEAEDRDLDRLTVDIDPPWPGFREELGGNLLRVSVSHKPDHGRKGRPPKGRDVTAGRLHNDTAYGLTGEVAADGKTPIVIHRVPLMSLKPGDMTDPQRIPDSALRNALYDWTRGRSGKDFEQALTRFAKEHPVFRGIRRVRVREPLNVISIRDRQGRAYKAYKGDANARFDVWRLPNGKWTSDIVSMFDAHQPEQQDRRPHPAAKKVLSLRQNDMLAIERNGGPAQIVRVVKFSTIGTIALALDNEAGALKARDATPNDLDPFKYILSSAGGLKGLKARQVRIDPLGRVFDPGPRE

SEQ ID NO: 9472 - protein, 1088 aa, unidentified
  REGION 1..1088: note = Description of Unknown: Cas Enzyme sequence
MKSKEKGLSGNPDLELAFDVGHSSIGWAVLGLDPRVEITGCGSVVFRADDCLASARRTYRRQRRHIRSTRQRIARMKILLTHLGVLKRTQVDQPGCAWPWQLAARVLRGGKLLSWPELWDVLRWYAHNRGYDGNRRWSASGAEAAAEDTAKEENAKSLMGKHRVATMAETFCAELKVDPLGTKRSSTLRFKGLNAAFPRSTVETEVRRVVQAHFGKLPAVDQGLERALLGRDNRDKSAWQAIPCPDLKLPRRYEGALLFGQLVPRFDNRIISRCPISGGKVPSRNCPEFLNFRWAMQIANVQVARLGEKELSPLSVPERTDIDALMRQQGGMGVDEFKKQLRQITGAIRDNLDTMLMHPDAKEALLVNPVQKLLQSYELRTIWPLLPDRLQKRTRGRLRRGKSISLAQLKKQLAELGEGTTAFDAEVTKLLDSTNSRSRRKSVQISCEDLLNKPIAVRKLGQRAAFARDLLRKAFTEVMTGKHPKEPGGCLFITEEMRQTQTKREIAQQTNNHLVRHRLLILERLFADIIKEYAAGEKTRITRVTIEVNRDLREMSGMTAKQKAQDLGLRIANHHHVVEKLEEDDSLMKVLEKRQAKITAGLIRKARVADDLNWICPYTGQRFEPVDLVTKRVDKDHIVPRSDRASDSLDSLVMTFSAINRWKGKRTAWQFIEQEQGKPVPDLPNLSIMTLPRYKDLVESLETFRGHEDDKRRKKRRKELMLLPTYEEKEFTPRDLTTTSQLVRLGAMALKKAFLGHHRPPMVVSLPGSVTGAVRKAWKVVGCLSLAAPQVIDENGEVKTKKDIRDVTHLHHALDACVLGLASHFIPNNGRVWELIVKRKLTSPEQEELKALRIFNKDTEGRFQMRDLDDRLKEQIRQRLAERRVVQHIPSRTDGLRVEQNTWRVMDVKEGEATLRQRMRQPDGTRILKEATEKVGKLIGLAPAGGRGKLLVNKGALVIPDNFGVALTKPEPVMIPFHKVWLRLVELKAANAGKLPPVLRNGQIIRVPGGKNFKGVWRVFSAKNNATGIALDIGSPDVVRLKNKTDGHRINVRLATLIKDGMEVLRTPLTGVASCPTTSSASTRPNVH

SEQ ID NO: 9473 - protein, 1091 aa, unidentified
  REGION 1..1091: note = Description of Unknown: Cas Enzyme sequence
MGNLQIAFDVGHSSVGWAVLQSRPGTSRVANAAGINVLGCGVVTFGADDCLASKRRDYRRQRRHARATRQRIAQIEKLLAHLKVLSADQLKQKHQQAGGHAAPWLLAARVFASNGDEKYLLDWPHLWDVLRWYAHNRGYDGNRRWSAHEAQAQAEDTEKEKQAHALMEKYGTATMAETLCKALGLEPLGDKQSSKENFKRLNAAFPRSVVEKEARSFLELHQKKLPAITDTFFESLFDDWQVGKVPGLKLPARYQGGLLFGQLVPRFDNRIISTCPITGEKVPSRNCAEFYKFRWAMTLANIRVGGAKEKELRSLTTDERKKINAVMENEGALTSTQLKKAVRETTGCSRDNLDTMLMHPDAKDALLLDPIKRLVRGDKLATLWPTFSPRVQKRARDLWQRGKTVTLERICGIAQKLGEPLADFNAELSKLTDAANTKRSKKAGSFNRDALLKEPLTIKNSDGRAAYARPLLVRAYAEVMTGKHPKEEGGCLFITDEMRQAQLQKQIDQQTNNHLVRHRLLILERLLKDLLAEPAYANGDKSRIAKITIEVNRDLREMSGKSAKEIQQDLGRRLANHHGVAAKLETDLDGRTFNGKPIQITAGLIRKARIAEDLGWACPYTGKTFDAIDLVSRQVDKDHIIPRSLRPSDSLDSLVVTFAEVNKMKGQRTAWQFVSDEQGKVVEGSPQLSIVSLTRFKQWAESLESYKGHDDDKRRKKKRKELLLLPNYEEKGFVPRDLTVTSQLVRLGAQIIKKTFAGIEPLPLVVSLPGAVTSTVRKGWNLLGCLELAAPQVKEADGSIKNKTDIRNLTHLHHALDACVLGLASHYLPNNGGLWEVMIKRSPNDTEKALLRSTGCFDFDSQGRFGLTELPDTLKEQIRQRLAEKRVVQHIPADMSGLRVEENTRGLTAIKDGRVFLRQQSRDAKTGKLSIKPTEESVNKVIGLKPGKLTPQKGVRVITDNFGVAILDHAAEGEEKFVIIPWHKVWPRFQELKIRNAGKLPRLLRNGMLIHVPKKAGRSDYRGTWMIRGTKFNRKSGVLVNFTAPDTIETVGSGRNDIFENVRLQALAEGGLEILKTPLTGIISPLSKPSK

SEQ ID NO: 9474 - protein, 1168 aa, unidentified
  REGION 1..1168: note = Description of Unknown: Cas Enzyme sequence
MNNILGLDLGTNSIAWALRDPGTGRGPEQIIRKGVIIFQKGVGEEKGVEFSLSAERTRLRAARRRNQRRRWRKIDLLTVLAKEGLCPLTTDGLRGWKEPSRKADRKYPLEPGFVSWLRLDFDGDGVADYKNPYELRSAALDRKLSPQELGRICYHFTQRRGYLSNRSDNALEEVEEERSDSDESTPKPHERVGKVAAAIKSLEEGLEGRTIGEALAAEIRAGGRARRRKEESTNIHRLTLQAEYMKIAQFQEIAPALTEKIRKLIFEQRPLRSQKGVVGKCIFEKDKSRCPISHPEFELFRMWQVLNNVRYSTDGRKTWQSLTPELRKEAEPVFFRRSKPAFSFSDVTKALRRKLPGAVYNFRDNQSLSGCPTLSGLMNVLGADRLWCMRDAALHRLKWEREEKRDSPAKLGGKEIDLYDLWHWLFQMDNDKDREIIRRKAMQKLGLGEREAAKFVEIPIKQGYGSLSLKALLKINPWLQQGVRYDQAAFFGNLPTIVGADRWESLKESLIEAVDREIAASSRQKRAVDIANGLISRYNNLPASERFARKAFDYCLDNDDWRDIEAGTIAYFGEEAWVGLLEQERGAIRKEVGILYEGALRKTSSGELGFVRAPRLDQGIREAVAGVLGLEASDKTLDKLYHPSQVEAFLPSLQDSGPEGKKLLNSPRTDSIRNPMAMRALHELRKLVNHLIHGGLVDEYTQVVVEMARELNDANRRKAIEQYQRERERENKEYAAEITKIFAGQGRPLPADLAGYVDRYRLREEQPSHVCMYTGRTISDADLFDEFTTDVEHTIARSRSFDDSLANKTIAFKYYNREIKQKLLPVELPNYSEEAQAFSAIEPRLQFWKDKIEYYQGRIDRASWRSRVAASKEAKDKAIQERHYCILHLRYWRVKLDGFCLEEITEGFKNSQLVDTQIITRYGLMYLRTLFLYVRATKGVITDRVKRIWGVQNKDAAKDRSAHTHHLEDAIIQTLLHKERNKPDVYNLLAEGYKEAEENRWREPQVPNPWGLEPDAFFAVMRGLTDDVLIYHADRDRTMKQTKRKMRNEEGMVFAQGRGIRAPLHRDTFYGAILVPGERRQAGSAEQGENIAGQKTEGVAGQSAGGQLLAKSDGVSGTEKQQKPVLEIRFRTGFVFRGSTAEQTRKAIENIVDSRLRQLATEKGAEAI

SEQ ID NO: 9475 - protein, 1059 aa, unidentified
  REGION 1..1059: note = Description of Unknown: Cas Enzyme sequence
MTRIKYRLALDMGANSLGWCVYRLNDNDEPDALRRLGSRIFSDGRDPKTLASKAADRRAARQMRRRRDRVLKRRHRLLEGLARFGLISADDAERKTLQGKDPYELRARGLDQPLTPHELGRAIYHLARKRGFRSSRKDGRDPESVKEAGKVHAAIAALKSRIAEAGCRTVGEYLARQHASRLPVRARHSTDGQYVLYLQRGMVAEEFDALWAAQQPHHPGLLTREAHDYLRDTMLFQRRLLPVQPGRCLFEPDEYRARLCSPLQQRFRILQELNNLRVKEGIGQRPLSLDERNQMLQRLTQASGPVSFAQLAKAAGLHNAKEFNFGNDEKRHGLKGDVVVASFASDGALGLRWHALNPEVQQALAVLIEQADQTDTLIEALVALPGSIASAEKILGKQHDAEAILGALIKLPFAITPETARVLANFRLPDDYGSLSLKALARIVPELEREVITYDVAVTRAGYDHHSQFYDGVFHPQLPYYGELLRGYTSPADKARDESERKYGKIPNPTVHIGLNQIRQLVNAIIKRYGHPHQIVIELTREFGASAEKRREITKQQAENQQRNERYNTELERLGVRVNRENRLKLQLWEELGKDDALDRYCIYSGKRLSKAALFSDEVEIDHILPFSRSLHDGIGNKLLCTRQGNRDKSNCTPFEAFGHTERWDAIVERAERLPAHKRKLFQESALETFLGGKDFLARHLTDTAYLGRAAKQYLSAVCPPNCVWVSSGKLTGMIRGKFGLNQLLSDNSQKNREDHRHHALDAAVIGLCSRSLIQRIATAAARAEDKGEQRLLEGLELPWPSFRDDLRNSLAQIVVSHKPDHGKEAALHNDTNYGWRDGPDKRGNPLMGRRVPLESLSKVSDAENIADEVLHAEISQLLAPLSSTREIKAALLEYSTRTGIRRVLRQERLSVIPIHDHRTGKPYRYVKGDGNYCYEVFRQPDGRWDGKVINLFEANQKSFQTSATRAQNGLPLVMRIHKDDLMAIEDEEHGIRILRVAKFSPGKINLADHNEANVDARNRDPHSTFRYFQFAPSKLRDKKARLVGVDILGYVNDPGFKE

SEQ ID NO: 9476 - protein, 1123 aa, unidentified
  REGION 1..1123: note = Description of Unknown: Cas Enzyme sequence
MTKSLVLVGRWAAIVTQQKFRAGFDLGTNSIGWAAVKLDEQGNPCGLIGLGARIFSDGRNRKDGSSLAVQRRVPRGMRKRRDRYLNRRGDLMQALVAVGLMPPDDVGRKGLEILDPYAIRAKALDAALTPYELGRALFHLNQRRGFKSNRKADGGKEKESGVIKGGIKELTERMSARSARTVGEYLFMLHRKGKMVRARPEAGFYPSRAMYEFEFDEIQKMQQPHHALREDQWAQLKDIIFYQRPLKPVDPGWCLLEDGERRAHRALPCAQEFRMVQETANLRIIPERGYAARPLSLEERDKVLGELRTKKELKLEALIKLLKLPADARVNLLDENRAALKGDEISARLSSKGIFGKAWHAKSFNDRTIIVRALLNTERSEEIEQIAQRDWGLNEESAQKLAAAGLPEGYARLSEKAINKLLPVMEDQGLTYADAVAEIEEYGHHSDFRTDAALDRLPYYGAILTRQVVGGDPSKPKEKAVEHYGRLSNPTVHIGLNQVRRVVNRLIEVNGKPEQIVIELARDLKMNREDRENERKKIRENELANKRRNEQFKSANELGSGPYTGPALSPPQMRKLRLWEEQKHGAVHVCPFTGEPISFEMALDDRTEVEHILPFSKTLDDSMANKVLALRAANRIKADRSPYEAFHGNPSIGEHKFIYDDILLRADALPSNKRWRFYQDAMEKFADQLEFLDRQLNETKYLSRIARSYLAHLYNEKAEGRQRVRAIPGKLTAMLRGKWGLNALLRDHNRVGGDLDEMPARKKRDDHRHHAIDAFVIALTDQRLLQRVSALNSDAARARLIDKIPLPWDGFTPDVLRPHLDRLVVSHKPDRGAYPWMTKDSGVRHQTSTSGALHNDTAYGLIEPGRNGNWKVVSRSALTSFMTAEKMDAALPMVRDPALRVALTNEWETFKASPSGSAPAREGDASKKLRNPAIEFAHRMAADGLSLSGRKVKVRRVRLVEELAVVTIQDRKSGKPYKAYKPDGNAFADIYALPNGRWTAVVIRTFDANQPDFDPVRYRPHPGAKRMMRLHINDMVAVGRDENRRVLRVVKMSGQNITMADHYEGGALKARDADKADPFKYFAKSAGELGKLGFRKVGVDELGRLNDPSVGIKNSQPQQRVGC

SEQ ID NO: 9477 - protein, 1018 aa, unidentified
  REGION 1..1018: note = Description of Unknown: Cas Enzyme sequence
MGYSPVQKLMGANRDSVLEAADFFSGLVFGFDVGTGSIGYAVRRGSQFLDVGVLICDSEGSDLSKRRDLRRQRRTLRSRKARRQWFARELEKLGLSKPEKPPNDPISLRLRALNGEAVSPEDLHAALVHLFKRRGYSKVPWANAEKAVKETAKPKKDDDEGKIKEAVKEIKARLNDKHPCQFLAEERIKVGKSPVTNWARKIYWPREVLRDEFLAIVEAQKKQFPRLAEKADWLLYGDSQPKKNGEETYHVFFKTTEAHNPGVLGLRWPRFDNRGPALDSFRPVDERGRQLHVVRKNKEAFTKAQWELALMNFRVLDAATRQKQDPRIDFPIFIENLRNEWKKKGKVTETRLKRLAEPFKEKFLLIEDQKPLTPDTGAGRARYSSPTLDLIRKVISTGGRVDPPQPILRRKSENAEQALNRYLSDIKHPLVRHRLVLFRQLLSRLVSSHGEPNMIVLEAVRSLALGQKAKNELNKRNEQFRKEREIARDQLSSNNESYSRKAIQRYRLWQEAKGRCPFCNQMIARTDLGHGADIEHLVPRSVVDCNEFYNLTVAHIKCNRELKGDRTPFAAFAGTREWEAIKANAENCFTGRKLEIFLSPNAEELIEQKSDLQHTAYIARVIRHISLIQLGWLNDQGRDPTPEKQNSALKFQVTNGHLTSRLRKAWGLNQILHPLPPNKRWDELTDAEQRQFTEKNRGDLRHHALDAMVIACTLPWLAHRTYGAKDSFDRHGWWTQDEKQRSKAANPVFPNDGQMYEVVKREIEKVVVRQHESRSNHQQSYATTIYGKLAPDTYAAREKLTDLKQSDFRDVYPKALGAYLDAAWERFTGETPDLDVVLKKTNNKLPAVFIEKLCFSHFQKWRADAAPAFTWPQKVRIPIRSVKLIAPVNDDTVLGFAPGTPGFVKRTTFKEVHIYPNADKKSFAPVFVPYWKGDKAVGLDLILPGSKPVAILRKRSIIKTIKPLSTGHPPGDYCLYELGQVQPYLLPPHIAKKEEAIESFGIKKSGIKPRWADLIRAL

SEQ ID NO: 9478 - protein, 1431 aa, unidentified
  REGION 1..1431: note = Description of Unknown: Cas Enzyme sequence
MKTILGLDLGTNSIGWALVKQDFNNKRGQILGMGSRIIPMSQDILGEFGKGNSVSQTAERTNYRSARRLRERFLLRRERLHRVLNVLNFLPENYASQIDFTKRLGKFKDQSEPKLAYAEGSFIFKKSFHEMLEDFKVHQPQILRDENGRDRLIPYDWTLYYLRKKALTQKIDQGELSWILLNFNQKRGYYQLRGEEEEENPNKKTEFYSLKIIDVLADEPQRGKSDLWYSLVLENGWVYRRSSRMPLFDWKDKTRDFIVTTDLNNDGSIKKDKDGNEKRSFRAPAETDWTLVKKKTEHEIDASHKTVGAYIYESLLRNPKQKIKGRLIRTIERKFYKAELQMILEKQKEFHPELQDDDVYNECIRELYRNNEAHQFILSKKDFIHLFLEDIIFYQRPLRSRKSSVSNCTLEFRKYRGENGTEQTQYLKAIPKSNPFYQEFRIWQWLFNLNIYKREDDTNVTREFLSTTEDFENIFEFLNGRKEIDQKAVLKYLNISDKTYRWNYVEDKKYPCNETGAMISSRLEKVEGISAAFLTRENEQKIWHIIYSVNDKTEYEKALKTFAASHGLHDQSFFEAFRKFPPFKSEYGSFSEKAVKKLLSLMRLGKYWSYEAVDNSAKDRIRKIITGEYDENIRDKIREKAVHLTEEGDFQGLPLWLAQYVIYGRHSEAALAGKWNSADDLEKFLEDFRQHSLRNPIVEQVVTETLRVVKDIWMKYGSGTKDFFNEIHIELGREMKLPAADRKQLTGQISENENTNIRIKALLAEMMDDASVENVRPYSPMQQEILKIYEDGILKSDIDIDDDILKISKTAQPPPSDLKRYKLWLEQKYRSPYTGQIIPLNRLFTLEYEIEHIIPQSRYFDDSFSNKIICESAVNKLKDNYIGLGFIKKFGGTIVECGSGKTVKVFSADEYEDFVKKHYANNRSKRNKLLLEEVPEKMIERQMNDTRYISKYISGVLSHIVRVEDGTDEGVNSKNIIPGNGKITTQLKQDWGLNDVWNDLILPRFERMNHLTQSTDFTAWNNNHRKFLPTVPIEFSKGFLKKRIDHRHHAMDALVIACATRDHVNLLNNQSAKSETGRYDLKRKLMEFEKTAYTHPQTGERVERLVPKRFLKPWDTFTADAKSSLETIIVSFKQNLRVINKATNHYEKYVEKDGVRIKEKTEQTGTNWAIRKSLHKDTVSGKVDLPWVKVPKGKIITATRRALDTSFDIKTINSITDTGIQKILKNYLEFKGSPETAFSPEGIEDLNRNIEQFNDGKHHQPINKVRIFELGSKFQLGNSGNKKDKYVEAAKGSNLFFAVYSSGQKRSYETIPLNVVIERQKQGLPPVALAGKDDFYLCPNDLVYIPSADELENTYPVDFSHFSKENTEHIYKVVSFSGNQIFFVRHDVSTSIVNKAEFSALNKMERDMNGTMIKEVCIKLKVDRLGNILKG

SEQ ID NO: 9479 - protein, 1239 aa, unidentified
  REGION 1..1239: note = Description of Unknown: Cas Enzyme sequence
MEQKVPADYVLGLDLGVSSIGFAIVKSIGEKPGEILKMGVRIIPLSKDDETEFTQGNAISKNRNRTIKRTQRKGLDRYQLRRKALIAVLTANNMMPDRHLLLELSPIEIWGIRARAVTEKVSLQELGRILLHLNQKRGYKHSKSDDTEDNKQTEYVQQVNERFAGLKERGETIGQYFYAQLKQYFSVVKKTEPAFRIKEKIFPRAAYIEEFDTIWKRQQEEYPSILTASFYNHVRNEIIYYQRRLKSQKGLVNFCEFESRPYTTPDGKIIEAGPKVAPKSSPLFQVEKIWESINNIIIKNRKGEQFEITPSHRQEIFNHLNNNDRLTQTDLYKILGIGRNDGYFTNELIRKKGVQGNLTRLAFANILGQDHPSLQFNFIVSLAQHVDTTTGEIIEQPIIDTVFEKEPFFKLWHIVYSLDEESSRRKLIKEFGFNDLTAQKLTSSIDLTKGGFGNKSTKAMRKILPHLMDGHTYDKACALAGYNHSDFLTKEENEKRDLQSRLCLLPKNSLRQPIVEKILNQTINLVNAIIDQYGAPSVIRVELARELRQSREERNETYNNINKQERENKKIIELLLQYPHFQKKKSVSKRDIEKYRLWREFGGVSPYEPGKPIGIEELYSNNYDIEHILPRALRFDDSFSNKTICPRKYNSGENAKNRSTAYDYMQFKRSKEDFDSYLAMLQSAYKDRLISKSKYEKLLMKESDIPNDFINRQLNDTRYISRKAIEILSKVCRSVHSTSGSITQRLRSLWGWDEILEQLNLPKYQHLGLTEERQITHNEQVHVITKIKNWSKRDDHRHHAIDALVIACTKQKFITLINNLNAQQTKDEMLSQITGVEYKNKLSLLDKYLLTFKPFNTAEIAQSCENINISFKPGKKVSTLGIRKIRKGKKKVPAQTQIIVPRGPLSEESVYGKIKRKITRTEKLDKSFNSTESIIDLKIKKIIQDRLSQFENDPVKAFGNIKKDPIWLDNQKTNSITQVDIYDYVEEYVIKYELSSLTAKDVQHVVDQRIREILNDRLQQHGNNHKEAFKTTVWLNEEKKIPIKRVRCFTGLRSDSIIPIKVSDTSWGIEYEKYVKPGNNHHIAIYKDENGKFQEHVVTFWHAVERKKYGLPIVIKDPSSVWSDILSKRELPNIFLENLPLDTWKFQTSMQQNECFVFNMNIDELDYAIGKKEYSSIAPNIFRVRKLTSGAYWFNQQFETTPRESMEDKGSGRCVQASLSSMSGIKVRISTLGEVFLDQ

SEQ ID NO: 9480 - protein, 1079 aa, unidentified
  REGION 1..1079: note = Description of Unknown: Cas Enzyme sequence
MSENTVRRILGIDLGIASCGWGVIEVGEADGSIIATGVRCFDAPLIDKTGEPKSATRRTARGQRRIVRRRRQRMNGIRRLLGEFGLLTDQSSDALRHALRRITPGPGGSQVTPWTLRAAAHERLLSNDELAVVLGHIARHRGFRSNAKSEAGANAADETSKMKKAMEITSEGIKEYHSFGDMIASDPKFADRKRNRDKDYSHTAKRSDLEVEVRAIFRAQIRFGSAIAGERLSEAFAETAFFQRPLQDSEDKVGDCPFEPGHKRAARRAPSFELFRFLSRLANLKLAVGRSPERRLTPDEIALAAKGFGESKKTITFKSLREALDLDPNARFSGIAKEKESTLDVTARTGGAAYGTKTLKDALGDAPWRSLSRTPEQLDRIAEILSFREDMISIRTGLEELDLDILIVDGLMQAAANGDFKDFTRAAHISAFAARNIIPGLREGLVYSEACARVGYDHAARPAVPLCQIGSPVTRKALSEALKQVRAVAREYGPIDYFHIELARSVGKSAEERKKLTDGIEARNVEKEKRRKEAEEHLGRVPSEDELLRYELAKEQKFKCIYSGDAIDPGGISANDTRYQVDHILPWSRFGDDSYLNKTLCTVRSNQNKRGRTPFEWFDADKTEPEWMEYVARVEDLNEVKGRKKRNYCIKDAAAIEDKFKARNLTDTQWATRLLADELKRMYPPRECERVVTGRADGGNDRLSIVEERRIFTRPGAITSKLRRAWGLEGHKKQDGKRVEDDRHHAVDALVLAATTESLLNRLTVEVQKREHEGRQDDILHCSQPWPGFRVDVQHTIYGSDTMPGIFVSRAERRRARGKAHDATVRQVRGADGKKLFNTKPYEISGEKIVYERKVITDKGFKESDLEKIPVPDPYGKVTDPRKLRDEMVENLREWIRKGKPKDDPPRSPSGDVIRKVRIATDKKVAIELNGGTVDRGDMARVDVFRRKSKKGAWEFHVVPIYPHQIVALESPPNKAVVAYKTENDWTSTDNNFEFAWSLNPMSYLELVKSNGELIEGYYRSMDRTTGAINLSPMATNSEMIRSIGVKTLSSFRKFAIDRVGRKFEIPREVRTWRGEACT

SEQ ID NO: 9481 - protein, 1041 aa, unidentified
  REGION 1..1041: note = Description of Unknown: Cas Enzyme sequence
MSNIKIRKVLGLDLGSNSIGWALLEEVDKRPQSIIDLGCRIFNKAVEDKTPTPKNVSRRNARLTRRVLQRRSRRKHRMLHYLISLSLLPESLRNDHSPEITLNSIGDPYELRARALDDQLEKYELGRIFLHLVQRRGFLSNRKTILGDLVDDPDVIAVLAEAEEEEDTSSEQAKEETLFKKQISVLRQTIADKKCRTLGEYLFSIKAPLTKRNRTHSGGQLRTDRQMYREELDLIWKKQAEHHSILTEDMKEQIENIIFFQRPLKLRSDRIGKCSLEPKKNRASIARLECQRFRYLQDISNLQYMLPNQDKYTKLDENEKGILVTLFESKGVVSFTDVKKALDLKRNVKINIEEGGNKKLKGNATSTTIRKVFPDWDKLDSTQRVALAEDMLTIQKKTTLKKRLTGHWGLSPEIAVELCMLEFEPGHMNFSLNAINKLLPFLEKGMLLNEARVEAGYGYEVEETEVTDRLGMPPEITNPIVQKGLHELRRLVNALIAEYGKPDVIRIEMARDLEMNTKRYQAFVKQQNTNTKANDEATEAFQDVGSKNRHLELGQFPSHTDKLKYRLWIEQEKRCAYSNQSINLTSLFTGQVEIDHILPYSQSLDDSYMNKVVCFANENRNKGQRTPVDAFKTNPEKWEQIKQSVFKWGKNLKSKQNRFFMFDADVQKRDFISTQLNDTRYISRVALDYLKQLGADITTCKGITTSHVRHWWGLNNLLGDTDKKERTDHRHHAIDAAVITIIDRGFYNKIVSTAKQLERGNSSLKMNDLKVAPPWVDFRNDLDKKLKTMIVAHSPSRKISGSLLEETGVGFIKGQGTVYRKLLGPEMKVKQAEKIIDPQVKAIVLDHLEQYGDDPKKAFAEGIAVLHNDGKTPIKRVRVLQSKTTLDKLEKHKFAVRDRQGKAFKWLAYGNLHHVEIVRDRQSEKVSGVFVTMMEAANRAKGIRIPKQTPVQTNHGPQTEFLMALHINDLVSMMQDGERKFYRVQKLDSGINMVMFRLHTASTLDDRNQELHLTINKQLISQWNLQIEKVNAIGKLQPIHD

SEQ ID NO: 9482 - protein, 1145 aa, unidentified
  REGION 1..1145: note = Description of Unknown: Cas Enzyme sequence
MSFTLGLTISYNTIGWALIDKGGQKPKIDMGVRVFQPSVLNIGEGIREQSTHTQRTHVRQMRKIFRNKRLRKQKLLSLLIDHHLCPLSKKDLQSWIEKRRFPHNSFSDWLELDPYVLRSKAIKEKIELFELGRIFYHISQRRGKCYVARESQKDNRIYFHGKPQMNRVGLRETLEALEDDQTLGAYLAELKPAHGVPYEKNDNRIRNRYLDRVMYVEEFHKIYSFQQKFYPELTPSLRVALGGVEGSENDLKSGVLFFQRPLKPNQTFKRFCPIEPNKKRTPASHPEYEVFKVLKWINSIRCNGKPLSTSQREAILDIPFRFSQFSFKKIRKSLKLEDQTFQFNYDDTDIISLAYFLVHLSKPQLFGNRFLNQPIDEQIQTWHTLYFFDDSSKLEAHAKQRWNCSNDQAARLIKLQLQQGYGTYSLKAVRNITPFLKQGMRFDEAMFFAGLSVAIGTTWKNFSSEQREFFVSEFLSFFHQKKENRDWAEEIKQNLKTHFEIHHFDEVKFFNYNRHLLYKQKVRLDTGLSADQYIKNKFKPIAHSAIFELRKLVNAILENYGEIQEIKVYVRPVLKASRSSRKKIFDEKKRRAASQHHHLSAVQEMGKSPTHLNVLKHRLWEEFDRRCPYTGKEINIDQLFTNQVSVVHILPWNRFFNDSDINKALCLSFFKHQISEKTPWEYFSVQPTGTWEQVKIRVLKQLLNVNKISGIQKFKQFTRSNYSLDAKTHEMTDTHHVSLYIKNILNQVCENVQMTLGHTTHNLREKWYLDRLDNFLHSDPINDQRRHAIDALVTAVKTPFLLEVLSKWNRYDNTARSTSFPSPWPGFKKDIQAVFETVQISFPHPKKVFAATHKTYYKNNEKSIARSPSARGQLHKELVYGKRKAPDELDYSYHIRKSIQQIQTAKHVQKIVDPEIKKRIYAQIDGMGGFEKGKIPKNCLTFIDEKGFTRSKITLPNRRGAEVPIRKVRIREQLGNAIQLHKDVNIFANSRNNHHVLIYENIYGELAQKVITFWTAVHRKKNKEPIWQLPDDGRRIVASLHLNDCFLMGLTPEELANWKLLPKKQLYEHLYRVQRISNNFYEFRHVFDADIYDTAYPNYIRILNFGKRKTGWKTYNPKKVYVDILGNFSEYKPFDKSVKQPQSQS

SEQ ID NO: 9483 - protein, 988 aa, unidentified
  REGION 1..988: note = Description of Unknown: Cas Enzyme sequence
DEGEETSKQIVAAGVRIFPRGVEDKTPTPKNQKRRERRLARRVIQRRARRKQRMVRLLVEHNLLPLEILTGQNVEGTLNNLGDPYLLRAKALDHPLNSHELGRVLLHLVQRRGFLSNKKTLLGRDMLDDPDVLAELAETEESEAGTSNSEETAFKAEINSLRNSISEEGYRSLGEFLASKGPHECKRNRDGQFIRTDRKMYHDEFTLIVEAQRSHHTALTDKFIETLEQTIFHQRPIKLKEGRVGKCTLEPNSQRIAIARLEYQRFRYLCDINNLRYFEAQKDTEVGLSSDQRELLVELFEAKSDVTFPAIRKALGLDKTADFNLDSGVKKLKGNRTSVVIRSCFPKWDNLSEEEKHNLVDDLLSFQKKSALKRRLISFWKCSPQEAVKLCMVELESGRGSLSRKAIVKLLPYLREGHELSQARKSAGYSYEMQKGERSILATPPDIPNPIVSRSLNEVRRLVNAVVKEHGKPTVIRVEMARDLEMNTKRYKAFVAQQSANTKENEKATEEFKKTTGQAFAKKNDKLKYRLWKDQRFVSAYSNRQISLAQLFSAEVEIDHVIPYSVSLDDSYQNKVVCFAGENREKGQRTPIDAFLPDASRWEQITQLISKWGKHLSSKRSRFFQTADSLSDRDFIASQLNDTRYIAKETGQYLKTLGVGVTFTKGVMTSILRRSWDLNTLISESDFKNRRDHRHHAIDAIVTACIDQNLYRSIVFQAKNIENSPHALKLEDLHFDPPMSDIREQTESLLNEMIVSHASSRKLSGALHEETAVGYVSGVGTVYRKRLSPTFKVGDAAKIYDRTVREIVEDLRKFGGDPKIAFSPDNPVYHRDGKTLIKRVRVQQAKIGFDTLNETKFAVSNSLGIPFKWFAYGNIHSLNVFRNEDGKLRCEVVQMAEAARLKRNKLEASERPHIQIHKNDSVLLTVDGMDCVYRVQKIESPNKLTLKPHNVSGAEKDQTQIRKSVPTLLRDYHLRKVRVNILGDVRDD

SEQ ID NO: 9484 - protein, 1227 aa, unidentified
  REGION 1..1227: note = Description of Unknown: Cas Enzyme sequence
MSNILGLDLGTNSIGWAIINPEKETIIDAGTRVFPEGVNRDTSNNEVSKNETRRLKRQARRQNFRRKMRKRKLAKVLIQYGMFPNIDLIFAKLTGKNPDDFKFRKKFKTVVQEVQLPEEMRNYFSIDPYEARHKAFEGDKLTLLELGRIFYHIAQRRGFKKSLDSDKKTMQTLFEGKPKEGKTGIKETREKIKKYGTLGNYLYHEDPHKTRLRNRYTLRSMYVDEFNIIWENEKKYYPNILTEELRLEIGGSERRGDKKDGILFYQRPLRSQKHRIANCTFESDKPRSKKSIIPFELFRSYQNVNNIRVNDQPLSKEDREAAVEYLHSRKSSPKFSSLRKKLSNPDANYNYSNKTRFPSNNTIYNFRKIFGKKRWNNFSLNEQEEIWHIKYFADDPEWLEEYAKEKWGLDEDAIERLKHFKLDDDYANLSRKAIMNILPYLKKGFMYDKAVLLGGLRSAYGSQRWDQMDAELKREIEQKVLAIAQNQDRKEKTIDQVKHLLVENYDLPKNKTAELYHHSVKEEVTIKSKLPVLDDLEEMQNLRNPIVEQALYEVRTVVNALIDKYGQPNEIRVELARELKSSKSHREKIRERQKEREKENIGVKATLDEYRLPHTRRNIHKVKLYKEIENKAGHAINPFNPEATFGIGEVLDPNGYVQIEHIIPESISMDDSLANKTLCGADVNRAKGNQTPYQYFMSQGMSQEDWERYKDKVFDILPFYKAKKFTSEKEPELDDFIQRQLNDTRHISKKTKSYLKHICKNITVAEGSMTSMLRYYWGMDSILNGKYEVGNLKDGEYLASVDEEDQIIEIVEWDDDTLKKDQKRLEKKGKFLQGNVSDGIFYPFKQRDDHRHHAVDAIAIACSETKYLQQISRLNAKGWNNNSIKKYNHVDQPWEGFLQDAKTAVNNILVSHKQNDRILTKVKKQLYDYKGNPKTDDDGNKLYAEGQAARGRLHRETVYGKHTDEDGKEYFHHRKPIDFIKNYKHLTKVVSPRVQRAVEKRLNELGLNTRQNKKWKLTDLPKDKRNQVFFTFKETTNGKQQRIPQIRLPNKNGKNIPVKKVRVQEKISRAERLKEGINQFVDPYDNHHMIIYRNEKGELENKVITFWETVELQNQNQPVFQLPFNGEEIITTVQENEMFLVGLSDVVIRDNFKNYEFLEDYLYRVQKISISGYNIVFRHHTASTIDDPTKEIGISSMGESKSGWLTFNPKKVEISPLGEIQLMDDLS

SEQ ID NO: 9485 - protein, 1129 aa, unidentified
  REGION 1..1129: note = Description of Unknown: Cas Enzyme sequence
MKQTLGLFIGIESIGWSIVRESSNSSIIGLGTRVFSSFVNNIGEGDRETSNAATRTEVKNARKIYSRKVYRKRRVLIFLAKNGLCPLKSKDLLKWFKDEKQTKRTKMMDMWLAIDPYEFRAKGLEAKISKLEFGRVLYHMSQRRGKIISNFNNNTKLKASLKGLPAANRLGIYHTYDHLKHNHLGAYFNTIKPKKNMPYVYDNTRIRNRYLDRTMYVNELNALINLQQKHHDFVTDVFKKTLMGNDCRSGILFFQRQSQYKKLDSGTMSCKYEPQKTPMPKSHPLHEWYDIYLWLDSIKFYGNKLSNKQREKVLSVALRFSSFCFKKVRIALEVEDMDAFNYDDLSKIYLSHTIVQLSRVQAFDKRFFEFSRENQHELWHDLHFYNDKYKLIERLISKWGLTKMKAKAVAKIKLKSGYGRISMKAGRAILPFLIAGHQKRTAIALGCVKNAIGHEKWNQISQERLESITYFIASSVKENSIYDKRWLNDFKSAFGINIAQDKLFFAKRKEGLDFFPINPEENFTIHRDYKPVAQKPIFELRKIVNELTKEYGPIHKIKFTLSRELKTNASNRQAAFIEKKIKEQQLKKIHIAVTKAGQNPTHSNLLKYKLWLVWGKVCPYTNTPISLEMLFSQEVAIVYILPWNRFLNDSYINKTLCMKFFKEKIRDKTPFEYFSQQSPGTWEKVKERVLNQLINGNSKNYFYQTYKHFIKSIYANDVVSKEFNDQHSLAKKVKYFLSQVCPEVEAAMGNSISSLRRRWGVKSFGNYKYKLRHYNSREPALNALVTALNKPHYLEELKYWNRYEPDANRKEFPTPWKQFTHEVINLYNKIAISIDNKSKVARLSKDKKSGTRCISPKGKMHKDSFYGKRVGPDGNEAFHIRKSIKSLVTAKQVSKIVDNSIKELVYDQIDLNGGFENGKVPKNALVTTTNTGWETNIFLPNSNGDKVPVRKVRIRENVGNAVQLTDKMNKYVNPRKNHHVVIYKTFDGQFKEKIVSFWEAVNRLRMQETLYQLPSDGRSVVTTLHINDCFILDMPNEDIKDHLNQGLSLWENVYRVQRISSKYYEFRHIYDLDIYEQTHPNYIRILNFGKKKTGWLTHNPFKISISPLGKITPVFNPLKVPEMHKGVTH

SEQ ID NO: 9486 - protein, 1146 aa, unidentified
  REGION 1..1146: note = Description of Unknown: Cas Enzyme sequence
MSCTLGLTISYNSIGWALIDKTNQKPNIDMGVRVFQPSVLNVGEGIREQSTLTQRTHVRQMRKIFRNKRLRKQKLLNLLINHHLCPLSKNELNSWIEKGNFPYKSFSDWLELDPYSLRAKAIKEKIELFELGRIFYHLSQRRGKCYVATENQKDHRIYFHGKPQMNRVGLKETLEALGNDQTLGAYLADLKPGHGIPYENSHNRIRNRYLDRSLYVDEFHKIYSFQQKFYPQLTNSLRVILGGVEGSENDFKSGVLFFQRPFKLNQTFKRFCPIEPNKKLTPASHPEYEMFKVLKWINSIRCNGKPLSASQRKRIMDIPFRFSQFSFKKIRKALELEDQTEQFNYDDSDVISLAYCLVHLSKPQLFGSRFLKRPLNEQVQIWHTLYFFDDPAKIDTYAKKHWNCSDDQSVRLIKLQLQLGYGAYSLKAVREMTPFLKLGMRFDKALFFAGLSRATGGIWKEFPSKQKEFFIKKFSDFFCQKKQRTRWTEEIKRILEIHFEIHHFNEMKFFSYNRHLKYKQNVRLDTGLSADQQIKNKFKPIAHSAIFELRKLVNAILENFGELHEIKVYVRPELKASRSSRKKQFAEKKRRAASQHYHLSAVQELGENPTHLNVLKHRLWEEFDRRCPYTGKDIKINRLFTNQVSVVHILPWSRFFNDSDINKALCLSSFKHHISDKTPWEYFSEQPTGTWEQVKIRVLKQLLNVNKFSGLQKFKQFTRSNYSLDAKTHEMTDSHHVSLIIKNILNQVCENVQMTLGHTTHNLREKWYLDRLDNFLHTDDPLNDHRRHAIDALVTSVKTPFLLEVLSKWNRYENTSRNASFPSPWPDFKKDIQAVYQTVQISFSRPKKVFTATHKTYYKNNEKRIARCPSARGQLHKELFYGKRKSPDELDYSYHIRKPIQQIQTAKHVQKIVDPEIKKRIYARIDAMGGFEKGKIPKNCLTFTDEKGFTRSKITLPNRRGAEVPVRKVRIREQLGNAIQLHQDVNIFANSRNNHHVLIYENIYGELAQKVITFWTAVHRKKNKEPIWQLPDDGRRMVTSLHLNDCFLMGLNHEELINWKLLPKKQLYGHLYRVQRISNNFYEFRHVFDADIYDTAYPNYIRILNFGKRKTGWKTYNPKKVYVDILGNFSDFEPFYKPVKQPQSQS

SEQ ID NO: 9487 - protein, 1145 aa, unidentified
  REGION 1..1145: note = Description of Unknown: Cas Enzyme sequence
MSYTLGLTISYNSIGWALIDKADQKPKIDMGVRVVQPSVLNIGEGIREQSTHTQRTHVRQMRKIFRNKRLRKQKLLGLLIDHHLCPLSKKGLQSWIETGHFPYNSLSDWLKLDPYVLRAKAYKEKIELFELGRILYHISQRRGKCYVARESQKDHRIYFHGKPQMNRVGLKETLEALENDQTLGAYLAGIKPAHGEPYEKNDNRIRNRYLDRLMYVDEFHKIYSFQQKYYPELTHSLRVALGGVEGSENDLKSGVLFFQRPLKPNHTFKRFCPIEPTKKRTPATHPEYEVFKVLKWINSIRCNGMPLSASQREAIMEIPFRFSQFSFKKIRKSLKLEDQTVQFNYDDTDIISLAYFLVHLSKPQLFGNRFLNQPIDEQIQTWHTLYFFDDSSRLETHAKQRWNCSDEQAARLIKLQLQQGYGTYSLKAVRNITPFLKQGMRFDEAMFFAGLSVAIGTTWKTFSTEQREFFIGEFSSFFHQKKEKRDWAEEIKQKLKTHFEIHHFDEVKFFNYNRHLLFKQKLRLDAGLSADQHIKNKFKPIAHSAIFELRKLVNAIIENYGKVDEIKAYVRPELKASRSSRKKLFAEKKRRAISQRYHLSAVQELGKSPTHLNILKHRLWEEFDRRCPYTGKEINIDQLFTNQVSVVHILPWNRFFNDSDINKALCLSSFKHHITKKTPWEYFSEQPTGTWERVKIRVLKQLLNVNKFSGIQKFKQFTRSNYSLDAKTHEMTDMHHVSLHIKNILNQVCENVQMTLGHTTHNLREKWYLDRLDNFLHTEPINDQRRHAIDALVTAVKTPFLLEVLSKWNRYENTARNTSFPSPWPGFKKDIQAVFETVQISFPHPKKVYTSTHKTYYKNNEKRIARCPSARGQLHKELFYGKRKAPDELDYSYHIRKPIQQIQTAKHVQKIVDPEIKKRVYAQIDGMGGFEKGKIPKNCLTFIDEKGFTRSKITLPNRRGAEVPVKKVRIREQLGNAIQLHKDVNIFANSRNNHHILIYENIYGELAQKVITFWTAVHRKKNKEPIWQLPDDGRRIVASLHLNDCFLMGLTPEELANWKLLPKKQLYEHLYRVQRISNNFYEFRHVFDADIYDTAYPNYIRILNFGKRKTGWKTYNPKKVYVDILGNLFEYKPFYKSVKQPQSQS

SEQ ID NO: 9488 - protein, 1029 aa, unidentified
  REGION 1..1029: note = Description of Unknown: Cas Enzyme sequence
MCTRVLGIDVGTNSVGWALVRLGDDPDVEAMGVRIFHEAVEPKDREPKNSKRRAKRLLRRQIRRRAQRRRAITTICQKHALLPTDPKELHRLQCDYQRNPFRLRAEALDRALTLHELGRVMLHLGAHRGYKSNRKALLNRAFSDPEIREAAESLEQERKARAAAGKLRKEEQREEEEGKVLQAIAALEKEMQEWGSRTLGEHLHRQMLDPAIGRARRSATDTANYTREMVEAEFEAIWESQKRFHAELSDKLKAQLYRAIFFQRPLKIRKRGVEWCPFEGGRKRAFKAQVISQTFRAWQQANSLEWRPSEIGAQWRKLTPEEIRVVAEALLTKAEVKFTEIRKFLKHPKETEYNLAIGGRESLKGAETNVRLRSILGEAWDRMDDLEKDRLVHELVHSDSMDALATRLRKSWRFDPKTVYRLITTDLPSGTASLSAKAMRKLVPEMQRGLRYDEACKKIYDRFGPDIKVNLQAKKVPMPPERANPVVHRALMEVRRIVNAVIERYGKPDAIHVEAARDLKLTKKQRDSLQQHQRRNELANKEAREQFQRLHPGREPSGADLEKYRLWKESNGLCPYTGRSIALEELWTASVDVEHIIPLPRCWDDSFRNKTLCDATENRLRKKNKTPREAYSEEDLSRILQRLESFSSMPRGKKNLFKLEWNEKAEKNFTNRQFNDTTLATTLTRRMLEPIFGREKVLCLPGKLTAFLRRHWGLETVLGGQEKNREDHRHHAVDAVVIALTSRSLFQRMATFSGRYGSEHLEHSISKVEPIPNLRDRVLSMLEELVVSHQTTRRARGGFVEDTAYGKVAPGQYVYRKPVGSLSDGEIDRVRDLGLRRRLKAIGSKALQDMAKKNPKKPFVYFDRFGRECVVRRVRLLASASDRSMIPIGPGHYASASNHHVAVFEVGGERRYVVASLYEVYQRLREGKPVYDRSAIPGGRFLFAWHPNDTVVVEGRPEKFYRVVTFSASDLEAHRHIDLELRPVNRAVGSESRKSPKLAEAGADLRCKSPGTLALVSGPVSVTALGEVR

SEQ ID NO: 9489 - protein, 1053 aa, unidentified
  REGION 1..1053: note = Description of Unknown: Cas Enzyme sequence
MPYVLGLDIGARSVGWALLEKEGDSFTRILRAGVRVFEAGTEGDIEQGRDESRGATRRAKRLARRQIRRRRQRARALYRELSGAGLLPPITPVPGSPMAVLIQEAINRLDCELRRKYAGERAVNQLPYLLRARALDHRLEPHELGRALYHLGQRRGFKSNRKAESGKKAMEDSSKAGEEKSLVYRGIDDLKRQIREAGARTLGEYFATLDPAEQRIRNRYTHRSMYEEEFEAIWEAQRRHHAALTRELKDRLWQILFEQRPLRDTEDLVGECAWIPREKRAPVWSLDYQRYRVLQTVNHLRVAENRCAPRPLTHEERWRLLEELEKKPKVTVAQAKRVLGLQKAEFTVEEGGEKELPGDKVAAQFYEKLGESWSRLNPEERRALVECVATAESDEQLSETLQQQWGLSADQANKVVREVHLPSGYAPLSLKAIRAVMPYLEQGMDVQRARLEARIPLDRPVRVRELLPPLADSGVAVFNPAVKRALTEMRKVVNAVIRRYGKPDEIHLETARELRKSREERMNESKRMRGREKEREEILRRIRDEVGIPEEKISRDDVLKGLLWQECDGKCPYCGESLGGFASLYGGNSPAQIEHIIPFSRSLDNSFVNLTLAHVSDNNYKGDRTPWEAYGSNPERWDQILQRVSVFRGSYSKAKLNRFKMDENAVRELSEQFSSRALNDTRAASVAAARYLALLYGGEIVDGKRKILKITGQVTAYLRDVWGLNGLIPSIHREARGEAADAEAESRTLKSRDDHRHHAVDAVVVALCNQRWIQRLSEANRGALAARRRWFAPVEPPWVGFKEQLKDTLKSMNISFRPDHRVTGALHKETFYTRIGQNEKGGDVVRVRMPVTNLGSKEVEAIADPAVRQIVQAELKEVGGDARKLENNWPLLPNRHGKPVPIRKVRVNLNRAVVSVGKGPWQRWAEPSETHHIEIYEVEENGRRVWRGDVVSMREAIERATRGEPVTRRRGGAGVRYLFSVSKEDTLRLHGKYEGLWVVKKIAQKGQITLVSQFDARSEQNRTVFSPRVGGLQGYSAEKVVVLPIGDVVPCNE

SEQ ID NO: 9490 - protein, 1017 aa, unidentified
  REGION 1..1017: note = Description of Unknown: Cas Enzyme sequence
MIKNILGLDLGTNSIGWALVKQDFENKQGEILGMGSRIIPMSQDILGDFGKGNSVSQTAERTKYRSVRRLRERFLLRRERLHRVLYILNFLPEHYASQIDFEKRLGKFKVETEPKLAWKNTDGQFSFLFQNSFNEMLEDFKAAGQELKIPYDWTIYHLRKKAISQKIEKEELAWILLNFNQKRGYYQLRGEEEEENPNKLVEFYSLKIVDVLADEPQKGKSDIWYSLILENGWVYRRSSKTSLFDWKDKIRDFIVTTDLNDDGSVKTDKDGNEKRSFRAPGENDWTLVKKKTEQEIEQSNKTVGAYIYETLLQNPKQKIKGKLVRTIERKFYKEELRQILEKQKEFHQELQSDDLYNDCIRELYRNNEAHQLTLRKKDFVHLFMEDIIFYQRPLRSQKSSVSNCTLEFRKYKGENGAEHTQYLKAIPKSNPYYQEFRLWQWIFNLNLYTKDNDENVTKVFLNTTQDFENLFEFLNTRKEVDQKALLKHFKLNEKTHRWNFVEDKKYPCNETKTMISSRLDKVENISDDFLTRDIEQKIWHIIYSVNDKVEYEKALKSFARKHHLNESSFFEAFRKFPPFKSEYGSFSEKAIKKLLPLMRLGKYWNYAEIDKYSRERIQKIITGEYDENIKDKVREKSVHLTIENDFQGLQLWLAQYIVYGRHSEASMIGKWNSADDLEVFLKDFKQHSLRNPIVEQVITETLRVVKDIWLKYGNGTKDFFNEIHIELGREMKLPADDRKKLTNQITENENTNLRIKALLAEMMNDHSVENVRPFSPMQQEILKIYEDGVLKSDIEIEDDILKISKTAQPSTSDLKRYKLWLEQKYKSPYTGQIIPLNKLFTPEYEIEHIIPQSRYFDDSFSNKIICESAVNKLKDNYIGLGFIKQFGGTIIELGFGKSVKVFDTEEYEDFVKKHYANNRGKRNKLLMEDIPEKMIERQLNDTRYISKYISGILSNIVRVEDGSDEGVNSKNIFPGNGKITTQLKQDWGLNDVWNDLILPRFERMNQLTNSKDFTAWN

SEQ ID NO: 9491 - protein, 982 aa, unidentified
  REGION 1..982: note = Description of Unknown: Cas Enzyme sequence
MSKIVLGLDLGITSIGWALVNVDNDNSHNSKIIDSGVRIFTIAEHPKDGKSLALPRREARSARRTTKRKAQKIRAIKRVLLQNKIITQEELDHLFIGNKKQIDIWELRHDALYRLLTNKELSRILIHLAKHRGYSSNRKSEEVTDNEGKAVLSGIEKNKEVLKNHIYKTIGEFISSKEKKRNGKDKEGKLNYENSVSRDMLKDEIDLIFKVQQEFQNSFTTDKFLKEYKKIAFEQRSLKSVVDMVANCPFEIEEKRASKSSYSFEYFRALQKLKNLRVIDENGYEMPLIFEQVKIIVEKAKMTKNFTYKSFKKLFPQYKEMQIKGLVYHDHKTGEIKEPEKVKFLDFSAFQKIKDSIEKIDSNYWKSIENNIEILDAIATILTTEKDDKKSKEQLTKIVEDREVCDALVSISFSQFGHLSNKALRKIIPFLEEGDDYDKACEKAGYNFKAIFQGKKSLFLPPLSKQENIEMTNPVVKRAIAQMRLVYNAIARKYGALDSVHIEFTRDIKKSHDDRKKIEKEQGKFRDAKEEARVHAQEILGYEPNAKELLKFRLWKEQDEKSIYSGEYINPTLLKDPYATEIDHIIPYSRSLDDSLNNKVLCLTKENQEKGNKIPFEYMGEEQFSEFKQRIEGHKNLKQAKKSRLLKNNFDESSEIAFKDRNKNDTSYIAKFIKNYIEAHIAFKEFKNKRHIFTMNGMLTSQLRYKWGVGDKNRDNHLHHAEDALILAFSTQSMVQKLSSVSAKREGYIYKTKEEKSKALRFETPLEHFGEKVRKSVSEIFVSHMPRRKVSGSAHKATVYSHKTLGVKKENGKVEFLKGGSVVNNVTLKHGIALNESMPRVDLFQNKKSKKYYLVPIYVSDFIKDTLPNKAIVQGNKPWIEMDDEYEFKFSFYKSDLIEVKTKKTAKKEAVQILGYYDSTHSGTAQIIFKSDDGSKENGFGVQNLVFIKKYQVDALGSYVEVKSEKRQGSIKENRLKRKKKN

SEQ ID NO: 9492 - protein, 1127 aa, unidentified
  REGION 1..1127: note = Description of Unknown: Cas Enzyme sequence
MSKKILSLDLGITSIGYSVLEEVSENRYSLLDYGLSMFDKPTDKDGNSKKLLHSAASSTKNLYTLRKKRKKSLAKLFELSDISTSSKLLNQEKENLYINKWELRAKEAFCRRLEVGELFTIFYALAKHRGYKSLESGDLLEELCEELKIEYNFTKKKEDEDKGKIKLALKTVESLRLENPHKTVAQIIYEEEILKSTPTFRNHDNYNYMIRREYINDEIKKILLAQEKFGFFKSDFDVTAFIKRVIETIDDQKESTIDLSLFGNCEYYPKYKVAHQYSLLSDIFKMYESVSNITFNTKPTLKITPSQIKVIAEDFFAKVKKGKSIGEVKYKDIRKILQLGDDVKIFNKEDSYLRAGKKIENIIIKFHFVNSLSKIDNSFILNALEDERGYEVLQKIFDVLAYEKSPKSIYEKLKNLVDEKTIIVLIQNKHGNSLNISHYAMVQFIPHFKEGLTTDEIKKILGLERKEDYSKYRKGIKYLTIAEFEKDENLEINNHPVKYVVSATLRVVKHLHSVYGAFDEIRIESTRELSQNEQTKKDIEKANRALEKEFSRITEDKEYQKIADSYGKNIKKYARKILLWEEQEYLDICSGKVIGLGEIFSNEVDLDHIIPKSLGGLSVKHNFVLAHRDTNVQKSNRLALDFVSDREAFINRVEHLFSSHKINWKKRKNLLATSLDETFQDVFESKSLRATSYIESLTAQLLKCYYPFTNKKKQLDGSAVRHIQGRATSNIRKLLGVKTKVRDTNIHHAIDALLIGFTNHLWLQKLSNTFRENMGLIDDEARAKIKKEFPIIELVVNDEVEYLEPKELCDRIENAFNSYGEESVFYKDVWGKNRVVSFWVSKKPMVSKIHKDTIYEKKKDGIFTVRESILNKFIGLKITPTMSSQKFTDIFNKNILEKMYLFKVNPKDFICVVIQKRADEIAELLGSLEALDKKDKERVSKAKVDLEALIHKEILDNNGNSIRKVKFFQTNLTGFDVRGGLATKEKTFIGFRTWLKEGKLNYERIDVANLQKIEKLNDSSFKVYKNDEIFFIMPDGSRRGGKIVSFLEETKKSAFQNAKYPTSSEYQPMPFCKMNKGKKSGAKQQSIGKAIGIIKLNLDIIGNIKSYQVIGDAKSDFLDFVKESIRG

SEQ ID NO: 9493 - protein, 981 aa, unidentified
  REGION 1..981: note = Description of Unknown: Cas Enzyme sequence
MSKLILGLDLGITSIGWALVNTNDKDVTKNKIIDSGVRIFTIAEHPKDGKSLALPRREARSARRTTKRKAQKLRAVKRLLLSNKIITQNELDSLFIGNKKQKDVWDLRKEALYRELDNKELSRIMIHLAKHRGYFSNRKSEEPSDNEGKAVLSGIGHNRTILESEKYATVGEYIATKKKKRNGKDSEGKLNYENSVARSMLVDEIEIIFNKQKGFGNSFVNDMLLESYKEIAFTQRPLKSVADMVANCPFEIDEKRASKSAYSFEYFRALQKLKNLRVIDESGYEMPLIFEQIAQIIHQAKMTTKFTYKSFKKIFPQYKEMKIKGLVYHDHKTGEVKDPEGGKLLDFSAYQKIKKAVQKADNLYWDTIEESFEVLDAIAKILTTEKDDNESLKQLQEIVKSERVSEALLGVSFSGFGHLSSKALQNIIPHLEAGEDYDKACEKAGYDFKAIFEGEKKLLLPPLSKQENIEMTNPVVKRAVAQMRLVYNAIARKYGAIDKIHIEFTRDIKKSHDDRRKIEKAQGEFRDKKEEAKVHASEILGYEPSAKELMKFRLWKEQNGECIYSGEKIRPEFLSDPYATEVDHILPYSRSMDDSLNNKVLCLTKENQDKGSQTPYEYMSQEKFDTFVQRVKGYKNIKQAKQSRLLKTNFDENSELAFKDRNKNDTSYISKFLKNYMEAHIAFKESKDKRHIFTMNGMLTTQLRFKWGVGDKNRENHLHHAEDAIILAFSTPSMVQKLSTVSGRREGFIYKAKEKKSKALRFETPLEEFGVRVKESIGEIFVSHMPRRKVGGSAHKESIYSDKTLSLKKENGKVEVLKGGSVTNNVKLKHGIALNNSMPRVDLFQNIKTKKYYLVPIYVSDFVKDKLPNRAIVAGNKPWIEMDEEYEFQFSFYKRDLIEVKTKKTAKKESVQLLGYYNSTDSSNAKIIFNSHEAKNEYGFGVQNVIFIKKYQVDPLGNYVEVKKEKRQGSIKEGRARKIKN

SEQ ID NO: 9494 - protein, 188 aa, unidentified
  REGION 1..188: note = Description of Unknown: Cas Enzyme sequence
MKKVLGLDIGSNSIGFSLLELQESEGIVFNELVSNSIIFSEPNSAEDRRNARSSRRRNERKSARNKKARKLYEKYTLASSSFVTDTTNYLNKLNLKTTDVYTLREDAVNGYALSKEEFVFSTYSILTDRGYNNMFSISNEDGIINEAVSKNAKEYEAKAYALPSMVLTSKREKESVLYQNFPIRNKKR

SEQ ID NO: 9495 - protein, 984 aa, unidentified
  REGION 1..984: note = Description of Unknown: Cas Enzyme sequence
MHIEEFVKVVSSQKDNKELFSSPQKCQEFIDEMTDESEVNTPFYQRSLKSFEGMVEFCAFYDKYNPKGSYKKVPLANIKNIERTLRQQIDNNEAIIAKTGEIKEFTVMEIDTIVDFWIENPSSNEISANNVFKSVGFKDVKLNISEHSSQVVLDIKAHRQILKLLQEYEVDFRGDDNAFYNEILLELHYFKNNSSRVEHIKKILEKYESNLDDEFIQEISLLEHMDGFASFSLEFTNEVLDVMKSEGKTHHEALEKLGYYSKYLKIPKYDYLPPLEPTKKDIKWLEENVKGFEVKHLFYQPKVSPQVKRVIAILRKLINEIIKEYGHIDEIRIETAKEMNSKSEKEKIDKNQKKDKKKNDDASRFLKDNDIKETRKNLERAKLYIEQGKDSSLCLYSGELITQEDAFDEEETEVEHFIPRSTIWINSYKNKILVKKKANQNKGSEHPVAYLKSQSQWEDFKGRVHDTFMASNKKEWLSNEEHIERVMVKEHWQESYLNDTRSATRTIQKYLNHYLFPHENQYGKGEKCSIYSVSGRAISELKYIWGIHSVMPKNEDDKKDRDTNYHHTLDAFTIALCSSSARHTLHNFFMKKENKYKTKIQKENLSANLPHSKEGENVVEYLKELVQRYETNRLYVCPYNKRKINAKGFKDGNLKLHVTQDKKGNEILAEMEKVAVDSSLLIKIVGGFPKPRSDAEVRKEISSIQERLDSQKQKKIIDALDVYVEELLTLRVSIEEKEKEIKKVDAQLKQNTQKKGNVVVNETFNQTLEILKLEKEKLSQYSNHLKCSFTTKNAKRQIVKSLKLYSKKASKTSADAIVFPHRKERKIERLSVATFNKARQDKEPFVIKANESTLDVKLFETLEGQKVGLDYFSGKENPHIETKINPKYRELVEYASSTLTLYKNDIIKVNNTKNGLVKYFICNGGGNITASNNKITIKNINSNTFIKKDRKGVVKEVKEDNATSNKTTIISKVNIDFFGNITEI

SEQ ID NO: 9496 - protein, 1371 aa, unidentified
  REGION 1..1371: note = Description of Unknown: Cas Enzyme sequence
KKGCFMKLSISIDMGAKNNGVFIVKSENEKIIDKIGFNVILDKNNINFSKKSRRENRHRVRNYDRHNEARRLLLEIIDIDNIIIEDKNNQWNQNQIIGLLKNRGFDRFEGAFENLQKITQELLKQYINLSDQDISNLSNEENLNSFINNFKINQQEALKEKLSMFIKEIENVYNDLKIYKNTTNILKDIENIKNNKFSKFSTDTEWFFKNLLVKNNIFFNTKRGELKKQLANNELELSKLDFDLEIENIKQLDFDERFIDNFEFIELDFKINKNDKENDTSILGTLRYILESLESGAKPRIMYLQEVKQLIDEFDFLQNIKKDELYNIIGNISNLQLRVLRKYFNGKTDNQLDEKKLSIGLYRYFLSKHYKKDREKQRRDDLFKVLSEYIKPTKNVNIPQKDRKHYNYYSNERLYKAKEFLKNCNPLLTILPFEDMNNRNTYKCNSLLINKVKINNDLKEAIKILSKNANFKKLNLDDIRDDGIKLQRILDISKRIISEDYYPRYIFSEENTNKSFYKNLLKEYFNEFDKFATQYYEAEQKAINGIVQSDIFVKCGKNTPAKNNIKDTLINNVWNTNYQKDEIDNLKEAIEKQKIKGKKLTTILENISKTAKKYQNSFFKDINEAYYLKNKNNENYKKEVPSDLRYILDLVDDILDIFQEIFKEQKSCFIYNNFDISKEKTTKKGIKRFINSLRQTYDILFVDINGHNKTCKNCTIENNIRSNEDEPIAKRLLSDVAKPINGKLDMLLDRVAWEIVSQIDDLKNIDNIEILLEQNKFNFEENLKDIGIRKKSPEKEKLEYDICPYTGKKFTNGEYDHIISQSSSRNQNKQIYNSEANLILCSRKGNEEKGDKDYTFDDLQIAHLKIVFGKNDKEEIKKEIRDIWKKSKSLEEKNYTNFKNLSFKEKLAFRYALFMIGEDVYKNAKSLLETEQKTITNGTQKRLARLIFEKIKQKFQKEINCNVKVIDNRLVSATRFDLAQYYLDYDKNTGEIIDDKNITKQTYQDDFSHIVDAMVVYYLANNLKMDDFGKLLENINKEKSKIEVKTKHWYETSNPKYNIASKRLFDQNDIGVGYIQLKEMQTINEKGKNEYSYKKGIVKDSFVKSDFTKKNFDYFIQNNILQKIEVNRNKTIEILYQVNKNRLYEILFDEKKEVLENISHYKKLMKELQYTYTKANPFDFLDKFLEPKTSDDKKAVKNIINNEIPNIKDITFENLMAWFSRSNKLDKNGAKLGYYKSWEIFTKTLIDNKDKLFKEKEKNKYTIVTIDKEKALEECKKTIFKQEIPKKRKVKKAYTLYTASKNDTQYVHRRKDNKGNYIYQTRIANGHNKLKGYKKIFSDNGEYLFKNSRNIIPLTIDNYKKAFGNETYNNK

SEQ ID NO: 9497 - protein, 1126 aa, unidentified
  REGION 1..1126: note = Description of Unknown: Cas Enzyme sequence
MSKKILSLDLGITSIGYSILEELNNDRYSLIDYGVSMFDKPTDKDGKSKKLLHSASVSAKKLHTLRKERKTNLAQIFEDYKLSNKTTLLNQEKQNIYTNKWELRAKKAFEEKLEISELFTIFYVLSKHRGYKSLDSDDLLEELCQKLGIEVDTKKATKEDDEKGKIKKALQTIENLRIKYPDNTIAQIIYETEILKENPTFRNHDNYNYMIRREYINDEITKIIKAQNGFKAFNFDVDEFIEAIINTIDDQKDSTNNMDLFGNCEYYKEEKVAHQYSLLSDIFKMYQSVSNITFNIAELCEVNPLQKNIKIQKEQIKLIADDFFTKIKKGKNIADIKYKDIRKVLKLSDDFKIFNKEDSYLNKGKKQENTITKFHFVNNLSKIDNSFILNALKQDNRYEILREIFDVLSQEKAPHSIYEKLKDKVDDKTIISLIKYKNGNSLNISHHAMIKFIPYFEEGLTTDEIKQKLGLDRKEDYSEFKKGIKYLHIKTFEKDNNLDINNHPVKYVVSATLRVIKHLHTTYGAFDEIRVESTRELSQNEQTKKDIEKANRALEKEINNIVENKEYQKIADSYGKNLKKYARKILMWEEQNRLDIYSGKNIGFEDIFTNSVDLDHIVPQSLGGLSVKHNFVLVHRDTNLQKSNQLPINFIKDKQEFINRVEYLFSEHKINWKKKINLLANNLDEVFKDSFESKSLRATSYIEALTAQVLKRYYPFPNEKKQNDGSAVRHIQGRATSNIRKLLHVKTKVRDTNIHHAIDAILIGLTNASWLQKLSNTFRDNMGVIDDEARAKIKKEMPLIEGIEPKELVEMIEDRYNEFGEDSIFYKDIFSNVKAVNFWVSKKPMVSKIHKDTIYAKKQDGIFTVREGIINKFVGLKTTTTTSPSKFMESFEKNILKKMYLHKTNPKDAICQIVQKRANEIAILLESFVDLDTKNKELMSDSKVKLDELFHSDMLDNNGNVIRKVKFFQTNLTGFEIRGGLATKEKTFIGFKATLKDSKLKYTRIDVANFEKIQKENTDSFKVFKNDLVFFIYSDGSFRGGKIVSFLEEKGMGAFSNSRFPASIGLQPHSFLTMFNGKANSHKQISLNKAIGIIKLNIDIIGNIKSYQVIGDVKGELLEFIKKLTQ

SEQ ID NO: 9498 - protein, 1104 aa, unidentified
  REGION 1..1104: note = Description of Unknown: Cas Enzyme sequence
MKKILSLDLGITSIGYSILEKKQNNHYTLIDYGVSMFDSPFDKDGKSKKLLHSTNTSMSNLYAKRKQRKKALAKLFEEFGLEKAHKLLQQEKQNIYKNKWQLRCDDVFTRELSVGEFFTILYFIAKHRGYKSLDTNELLEELCEELKLNCEMKSSKKDDEKGKIKQALKRVEELKQNTNKTVAQIIYELELQKQTPTFRNHDNYNYMIRREYIEDELKKLVDAQQHFFKNNKDEFFEKLKEIIIKQDESSNDLNLFANCEYYKEHKVANQYSVVADIFKMYESVANITLNKEKITKEQIKLIADDFFIKIKKGKNIADIKYKDIRKILKLSDDIKIFGKSDSYVSKGKTIHNTIIKFHFLNNLSKFDNSFIVQNLDNLEKLAEIFEVLNKEKSPKTIFEKLNGNVDEKTIIKLIRYKSGKSLNISHYAMLKFIPYFQEGLTTDEIKQKLDLNRCEDYLAYKKGIKYLHINQFEKDDNLEINNHPVKYIVSAVMRVVKHLHTLYGAFDEIKVESTRELSLDDKTRKDIQKANQEFEKKLDDIKQNSQYQQIAQEYDKNLSKYTKKILMWQEQDRVDIYSGKTIGLNEIFSNEVDIDHIVPQSIGGLSVKHNLVLVHRDTNLQKSNQLPMNFVADKVGLKNRVEKLFSEHKINFKKMKNLLATNLDEIYKDSFESKSLRATSYIEALTAQMLKRYYPFADKQKQKDGSAVRHIQGRATSNIRKLLHVKTKVRDTNIHHGIDALLIGVTSHSWLQKISNTFRENFGVIDDKARERVKKELPLIEGVSVAELVAHIEENYNIYGEESVFYKDVFGNVRVVPFWVSKKSMVSKIHKDTIYAKKQNGIFTVREKILNKFISLKITPKTSSDEFMKKFKKEILEKMYLYKTNPKDKICAIIEQRAFEIAKLLDSLQLKDTTDKEMLSETKKYLDEFIHQDLKDYNGNVIRKVQFYQTNLTGFEIRGGLATKEKTFIGFSAILNGKKIKYKRIDVANFESMKKVDGFKVYKNDVVFFIYPDGSFKGGKIVSFLEDKKMASFSNPRFPANIGLQPHSFVTLFKGKANSHKQHSLNKAIGIIKLNLNVLGNIKSFSSMGEVDGELLEFLKGLKG

SEQ ID NO: 9499 - protein, 1273 aa, unidentified
  REGION 1..1273: note = Description of Unknown: Cas Enzyme sequence
LKLTISIDMGAKNNGVFIVKSENEKIIDKKGFNVILDKNSINFSKKSRRENRHRVRNYSRRKLAKKLLWSFLEKENFDNVQIELINGLLNNRGYTFLTTSSEFEELQDDTIEFLNKYIKKLDNLKTKEDFEAKISEYNLEELELFVNDINQLLDENLKKKKNEFDNDFRDNHSIIKKDLKVIRDFFNDVLKEIKTGSKPRNKYLQEIKDEINSYDFIENKEEFFNLIGNISNLQLRILRKFFDGVKREKNDYKLLKDYFQMFHWNYNDKEKIQKQKLFEKFNEYNSLEEFLYKCNPILTIPPYEDMNNRATYKCNSLLINPKVITDSLKTSIDILASQEEFEILKLENLDYPQKIQRILDINSKLIDKNIYPRNVFKYQKDNSNIAYYRNILENFKEFSEFAKKYYELEEKAINGIHKNGFFVKCNKNTPTKNNFKHILLKPLYEYSFKEDEVEKFIEKIKNIKGLQTHLKRISDTAKEYQNGFYHYIMACFENEKCLNDKNIQSIVKNLDTDVKNIKSILKELNLNTYLNSIDQIDKTNLKRILNILKQTYEILFKDINGFNKTCKTCTIENNFRSQGVAKRLLSDVAKPIDGMLDMMLDRIAFEIVDKIDECDEVEIILEQNRFLFEENLASIKSKKLKKREFKDLLNLSICPYTGENISDTNGEYDHILPQSKEVFNSKANLIYCSANGNRKKLNNRYYLKDLNEKHLKEIFKTTDIEKIQKQIKEGLDSIEKFTNFENLSLKEKISLRYALFLDENTQEFKKAFNFIKQDKLKTITNGTQKRLARLIYEKLNQKLNKDIKCDVKVIDNFLISATRKYLAFEMLEYDKETGEVLFDISKPNIQDSHSHVIDAMIAFYLANSYIKGSYHQKKSNLNSLKVKYDFKDIFIKESAIINVEKKQTFINAKDISAYKLFQDTIYKENYFNIKADFKNIGILIKYNLLYKNVNNKKIYILDKNELDNNSVYKIDVDKTSNLLFELFSKKDKNRLKELKFLDKLRFVTSRADIFKIFFDEKQTKLLDFNKIKNIPKDKEKTFKAIYKILNSSEIFEIKDDKKILNKDKVYELLKNLFKLQKRKRGKKRHIFSLPILGAAQYRVRRGETIQVVAGENIATKSYIVDEKITTIPYFSKNVISLKIEDIIKSLDLDKATFIYDIEIDTSEINELNYLKYILTEKSRLSVIVEFNKNNINFNFDDIKYFDGSKDEKFKEFIENYINSEKLKPYIGSIRNNLKGKAILIDNNAKYIKLKYKADTTTSKKDLILKNYETYNNK

SEQ ID NO: 9500 - protein, 1166 aa, unidentified
  REGION 1..1166: note = Description of Unknown: Cas Enzyme sequence
MNNTLELNSQTILSLDIGKSSVGFALVDKANNYKILNTGVRIFDAPEKPKEQTSLAQERGKFKRDRKHQENAFLRTKNIVKTMLKYNILDAKTIRDYNKSPKVYNCPKSKKKHLFYIKTAEYLFYKKANANNVLDLRVKALSSKLSKIELARLLYSINNHRGVTYEEIRDIPEGSTKTLSQDQKNLKDGFLRYKQEFQQHQDSYQTIGEYLYKEHKKKFRNKEKTSKSKKKIKDYYLFSIPRDDLKNEIEIIFEKQREFKSSFASKEFQDEYMEHFLWEKESPSYDTLVAPCVFNPLEKSASKHHISSLLYVAIETLYNVRYKKMEEKEYKNFSIEQIKQILNKSLKKLKGISYKDIKKILNLNNVEFKGVLDESKIVVNFETFIQVSKIFDLEYNLLEEFQKEDSFLHNDLVKIIDILAYTSKDSKKVEELLALNIDEQKVEDLIKVKFRGHLSYSLNVVKKMVNLMLAGLTPHKAKEEIKKEYGEIYIEKKAYLPPLIETDFPLKNNHTVVRALSQVRVVVNDILKYYRKKTSNSNWTFDTVTIELAREMNSVKQVKSINLQIAQNTKLNEEAKEFCIECGISNPTQNQTLKAKLWKMQNGIDPYVWIKSGENKKTEHYKLDVIELKRLFDEDYCQIEHTLPFVRSLDDSQSNKTLVLTKTNQDKGDRTPYEWLSKDEFEKFENYLREKKNYLAYGEARVRKLLAKDFNGIDGFKQRDIVDTQIISKYAGLYIDKYLKFYNNPNFSGKRRVYANNGKITTLLRKSWAIGKKNRDTHLHHAEDAILIACSTPSLIKNIATFINLQTQLTSSYITEKKFNYVLKNHKSLKDYILNELEKQNISLNDKDITSSIFKIIANKNYPYDGFREDFKTIIQNAPVTHFVKHKSNGSIHDETISKMKDEKTKGIKIREGIARNGAFVRCDVFKIINKRGKITYNFVVMTAQYNGKEIESLPTPKLKDGESAIFMFSVFKNDLLSYSLKDKTHIVGNFVKVASSIVVSEPKNIENDLFKKQIKAITHSYSKTDDVSNLKEIINDKKVQQALKLDLLNVAKLSSQVEKVKALCKNVSRIVTDAYEVNIVFVMSKMSSEQTKKLREILISDGIVKDELHITQELKKTIFITLSEMGYTEAMRADGQTKLIDLTKLKVNALGEVVEKITLEKRKVM

SEQ ID NO: 9501 - protein, 1338 aa, unidentified
  REGION 1..1338: note = Description of Unknown: Cas Enzyme sequence
MLRGEDLSMEKEYTIGLDIGTNSVGWAVLTDDYRLVARKMSIQGDSNRKKIKKNFWGARLFEEGKTAQFRRIKRTNRRRIARRRQRVLALQDIFAEEIHKKDPNFFARLEEGDRVEADKRFAKFPVFATLSEEKNYHRQYPTIYHLRHDLANSKEQADIRLVYLAIAHCLKYRGHFLFEGELDTENTSVTENYQQFLQAYQQFFPEPIGDLDDAVPILTERLSKAKRVEKVLAYYPSEKSTGNFAQFLKLMVGNQANFKKTFDLEEEMKLNFTRDCYEEDLNELLEKTSDDYAELFLKAKGVYDAILLSQILSKSDDETKAKLSANMKLRFEEHQRDLKQLKELVRRDLPKKYDDFFKNRSKNGYAGYVKGKATQEDFYKFLRTELAGLEESQSIMEKIDLEIYLLKQRTFANGVIPHQIHLVEMREIMDRQKRFYPFLKGAQGKIEKLLTFRIPYYVGPLAQEGQSPFAWIKRKSPSQITPWNFAEVVDKENSAIEFIERMTNQDTYLPKEKVLPKQSLIYQRFMIFNELTKVSYTDERGKSHYFSSEQKRKIFNELFKQHPRVTEKQLRKFLELNEQIDSTEIKGIETSFNASYSTYHDLLKLSDQMDTLLDDPDMTTMFEEIIKILTIFEDREMIREQLKPYETVLGLPAIKKLAKKHYTGWGRLSEKMIQGMREKQSRKTILDYLIDDDDFPCNRNRNFMQLINDDHLSFKETIANELIMSDSNVLLDQVKAIPGSPAVKKGIWQSIKIVEEIIGIIGKAPKNIVIEMARENQRTSRSRPRLKALEEALKNIDSPLLKDYPTDNQALQKDRLYLYYLQNGKDMYTGEPLEIHRLSEYDIDHIIPRSFIVDNSLDNKVLVSSKVNRGKLDNAPDPLVVKRMRSHWEKLHQAKLISDKKLANLTKQNLTEADKARFIQRQLVETRQITKHVANLLHQHFNLPEEVSATEKTSIITLKSTLTSQFRQMFDIYKVREINHHHHAHDAYLNGVVAMTLLKKYPKLAPEFVYGSYIKGDINQINKATAKKEFYSNIMKFFESEEIICDEQGEVIWNKKRDLSTIKKTIGAHQVNIVKKVEKQKGGFYKETINSKANPEKLIPRKASLDPLKYGGYGSPLVAYTVIFIFEKGKQKKVTKGIEGITVMEQLRFEQDPREFLKTKGYEGVKQWLILPKYILFEAQGGYRRMIASHQETQKANSLILPENLVTLLYHARHYDEINHKVSFDYVNAHKEGFNDIFDFISDFGVRYILAPQHLEKIKVAYEKNKEVDLKEMIDAILSLLKFTLFGASVEFKFFDIKILKRYKSLTDIWEATIIYQSVTGLYERRVEVRKLWDGERL

SEQ ID NO: 9502 - protein, 1041 aa, unidentified
  REGION 1..1041: note = Description of Unknown: Cas Enzyme sequence
MERTHYRLGLDIGANSIGWCCLSLDEDRRPCAVLAAGVRVFPDSRDPQTLASLAAERRAARAARRRRDRYLRRRRALANALVRHGLMPESGSVSGSDPWPLRQAALVRPLSPHELGLVIFHLNQRRGFASNRRTDGSNEEERGKIRDAADRLRGELSRAGAPTLGAWLAERHAARKPVRARLRGEGAQAHYDFYPTRELVLAEFDAIWAAQAAWNERLTDAMRDEIRRILFHQRPLKPPVVGKCWLEPEEDRAPRALPTVQRFRIAQELAHLRITIPGFPDRPLSDTERALLLARLNAGCDISFEQVRRALGLPGEARFNLESLNREKLEGAATARRLAIGTKKRPAPLAEVWDSLDDATRDQIATVLVEVETEDEAFARLLALGLPEEAARRTAGIVLEDGRASLSLTAIRRLLPFLEQGLRYDEAVRAAGYAHHSDDRTGELLPELPYYGEVLKERLGTGTNDPKDPEEKRLGRAPNPTVHVALNELRRVVNALIARFGRPEEIVVEVLRELGHSAVQRREIEKAQKENRERNERAKRAIESLGLKVTGGAIRRYRLWEDQAQDPKDRCCPITGTLIGIEALFSAEIEEDHILPFAITLDDSNANRVLVTREANRRKARRAPFEAFGHTPEWPEILRRVALLPPAKRWRFQEGALERWQGEEKDFLARHLTDSAYLARLARLYLRVICDPDRVWAVPGRLTALVRGALGLNGLLGGPGARKDRTDHRHHAIDALAVALTDRSLLQRVSAAARRAQEVDRRLLADLEEPWPGFHAEAKAAIERVVVSHKPDHGTGGKLHNDTAYGEVRGADETGPNVVVRKPLSAFLRATPEEARAAIRDPVLAEKVAAALAANADAKSRAAALAALEHGAGTVRRVRTWERLETRPIPSAPWKRVKLDANHRIEFWRLPGKGGKPGKVVTQLVPLLDAAAEAEAKRLGRKVAERKPHPAATLLMRLHKNDMVAFGEGEARRILRVVKMSKGQVVLAPHHEGGNLKARDADTADSFKYINGSVAAFRRERARLVRVDPDGRVHDPGPRAW

SEQ ID NO: 9503 - protein, 1271 aa, unidentified
  REGION 1..1271: note = Description of Unknown: Cas Enzyme sequence
FPEKFDKLNHFNISEYVPFSQESIEEAKKVFNVDNLPIDWTIYYLRDKALKQKITLSELTRIIYHFNQRRGFLSTRKTEEIDTLKQGDEEQNDKSKEILYEYLKVEEIIDTNEKVGNKTKFKLIATSPDNINYEGSITRKDLPKDWIGKTILFEIKKTTLKSGEVKIEFNRVLESDWKKQITALEKEIVSSGLYVGQYHFKNLLVDPNYRVKEKVVSRKFYQEELEAIWKKQAEYHPELNDTSKIPLIAETLYPHNIQKQRELSKLNLLEIIKDDIIYYQRPLKSQKKLISECRFEKKNYIDDLGRQPGYKVAPKSSPLFQEFRIWQDIHNLRVYLKEKKLDDGSRIFDVEETNFLLDTKGKEKLFDLFDSKTNIKIDDILSALSKPDYPVSKKTHRINFPEDREFKGNETKAKFRNAFKKFNYNEGEELLQDRNKLFELWHIFYSIDDEKVISSVLQKKFGFSQELADYISQLEPFKKEYAAYSSKAIKKLLPLMRCGKYWNQEDISDDAIERINKIISGELISEFPERVREEISKRNFKTIQDFQGLPVYLATYIVYGLHSERENYEKYDNPDEIKVDKLIPNNSLRSPIVEQVIRETLKVVQDVWKQFKQPDEIHIELARELKNNAKTREQLTKAMLENQKERKRIVEILKHIKNANPNSEKDIEKLRLWEETATPEHKKAMPKISASPTKAEIEKYILWGEQNHISPYTGKAIPLSKLFTQEYEVEHIIPRSRFFDDSFANKTIAEASVNKFKGNLTAYEFISRYGGTIVPDTKIKLFTLEEFKQHIDGIFKGKKKEYFLKQEIPKDFINRQLQETRYITRKLGELLYPIAKDDVVFTTGQITAELKKNWGLNRVWKEILKPRFERLEKILGEKIIIINKETNEIIFNIEYDKRIDHRHHALDALVIAATTREHIRYLNSLNAANQEDLIKINYQLVKKGIREFRLPWPSFTKEAKEHLNSVIVSFKKKNRLVQRGYNKYQKWVFENGKWVKKFVLQDRSKLIAIRKSLFKEPLGIIHLATYKDVPVKKAIQYQFEYLTNFQNHLQTRIADRKLREKVNKLIKNCSFDLAETIKYLEKHPLKDRDGNELKKVTILQFEEFAAKRVNIDESFDKKKIEKIPYANHQKNRIVKILKEHLSEYGNKTSEAFKGEGLEKLYKKFGMVIRKVTRTEDVGNKINLNGKLLEIDKGGNVFFVIYQNLHDPFDRIVSDESSISLLDVIVAYVQGKKITDIGENKPGYKKIILSPNDLVYVPDDGEVIESIDWNNK

SEQ ID NO: 9504 - protein, 1369 aa, unidentified
  REGION 1..1369: note = Description of Unknown: Cas Enzyme sequence
MKKILGLDLGTTSIGWAYVNEADNESEKSSIIKLGVRVIPLTTDEETDFQKGKAISINADRTLKRGARRNLNRYQLRRDTLIEVLKKKNIINDVNVLTENGKNTTHTLWQLRAKAAKEKISKDDFAKVLLMINKKRGYKSSRKAKSEEEGTVIDGMEVAKYLYENNLTPGQYVYELLKNDKKYIPDFYRSDLQNEFNKIWNFQKRYYPEILSDELKENLKDKNKGQTWKICEKPFNIKGVKLQGKPKEQKMEKYKLRTKALLEQLDLEYLAIVFQEINNQINNSSGYLGAISDRSKELYFGKLTIGEYLYNQLKENKHTRLKNQVFYRQDYLDEFERIWEIQKEFYSELTDNLKSEVRDVIIFYQRRLKSQKHLISFCEFEKRHRVIPKSSPLFQEFRIWQNLNNLIITDKKTNEKYELDIELKKELFKELNIKRELKAVDVLKIIGKKSKDFELNFGIIQGNRTNAELYKVYQKILEFEGEDYDFRKMKSDKINDIVSTKFLEIGINTDILSFDAEKKGNDFDKQAFMQLWHMLYSFEGDNSVSGNEKLIKKLNQKFGFKKEYAKLIASISLQADYGNLSSKAIRKILPYLREGNKYDVACAFAGYNHSSSQTKEQNESRELKKLMELLPKNSLRNPVVEKILNQLVNLVNAIIEDEDLGKPDEIRIELARELKKSAKERAEMTSNINKATARHEKIRKLLQTEFGISKVTRNDIIKYKLWEELEKNGYKTLYTNTYIPKHELFSKKFDIEHIIPKTKLFDDSFSNKTLSVRQVNIKKSNDTAYDFIKNKYSSDEFENYIARIKMMYKEKAISRAKYNKLMMKNTEIPDEFIDRDLRNSQYIAKKAKQMLEEVVRTVNTTTGKITDRLRRDWQLVNVMKELNLPKYEKLGLVEFIEGKNGQPEKRIKGWTKRNDHRHHAMDALTVAFTSYSHVQYLNNMSARNNEAHKKYHTVYGIEKKYLYRDKNNKLLFKSPMPIDEFRRETKKHLENILVSFKAKNKVVTRNKNKIKIKGKDNYKIQEVLTPRGQLHKETVYGKIQRYETKFVKIGTKFDLEMINKVAEKKYREALLKRLNEFDGNPQKAFGGKNAPSKKPVYISETEVLPEKVKTVWKEDIYTIRKDITPDLKIDKIIDVKIKNILKHRLEKFDNNAKEAFSNLEKNPIWLNKDKGISIKRVTITGVSNAEALHYKKDHKGQFILDKNGDKIPVDFVSTGNNHHVAIYKDEQGNLQEEVVSFYEAVHRVNQKLPVIMKNHPEHPDWVFQFSMKQNEYFVFPSDNFDPNEIDLLNPENANLISPHLFRMQKFSKVTYGNSAVRDYVFRHHMETQIVDKKETKNVTYIVAKSLSKLKGVVKVRINHLGKIVEVGEY

SEQ ID NO: 9505 - protein, 1495 aa, unidentified
  REGION 1..1495: note = Description of Unknown: Cas Enzyme sequence
MKKILGLDLGTNSIGWSLIEQNFAKKEGKIIGLGSRIIPMSQDVLGKFDSGVSISQTAERTGYRGVRRLNQRNLLRRERLHRVLNILEFLPKHYSEAIDFEKHFGQFKENVEVKLNYSKNEQGRFEFLFIDSFNEMVAEFKDAQPQLFYKKENGKETKISYDWTLYYLRKKALSKKISKEELAWVILNFNQKRGYYQLREEESEASGAKQEEFYTLKVADVQATDDKNEKGTWYNVILENDWIYRRQSKEPLNNWIGKYKEFIITTTLEKDGSLKLDKEGNVKRSFRAVDSEKDWIAIKKKTEQDIDKSKKTVGQYIYETLLRNPKQKIRGRLVKTIERKFYKEEFAAIIKEQVKHHSELQDSVIYENCIQELYPRNEAHQQNISAKGFEYLFVEDIIFYQRPLKSKKSTISNCSYEKRCFKKKVEIEGIEKEIVVREALKGISKSHPLFQEFRLWQFLKNLKIYRIDGKADIDITLQLLQTEEDWVGVFDFLNAKKEVEQKQIIQYFISKKLISKAEKSNYRWNYVEDKKYPCNETRASFLSQLSKVQGIEATSFLTSEKEHKLWHIIYSVKDKREFETAIENFAIRNNIDKDTFMKNFGKIPPFKNDYGAYSEKAIKKLLPLMRKGKHWSETAIAQEVKDRIESIMERVATIDVKAKDINEEIARVSDDDIPKQLVKSFLKTKDKSLSGLNTYQACYAVYGRHSEASEIKQWQTTEDINEFLKAFKQHSLRNPIVEQVVTETLRVVRDIWNYYGDGTESFFDEIHVELGREMKNDKKTRERISKQNTTNENTNHRIKELLKELMNDSNIEGDIRPYSYSHQEILKIYEEGIYQNIENVGDDIEKIRKSSSPTKSEINKYKLWLEQGYISPYTGEPIPMSRLFTVDYQIEHIIPQSRYFDDSLSNKVICESAINPNPYKDNQTGYEFIKNQGGSIVSELSTKEKTVKIFTLEQYESHCNKYFKKNRTKLRKLLSEEIPEGFIERQLNDSRYISKLIKGLLSNIVREDGEREATSKNITPVTGAITSKLKQDWGLNDKWNELIAPRFERLNKLITKEGEPLSTDFGYWDKKINAFRTKVPDEIAKGFNKKRIDHRHHALDALVIACCSKRHTNYLNALNAEKKNYGLRDSLLIKSKEGHYTKHFLMPWGSFTIEAKAQLEKTIISFKQNLRVINKTNNKTWQWVEKNGKLKKQLVKQTKGDNWAIRKPMHKETVSGRISFDAPKGKIATATRVLLSDVKSNNILEKITDTGIKMILKNHLKNFVDEKGDRQFDLAFNVDGIEALNKNIVHLNNGKLHQPIHKVRLYEIGSKFAVGYKGNRKDKYVEAAKGTNLFFAIYWNEAKNKREYETIPLNEVIEHQKQVAHLPREERTPVPLNTEKGKFLFTLSPNDLVYVPTDEEMDNPKAVDFGNLSREQVKRILVVNDFSGVTCNFTPNQLSQAIAPKEVDLSFDSKKNKLVGSHDTKTTKFEGRSIKDCCWKLKVDRLGNVTRIKIT

SEQ ID NO: 9506 - protein, 1063 aa, unidentified
  REGION 1..1063: note = Description of Unknown: Cas Enzyme sequence
MIRLGLDIGTSSIGWWLYRLENDRPVAVIDGGARIFSDGRVAKRRASETAPPLAVARRKARAARRRRDRYLRRRVVLMERLAAAGLMPVDPAEAKKLELLDPYAIRAQGLDEKLPLSHLGRALFHLNQRRGFKSNRKTDGADNEAGKIKMGTARLEQAMMAAGARTYGEFLHKRRATADKPHRTPSVRTRLTVAKRDNAEKEEAGYDFYPDRKHLEEEFHKLWQAQAKYHPELTDELHDTLFETIFYQRPLKAPEVGLCLLTDERRLPKAHPLAQRRVLYETVNALRITSDGRAKQPLSIDDRDKIIHALDGKKHTKNLSGMKLALKALGKVIGLQPNQRFTLETAARDSIACDPVRASLSHPDRFGSRWNTFDIEEQWRIIQRLREESDPDAMVNWLKEEYGLDDAHAAATASAPLPEGYSRLGESATRNILEHLQSVVIPYSEAVARCGYHHSDERTGEVIEALPYYGEILQRHVIPGSGDAKDDDITRYGRITNPTVHIGLNQLRRLVNRIIEVHGKPDQIVVELARELKQNDKQKAEIQRTIKKNTEAAIKRSDKLAELGQRNTGANRMILRLWEDLGEDCLKRSCPYTGKRISAEMLFDGSCDVDHILPYSRTMDDSFPNRTLCLREANREKRDRTPYETWGHDKDRWAIIQANLKNLPDNKVWRFAPDAMERFEGERDFTDRSLNDTAYLSRISKAYLEALYDGGDQKSHVWVVPGRLTEMLRRVWDLNSLLPDHNRAAKAKNRHDHRHHAIDAAVIAATDRGLIKQMADIAKQKEQEGANDKARGTEPPWAGFRDDIAEKVNAIIVSHRTDHGLGPQRKAGQTSGQLHNDTAYGLTGENKGKVPLVVTRKPLDSLTPAMIGKIRDPYLQNALLFATQDKTDKEFGKAVQDFASREGPYQGIRRVRIIEPIDVLEMKDESGKPYKGYKPDSNHCYEVWKMPDGRYSAQVITTFDAHQPGPLPRPHPAARRIMRLHKNDMVRLDNSKFGPVIATVEVISAATVSMVPHNESNADQRYRKDKDDVYIRMNAASLMKNGARRIFVDEMGQVRDPGPHNKR

SEQ ID NO: 9507 - protein, 1129 aa, unidentified
  REGION 1..1129: note = Description of Unknown: Cas Enzyme sequence
MEKIMNKKILSLDLGITSIGYAILNEIDNDRYELVDYGVSMFDKATDKDGKSKKLLHSASQSSANLHGLRKIRTKNLASLFEKYNLGNAVDFLRQERENTYIDKWYLRAEKSFTEKLKIEELFTILYLMTKHRGYKSLDTDDLLDELLVELGFEVEAKKEKDAEKGKIKQALKTVESYRKKYPAKTVARIIYEIEIKKENPTFRNHDNYNYMIRREYIREEIKKIVLAQNEFGLFTKDFDVDSFIEELIATIDDQKDSTNDLSLFGNCEYYSEHKVAHQYSLLSDIFKMYQSVANITLNKTKITKEQIKIIADDFFKKIEKGKNIADIKYQDIRKVLKLNDEVKIFGKEDYHLNKKSIKVHHTITKFHFLSSLGKIDNTFIKSTFTKENKLEILQEIFDVLEFEKAPKSIYNQLNEIFGKYVLVEDESVKNKTIINLIKYKSGNSLNISAYAMRKFIPYFEKGMTSDEIKQELKLERNEDYSNYYKGIKYLHVNQFEKDDNLEINNHPVKYVVSATMRLVKHLHATYGAFDEIRVESTRELSQNEETKKAIDKANKANEKKFQEIVENEEYQKIANHYNKNLKKYARKIMLWEEQEKLDVYTGKTIGCEDIFTNVVDIDHIIPQSLGGLSVKHNLVLAHRDENVQKSNQLPMNFVKDKKAYENRIEHLFKEYRINWKKKINLLATTLDEAYQDTFESKALRATSYIEALTAQMLKRYYPFLDKKKQANGQAVAHVQGRATSNIRKLLDVKIKVRDTNIHHAIDAILIGLTNKSWLQKLSNTFRENMGVIDDEARANIKKEIPLIEGVEPKELVELIEDAYNIYGEESVFYKDIFGKTKAVNFWVSKKSMSSKIHKDTIYAKKPNNLFTVREDIIKQFIALKITVTTDSETFMKAFEKKILQKMYLFKTNPNDVIVKIVNHRGNELKSLLQSFVNIDIKNKEVMSEAREKLDTLIHQKLVDNNGNIIRKVKFYQSNLTGFDIRGGLATKEKTFIGFRATSNNEKLFYERIDASNFKRIQKENDGSFKVYKNDVVFFIYEDEIFKGGKIVSFLEDKKIASFSNPRYPASIKFQPHSFLTLFKGIPNSHKQYSLNKAIGIIKLNLDILGNIKSYSKFGVVSKEVELKIFHKE

SEQ ID NO: 9508 - protein, 1195 aa, unidentified
  REGION 1..1195: note = Description of Unknown: Cas Enzyme sequence
MEKIMNKKILGLDIGANSIGFSLLRLSEQNGQTTFEDLASNSIVFSEPNTAEDRRKARGARRLHQRKSARNKNAREVFVNYGIADKLFITDTTRYIENFKLKSNDVYALRESAVLGKNLTKDEFVLATYSILTDRGYTNMFALVEEETEANKEKKKEDEKLNGAIEKNKEAYRANNYALPSMVLTSRRKELGKEYQNVAIRNKGGYHNSLDRDMHKEEFERVVRSQSTNKNIFKNEEDCEQFIEKIVEEKYNAFYQRPLKSFEGMVEYCSFYDEFNPKGSEKRMPLSNIRNIELTLRQSIDNYQAVDKNGEVKVFTKSEKDQIVNFWLTSPNADKINNKNIYKNAGFKSVKIHTKDDSELLILNIQAHRGMLSLLKKYKIDFQDTQNEFYNEVLLELYYYKNYSSRVEQINKIIKKYQLDIDSSFVDEGSQLTQMDGFGRFSLKFANEVLALMNNEEKIHSDALDALGYNSKYLNMPSYDYLPPLEPSKADIQWLQKNISYFDTTHLFYQPMMSPKVKRVIGILRKLINELMKKYGKIDEIRIETAKELNSKKEAEKITKNQTQNNRKNKEAEELLKNNGLNVSDKNIQKVKLFKEQECDCLYCGKNMTLDEALDENIAEIEHFIPRSVIWINSQKNRILVHKECNQNKGSQNPMVYLKSIGEWENFKGRVKLHPKTPKYKWLTDEDVINSAMAKENWQDSYLNDTRSATRSIAKYLNHYLYPNKNAHNKDGENHITSVSGKAISELKYMWGIHTVMPKDEDGKKDRNTNYHHTLDAFTIALCSPSATQALNNHFKKNENRFKTKALKEKLASNIPLSYDGVNVVEHLKTLVEKYETNALYVCPYNKRKTNMKGFKDGNLKLYVAKDPKDESKEMLAEMEKVAIDDSLFFKKVGGFDKPRSDDEVKKEIASIVKRLNPQKQQNIIDAIKVYGDALLELRAKVNSVDKEIKKMKNKIKTGKQHKEFNDAIKIEMQPFQEESKTLSNQLQSLTCSFKVKNGKRQIVRSVKLHKVKVAKTSADSILFLKKEDKSIERLSLRNFKQAIEEKEPFVIKENESTLCVELYSHPKQNQVVGLKYFSSIANPHIKTKFNEKYGNMFDNEKPISTLYKNDIIKVDNKKNGSINYYIFNGGGNIAGTNNKLSIKNINLNNFIKIDNKGTVKESKESTVTPNKTTIISKVKIDFLGNIIEDKPNEK

SEQ ID NO: 9509 - protein, 1413 aa, unidentified
  REGION 1..1413: note = Description of Unknown: Cas Enzyme sequence
MSKILGLDLGTNSIGWAIVDVDRVNNKEDFNLIDKGVLIYTEGVKKEKGNEISRAAERTALRSVRRLKFRRKLRKYETLLVLAKNEMCPLSVTEVIAWKKSNFKVFPNNEQFLHWLRTDDKVNKNPYYFRDKASKEKINELDLGRAFYHIAQRRGFLSNRLDQSDKGIIERYQPRLSEILETSTNLTELTIQLHDFFKELDILDKKSKDLNEGDKKLKTLYNIFSRILKNKDGFLEIKEKIKERLFKKENLGKVKQGIEDLDEKIKAGKFKTLGQYFYSIYGNTLERIRNNYTAREDHYLHEFEWICKKQNIGGIIETEKEFLKKYKGLTLELYKAIFFQRPLKSQKGLIGKCTLEPAKYRCPISRPEFEEFRMYQLLNTIKIKTPKDEKLRFLFSDEKEKIKGLFYRKSKPNFNFSEISSKLIPKHKTPIYYKSDEARDAEYIINYKRNTNVSGCPTIANFKNIFGDNWKELHYTYTTNVNGKEKNVQIDYTDIWHIWTTFTTKEKLAYFAKYKLKQDDAFMHKFKNVSLKKDYATLSLKAINNILPYLKDGLLYAHAVFMANMKHVVKTKNWNNKEDKSLIEKEIANIISTHQVKNKLFFVINGFIKKNFDNSYSKEADIIYRKELKAQFKKEFGKIKWETITNNELFETYYSIFVQKFKNKRFVQIKRIDEKIISFLKDHDLLKDKEKLYHPSDIEKFKLEKVVSENNVETIVLGSPLSNSIKNPMAMKALHKLRKLVNTLILEGKIDKRTKIHIELARELNDANKRKAIQKWQKEKEDIRKEYSKKIKEFKANYIPNETDILKYQLWEEQKHICLYTGNSINIEEFLGKNPKYDIEHTIPRSVSIDDSQQNKTLCESRFNREVKKNQIPYQLKSYTEVLKRIQHWKTKCLKLEDEIAGLVRASKTASDKEKKDRIIQKRHYLKMKYRYWKEKYKRFELKEIKSGFKNSQISDIGIITKYAQQYLRSYFDKVYSVNGTMVDQFKKIWGIKKVITDANGIEKKDRTNHIHHCEDAITIACMTKNKYDILAHAWRLEENEILGNRTLVNVRKMLQNSKPWKTFTEDVRNIYKEVLIVHTSKNKVPIQSKKILRKRGKRQYNKRGNLIYLQGDTVRGSLHQDTFYGAIKKKDIDTVYYVVRKPLDGIKKTDVDKIVDEVVKGIIKKAIEDNVLIARGDSYKLEKDKKIWMHKDKKIPINKVRIYMPSVKNPIQDFKKHAKPFLSKKEYKQAYHVQNDENYCMAIYEGKDKKGNVKRTYELVNMLDAGSYYKLSNMKDCKEHGIVPIQDIKTGYPLKNILTKNTQVLFYRDYPDEIWELDTKEIKKRLYKIIGFEADGRIQFRFHQTAMQQSSANKNEMTIVKYMKENNLKNSEIDFENPVPWLRLSRTKFDFIVNKKDFEISEIGIIKKYKSN

SEQ ID NO: 9510 - protein, 911 aa, unidentified
  REGION 1..911: note = Description of Unknown: Cas Enzyme sequence
RAIKRLLLKNKILSQEELDNLFIGNKGQKDVWDLRREALYRELDNKELSRIMIHLAKHRGYFSNRKSEKPDKSDKEATAVLGGIEKNKDVLSSKKYLTIGEYISTKSKKRNGKDKDGKLNYENSVERYMLIDEINIIFSKQKEFGNKLVSDELLQTYKEIAFEQRALKSVAHMVGKCPFETDEPRASKSSYTFEYFRALQKLKNLRVINEDGYEMPLVFEQIQQIVREAKVTKNFTYKSFKKLFPQYKDMKIKGLVYHDHKTGEIKDPEKVKFLDFSAFQAIKKTIQDSDNLYWDTIENDSDILDAIATVLTTEKNDAESKKQLKEIVESEKACEALLSLSFSKFGHLSNKALKKIIPELEKGFDYDVACKNAGYDFQAIFKGDKSLFLPPLSKQENLEMTNPVVKRAVAQMRLVYNAIARKHGAIDAVHVEFTRDIKNSHDDRRKIEKAQGEFREAKEKAREQAIDKLGKEPNAKELLKFRLWEEQGGHCIYSGEYINLHMLADPYATEVDHILPYSRSMDDSLNNKVLCLTKENQDKGNKTPYEYIEASRWEEFVGRVEGLKNMKYAKKNRLLKTNFDESSEIAFKERNKNDTSYISKFVKNYIESHIEFKESKMKRHVFTMNGMLTSQLRYKWGVGDKNRDNHLHHAEDAIILAFSTQSMVQKLSDASSRRESEGFKYKSKEEKSKELRFVTPVEDFHKKVQESLANIFVSHMPRRKVGGAAHKATVYSDKTLSMKKENGKIDVLKGGSVSNNVKLKHGVALNDGMPRVDLFQNIKTKKYYLVPIYVSDFVKDKLPNKAIVAGNKPWIEMDDEYEFKFSFYKRDLIEVKTKQTAKKEATQVLGYYDSTHSGTANISIFSHDGNNEYNFGSQNLVYIKKYQVDALGNYVEVKSEKRQGTIKEGRAKRKK

SEQ ID NO: 9511 - protein, 1182 aa, unidentified
  REGION 1..1182: note = Description of Unknown: Cas Enzyme sequence
MGQRILGLDIGIASVGWAVVDYDKEDSTQNKIVKSGVRTFIKAETPDRGESLALKRRESRSARRTLKRKRQRMKKIKYLFIEYLGLSNQDLFTYSKKEDNTIYMQHNIEKSNRIDVWELRHKAINEKLNTIELARVLTHIAKRRGYFSNSKVQEDKQEDKGKVKEGIKNLTALVGTSLTTIGSAIYETTKQGEAKRNHPIKKIKKDGTVDIDKDTGKPKMTAGYQFVATRALLEKEIKIIFEIQRELGNKSATKEFEKKYLELFNKQLPIQFDEKMIGKCTFEPKEDKAPRFAYSSEEFIVLDSITKTSLNHNQSGKTRTLLSFVTIDEIFHELQQGAKTGLKYSVLRKKFKIDDAFRFNAINYVFDPEKKKKLPNYKKIIEMEDWLTVEQKEKIERRLNTKLNKNAKLKTFLDLRYFLNLDKSREFVSVKYNQNPEDVVFIKLQGYHEIKSAFKGYENDFKTLFNNRVEFNQVANILARKKDDRLRKEELLKLSSSLEQDVIEKLLPLSFSGFIKYSFKALEKIRPLLLEGKKNYEALTIIYNHHSFGLKSTEKKKSLRALNDNEKHQITSPVAKRSIAQTRKVINAIFRDKSTFGEIDRIHIELAREIKNSKKQRDKISQGQDAYKNEKEIAKKELLEHINNMSDFSMSENDKGFENLLLKYRLYRQQDGKDVYQWRGNDYKGIEIDRLIRDENYCEKDHVLPECRSFDSSLNNLVLTLTHNNQNKGDFTPFEWIANEDEDCDAWKRFKTYIDSFNNIKSAKRKKLLRKNYPKRRGDAISTDDIENEEGSFIARNLIDTQTTAKFLKNFIEQNLLIGEDDSKQKVFTRNGMLTSTLRYQWGINAKNRKNNYHHAEDAIIIAFATQGEVQKLSTLSASNVKYNLKKIPLKKEPMDNFRSEVQKSIDEIFVSFMTRKKIGGETNSPNPKTVNVTKYRKYIENHTKLFAVYKEEKYKSTKEKQYKEPIDIYLDKLIKKEDWISNEQRKLIKEHKPKRYSDLRSLLKLDSDFEFYAISYRPKETILLRGGSVEKGEVKRIDVFKRDDNYFFVPIYPHEIETKSVEELNMAIDTKKYKNYTDGIIIDENFDFNFSLFKNDLLVVKQNDSEVLEYVYFSQLKPSNGQIFFLNHYDADRKNPYSMYIHNIKKIEKYAVDILGNISKNSILEKRLGTKLDSRLTKKKK

SEQ ID NO: 9512 - protein, 936 aa, unidentified
  REGION 1..936: note = Description of Unknown: Cas Enzyme sequence
KFPPYKSDFGAYSEKAIKKLIPLMRRGKYWNESAISQEVKDRIENIKERLESINYDEEVFKEDKQNRLPSISDDEIPKQFLKSFVAFKDKNHLTGLNTYQVCYAVYKRHSEAGDLMQWRTPQDITNYLNDFKQHSLRNPIVEQVVTETLRTVRDIWLHYGNSKENFFNEIHIELGREMKNPAEKRKRMSAKVSENENTNQRIKAILQELKDGGISEVKPYSPSQQEILKIYEEGVYQSIEVSDVIEKIRKNTLPTKAEINKYKLWLEQGYISPYTGQIIPLSKLFTHQYEIEHVIPQSRYFDNSLSNKVICESEINRDKSNMTAYEYILKKGGSIVDGIKVLSKEHYEKHCENYFKKNRTKLKNLLSEDVPEGFINRQLNDSRYISTLVKGLLSNLVREDNEKEATSKHIVPVTGAITSKLKQDWGLNDKWNELVLPRFIRLNELTNTNNFTAKNTNGVIIPTVPNELSKGFNKKRIDHRHHALDALVIACCTKKHTNYLGALNTENTNFGLRDALLIKNKEGNYTKHFLMPWSNFTSNAKTHLEKTVISFKQNTRVINKTNNKTMQWVEKEGQWKKQLVPQNKGDNWAIRKPMHKETVAGKVILKREKGFVNLNLAIGNYKMIVDKSIKNKIKVAFVLFDNDVKKVKAHFKKNPIKVAGKELNKIAIYENIEATATRTALTDKFTRKHLESITDTGIQKILENHIKNYVDENGKEKFDVAFCPEGVEELNKNIVELNGNKKHQPIYKVRLYEVGSKFNVGLKGNRKDKYVEAAKGTNLFFAIYQDEEGNRKYETIPLNEVIEHQKQVAHLPKNERTEIPIKYVLGTKGKEIPVQFLFSLSPNDLVYVPTNEEIEKPTAVNFNNLSKEQVESVYKMVSCTGNRMYAVPSNVAKSIQNKFEFTSLNKLEFDLSGNSLKERCWKLKVDRLGNIIKVEK

SEQ ID NO: 9513 - protein, 1434 aa, unidentified
  REGION 1..1434: note = Description of Unknown: Cas Enzyme sequence
MKKILGLDLGTNSIGWALIEQDFDKKQGGIIDAGSRIIPMDAGILDAFGSGGTIKTGTTERTGYRGTRRLYQRDNLRRERLHRVLNILDFLPEHYKNEIDFEDKLGQLKSEVKINYRKNQKEKYEFIFTDAFNEMVKEFKEEHPELFFIKKNGEESKIPYDWTLYYLRKKALKEKISKEELSWVLLNFNQKRGYYQLRGDELSKEDEKDEKYYALTVKSVIETEDKNAKGTWYQVYFEENDWVYKRQSKETLNNWIGKKKEFIVTTTIKNGNIKRSFRAPKEDDWGLLKKKTEQNIEKYINNDYKNKSVGTYIYDTLLTNPNQKIRGKLIKTIERKFYKKELQAILEKQIEFHNKINIKTDLGKELYYKAINELYKHNEAHKNNISNKGFDYLFIDDIIFYQRPLKSQKSNIGGCQYEYRIFKKEIKDTDSGKPKEIEVKQPIQAISKSHPLFQEFRLWQWLHNLRIYEKEKNIDGKIKIDVDVTQEIFKTDDDWTKLFDFLNNKKEIKQSQLIDFLVKEKYIAKQDKENYRWNYVEDKTYPMSETRFQILSRFKKVKNIDLMTLSHQINNKLIQKLWHIIYSVNDKEQYKQALKTFARKNNFDVDSFVSEFEKFPPFKSDYAAYSEKAIKKLLPLMRMGKYWNENDIQKSAKQRINDIIERLKAIDFDKSKIEKVEDDDIQKQMLKSFVEFKDKNPFSGLNTYQAGYAVYGRHSETDNITKWKKPEDIDEYLKNFKQHSLRNPIVEQVVTETLRTVRDIWKEYGDFNEIHLELGREMKNPASIREKLSKKNTENENTNHRIREILRELMNDGVPKVKDYSPSHQEILKIYEEGVYQSSDVSDDIEKIRKNSKPTKNDIIRYKLWLEQGYISPYTGEIIPLNKLFTTDYQIEHIIPQSRYFDNSMSNKVICESEVNALKGNQTAYEFIKDKGGSKVDLGQGESVEILKFDEYETHCKRYFAKNIAKLKKLLSEDIPDGFIERQMNDSRYISKLVKGLLSNIVRDEDEQSETSKHLIPITGAITSKLKQDWGLNDKWNEIIRPRFERLNKLTNSNDFGYWDYERDERGNKTGKQFFRITVPDNLQKNFKKKRIDHRHHALDAIVIAATTRKHIQYLNSLNNEKEKYELQPSLLIKNKEGHYTKHFQLPWNTFPVDVKNSLDNIIVSFKQNLRVINKATNKYQKWEKDKNGNYKKVLAEQKGQNWAIRKPMHKETVSGKISFDAPKGKIATAVRTSLTEIKNRKHLDKITDKGIVNILENHLKNYTDDKGNENFEAAFSPEGIEELNKNIVELNEGKKHQPIYKVRLYEVGSKFALSENKNSAKSKKYVEAAKGTNLFFAVYETRDKNGNKKRVFDTIPLNMVIEHQKQMANLPKEQRTTIPVDNTKGKLLFTLSPNDLVYVPTNEELENINSIDFSNLTIEQKKRVYKIVSFTAK

SEQ ID NO: 9514 - protein, 985 aa, unidentified
  REGION 1..985: note = Description of Unknown: Cas Enzyme sequence
MGKLILGLDLGITSIGWALVDIDEKNIVNNKIIDSGVRIFTIAEHPKDGKSLALPRREARGARRTTKRKAQKLRAIKRLLLKNKILTLDELDNLFIGNKGQKDVWQLRRDALYGELDNKELSRIMIHLAKHRGYFSNRKSEKPDKSDKEATAVLGGIEKNRDILKSKNFLTVGEYIATKIKKRNGKDAEGKLNYENSVERYMLADEISIIFSKQKEFGSRLVDDELFEAYKEIAFSQRPLKSVADMVANCPFEVDEKRASKSSYTFEYFRALQKLKNLRVINEDGYEMPLIFEQIQHIVREAKKTKNFTYKSFKKLFPQYKDMKIKGLVYHDHKTGEVKEPEKVKFLDFSAYQTIKKVIQEVDNLYWERIETDSDILDAIASVLTTEKNDKESLKQLGEIVDRRNVCEALVGISFSQFGHLSNKAIKNIIPYLEHGDDYDKACDKAGYDFKAIFKGDKTKFLPPLTKQENIEMTNPVVKRAVAQMRLVYNAIARKYGEIDAVHVEFTRDIKNSHDDRRKIEKAQGEFRDTKEKAREQAVDKLGKEPNAKELLKFRLWEEQGGHCIYSGAYINPHTLSDPYATEVDHILPYSRSLDDSLNNKVLCLTKENQDKGNKTPYEYIDNSKWDEFVGRVEGLKNLKHVKKNRLKKTNFDESSAKDFRERNKVDTSYISKFIKNYIESHIEFKKSKDKRHVFTMNGMLTSQLRYKWGVGDKNRDNHLHHAEDAIILAFSTQSMVQALSTVAAKKETEGFKYKKKEDKSKYLRFITPLEDFHKQVQESLADIFVSHMPRRKVGGAAHKATIYSNKTFSMVKENGKTDSLKGGSKTNNVKLKHGIALNDGMPRVDLFQNRKTKKYYLVPIYVSDFVKDKLPNKAIVAGNKPWIEMDDSYEFKFSFYKRDLIEIQTKKTPTKESVQLLGYYDSSHSGTAQITIKSHDGSKEEILGSQNLVFIKKYQVDALGNYVEVKSEKRQGTIKEGREKRKTR

SEQ ID NO: 9515 - protein, 1200 aa, unidentified
  REGION 1..1200: note = Description of Unknown: Cas Enzyme sequence
MSKVNNKKVLGLDIGSNSVGFSLLNLGEQNGQIVFEELASNSIIFSEPNTAEDRRKARGARRLHSRKSTRNKNVRRIFVDYGIADSSFIDDPTKYIENFKLKSSDVYTLRENAVFDKRLNKDEFALATYSILTDRGYTNMFALVEEETETNKDKKKEDEKLNGLIQKNRDEYKANKHALPSMVLTSRRKELEEKYQNVAIRNKKGDYRNSLDRDMHKEEFKKLVQSQSTNKEIFSSIEICEAFISEVLEGKYNAFYQRPLKSFEGMVEFCSFYDEFNPKGKEKRMPLANVCNVELTLRQNIDNYEAVDKNGEVKHFTKDEKNEVVNFWLNTPDADKINNKNIYKNAGFKNITIHTKDDKELLVLNIQAYRAMLNVLNKYNIDFKDTQNEFYNDVLLELYYYKNYSSRVEHINKIVHTYNVSVDDSFVEDVAKLTHMDGFGRFSLKFANEVLELMHEKELIHSEALEKLGYNSKYLDMPSYDYLPPLEPSEADIAWLKENITYFDTRHLFYQPMMSPKVKRVIGVLRKLINELIKKYGKIDEIRIETARELNSKKETENITKNQTDYNKKNKEAEKFLKANDIKETHKNIERAKLFKEQECKCLYCDKNLTRDEAFDETMTEIEHFIPRSVIWINSQKNKILVHKKCNQNKDSQNPIAYLKSIGEWENFKGRIQLHPKNPKYKWLTDEDTINSAMAKENWQDSYLNDTRSATRSIAKYLNHYLYPNTNAHNKGGESHIMSVSGKAISELKYMWGIHTVMPKNEEDKKDRNTNYHHTLDAFTIALCSSSATQALHNHFKKNENKFKTKAVKDKLASNIPISSSGKNVVEHLKELVEKYETNSLYVCPYNKRKTNMKGFKDGNLKLYVTKDPKDENKEILAEMEKVAIDTSLLIKNVGGFPKPRNDDEVRKEIASIQERLNPEKQQNIIGAIEIYADELLNLRNKIDAIDKEIEKKKKTIKTGKQHKEVNEIIKVEMQPFQDESKSLSRELESLTCSFSVKNGKRQIVKSVKLHKVKISKTSADSILFSRRDDKSIERLSLDNFKQAIKTKEPFVVKENESTLCVELYAHPKQNQVVGLKYFSSISNPHIKTKINEKYKNIFDDKKPSLTLYKNDIIRVLNTKDFTEKYYIFNGGGNVSSTQTGASNKLTIKNINLNTFIKINKKGVKNQFLEDTVTPSKTKVIVKVKIDFFGNITKDKQNEK

SEQ ID NO: 9516 - protein, 1079 aa, unidentified
  REGION 1..1079: note = Description of Unknown: Cas Enzyme sequence
MADQVYHLGLDIGVASVGAAVISDDRIIDLFVRTFEKAETDKEGESLNKIRREARLNRRRIRRRAFRMTRTRRLFHRAGLIPSPKIEEIIIPNTSPWDLRAQALEQHLSPQAFAYALYHLIKHRGFQSNRKSEAQDEKMGQMLQSLQQNKALMQNKGYRTVGEMVAKDPTFTKAKRNKGGSYQHTLGREEIIQEVHTIFQAQRAFNNPLATPELETEVIQLLLARRPALSGNDLLKKVGKCTFEPNEYRAPKACFTVEKFIYLSKLNNLRIQYLGENRSLTDTERQQLLLTPFQTSKLTYKQLRKKLNLPDEATFSGLRYQAEKSPENQTFFEAKHYHTLRKAYEKAGLKSEWQRDAFNPEQLDTLAIGLTLYKTDEDIREFLQSKQIEEPIIEAVLPISFAEFIRLSLKALHQILPLMEAGCRYDEAISKVYGHHSQLNQNTLKGRHIPPLEDNAITNPVVRRAINQTRKLINAIVKKHGPPASVHIELARDLNKSFKERKQIEKRQKELAENREQDRARFKELFGTEPNGLDLLKLRLYREQNGQCAYTQQSIDLNRLTEPHYVEVDHALPYSRSFDNSLSNKVLVLKKANQDKGNRTPYEYLSETQWEQFEAWVRTTYQANRHKIQKLLTQNFDEEKAKTFRQRNLEDTRYAGRVVKNMIETHLALHPDSSAKRCVVVSGTLTSFLRGKWGLHKVRTDGDKHHALDAAVVAACTHSMVQRLAQYSKAQELKWAKQDFIDPETGEILDIDAFRQLEAHFPKPWPHFKKELEARLSDHPQEQLSQIPQLPYTPEEIEQIKPIRVSRMPTRRGLGAAHKETIRSAKYLDEQISTVKTPLTKIKLKDLPHIVGFEEDLEDPRNQALRQAIENRLKKFNNNPEKAFATPLYKPSKANGFNPEIAHLLGYEHHPAPEVRRLKLKTTQKSGLKVRQGIADNGDMIRIDLFTNGKHFFIIPLYVADSIKPQLPNKAAVSNKPESEWIEMDENYQFLYSFYPNDWIEVDLGKKGVKEGYYAGFDRSTTAINIWTHDRNQQIGKKGLIRSIGIKTAKSIKKYHIDILGNAYPVPLETRQPLPKAKS

SEQ ID NO: 9517 - protein, 1119 aa, unidentified
  REGION 1..1119: note = Description of Unknown: Cas Enzyme sequence
VKGLCMSKLILSLDLGITSCGFSVLEELQESYRLIDYGVIMRDNPFDGNTQSDRSLHKQGRVLLDKKLSRVKKIKKIFLEFGIAYEDTNYQNLWQLRAVDVFERKLRGSEFFALLRYLAKHRGYKSLKIEDLIAEIEAKEKIGNCESDEISTPDIHNFSETLAYLDALKCKHKDKTAAQIIYELESNKPNPTFRNHDDYRYMIRREDVAKELVMMVHSQQKFGFFASKEEAEDFLTQVQEIIIKQDAVTLNPDLINNCLIYKDEKCAPIFSFTFDLFNFHKLLNDLKIDGEKITQEQKAMLADDFYNRLQTGKNFSGYTVKEIKKILGIESEFSKINNISEYKILKGKKVANTLVKFNFLSKLSKYDKEILESVFKQEESFLDSLSTAIHRNVNPAALLEEFYLLFKRYDMQFSEDEIQNFALTLYKEKTKGVSAYSFKALHELLDYMKEGKSESDAKEILGVGKSEDYSIFAKGVKYLKPIDKTGTLQYEVDENRISNHVVKSLVSWANRLIIDLHDKYGAFDVIKLESTRELSTPEDVKSKIKSANDKNQKEWEDLKKRYEKAAQAKGINLDNSSSYVLKLKLWEQQKEMGIYSLKMLSLDDILSDTTEIEHIIPRACGGSNAEYNKAVDLKNENAKKGNRIPLDYLTGEKKEQYKSFVDELKKEYKINFKKFKNLMATSLDDAYKEVRDEVSLHATSYAEKLLGEILKRYYPFKETLKQNQRVMHISGRATSYLRRILSIDNKSRDTNFHHAEDAILIALMSRSYLQKISTNFEENYEITQEKAKENFKKIVPLIDGASPNEIFAHLRKSYMEDIEDNPFYTGLDRSLRTPTFWVSKKPIGTKAHNETIQSKKNLSYRVSVESLFEKVKPNYKMSVEEFVNKYDKEVYQKLQIVQDNPKDYTAVAFRQRRDEVVKLLQEAAFITTKDEQQELNKKLLEVMRKPVFDVNGNVIRRVKRVGEVASIEVRNGLAYTAPSLVSLRCGYIEGESKLSLKRIDIRAYVKNKTAAPNEMDIFNNDLVEVYLLKKRELFKRIVGIVKGFTESKGGRINIRNPKYPLLKEKQPKLYQSEISIGSSCGIKKYKTDASGKVLGFYYLGRVQHEDEELFSKVLAYRRI

SEQ ID NO: 9518 - protein, 1136 aa, unidentified
  REGION 1..1136: note = Description of Unknown: Cas Enzyme sequence
MSNKILSLDLGITSIGYSILEEMKNDRYSLLDYGISMFDKPTDKDGNSKKLLHSQSVSTTKLYDLRKERKQNLASLFEEFHLSTKALLLNQEKQNVYIQKWELRAKKAFEEKLEVGELFTIFYALAKHRGYKSLDSGDLLEELCVNLGIEREQSNNKKKDDDEKGKIKNALKTIENLRLDFPEKTVAQIIYETELQKENPTFRNHDNYNYMIRREYINDEIKKIIVFQKEFGFFSSNFDVEEFTSSIIATIDDQKDSTNDMSLFGFCEYYKDEEQKVAHQYSLLSDIYKMYESVSNINFNANPTIKITPEQIKLVADDFFTKVKKGKSIADIKYKDIRKILNLDDDFKIFNKDDSYSNKGKQQENRIIKFHFVNNLSKINNQFIVDIFEKENRYELLKEIFDVLAYEKAPHAIYEQLKDKIKDEKTIIDLIKYKSGNSLNISHYAMMKFIPYFEQGLNTDEIKEKLGLDRKEDYSSFKKGIKYLHINRFEEDDNLKINNHPVKYVVSATLRVIKHLHSIHGAFDEIRVESTRELSQNEQTKKDIEKANRVFEKELDAIVDDVEYQKIAEQYGKNLRKYARKILMYKEQEGRDIYSGEGIELKDIFTNIVDLDHIIPQSLGGLSVKHNFVLAHRDTNVQKSNQLPLNFVKEKQAFINRVEYLFEHHKINWKKKKNLLATTLEESFVDTFESKPLRATSYIEALTAQVLKRYYPFPNEKKESDGSAVRHIQGRATSNIRKLLGVKTKVRDTNIHHAIDAILIGFTNHSWLQKLSNTFRENMGVIDDEARSNIKKETPIIELIVNDEVEYLSPKELCEKIEESYNEFGEDSVFYRDVWGKVKVVNFWVSQKPMVSKIHKDTIYSKKRDSIFTVRENIINKFVLLKITSTTSSQKFMENFEKNILKKMYLFKTNPKDVICQIVQNRAKNIATLLDTFMEIDTENKEQISDAKGKLEQLMHKDLLDNNANIIRKIKFYQTNLTGFDVRGGLATKEKTFIGFRAWLEGENLQYERIDIANFDKIKKENDSSFKIYKNDVVFFVYADGSYRGGKIVSFLDYKGIASFSNSNYPALSEYQPKSFCKMGKDKHGNPKKSGAKQQTINASIGIIKLNLDITGNIRSYQVIGNVQSELLDFIKGIIK

SEQ ID NO: 9519 - protein, 1379 aa, unidentified
  REGION 1..1379: note = Description of Unknown: Cas Enzyme sequence
MKKILGLDLGTNSIGWAYVHEAETEKETSSIVKMGVRVVPLTVDESKNFTEGKRITTNAERRQKRMMRRNLDRYQLRRNQLIQLFVEEGWIDSPEDLAWEGSLPLHEPYRIRAKAVYEKVSLRDLARIFLMINKKRGYKSNRKTKTAEEDGEVLDDMQLALYLREKNMTPGQYAYELLLDGKRSIPKFYRSDLQEEFSRIWEFQQPFYSNKLTDELLEKLQGVTKQAAVGIWKKALGTETIKLTGKDKKIEAYRYRAEALKKKLPPDQLGLVLTNIIGEINGSSGYLGAISDRSKLLHVEKLTVGEFQYRQLQQSPHSRLKNQIFYRQDYLNEFDKIWDTQQKFYPKKLRPELRKRIRDRIIFYQRPLKSQKGLISFCTFESKVIEKRVGGKTKKVRIGSRVAPRSSPLFQEFKIWQRLHDVQITNIQTGERFSLSQEWKEKLFEELNTVEKWKAERVLKEIYGARESKNYVLNFKELQGNATQAAFYKIYQKMMEEDGRTVKLANAKTADKKKLLRKFFAEHGIDSEILEFDAEKDGKSFTQQKFYRLWHLLYSYESDNSRSGIDSLLQHLEENFGFPRHFGRMLANISLLDDYASLSTKALRKIYPYIKESSYTEACEQAGYRHALHLTKEENQRRELLDRLELLPKNSLRNPVVEKILNQMIHLVNGILEHPEMGRPDEIRIELARELKSSAKERERATREISKATKRHEEIRKKLQEEPFNIINPTRNDIIRYKLWEELSTFGYKTLYSGYYISRQELFSKNIDIEHIIPKAKLYDDSFSNKTLALNRVNKEKGDNTAMSYMETRGEDAVEQYKKRVRDLYQQGVISKAKYFKLLKTNEQLEEQTGFIARDIRETQYITKKAKELLEKLVRKVVPTTGKITDRLREDWGLINVLKEINLPKYRALGLTKVVENRHGQKKEIILNWTKRNDHRHHAMDALVVAFTTHNHINYLNQVHAKTQKTSQSYALKNLLTFKDRGKDKFKAPMPNLRAEAREQLEAILVSYKAKNKVTVRSVNKIKVGGGFKTQKIQVPRGQLHKETIYGSQLRYQTKEEKIGKNFTKEKIATVAKKQYRDLLMQRLEAFGENPVKAFTGKNALSKNPIYLPNGKPMPDRVKTVTLERQFTIRKEIGADLRVDKVIDQGIRKLLEQRLEAYGGKAKEAFANLEENPIWLDKERGIAVKRVKIRGVENAIPLHVACDHFGNSLFDEDGEFLATDYVQTGNNHHVAIYQSPDGKLHEQVVSFFEAVRRKLHDLPVVDRSYKKEQGWKFLFTLKQNEFFVFPSEKDGFNPSEMDLLDPSLAPVISPHLFRVQKIASRNYLFTHHLETESTTGDHLKNFKNLIGVKYMFVWNPDKLEHLVKVRLNHLGEVVALGEY

SEQ ID NO: 9520 - protein, 1015 aa, unidentified
  REGION 1..1015: note = Description of Unknown: Cas Enzyme sequence
MVNKTFSYQLGLDIGIASVGWALLDTTNQHIIDLGVRCFDKAETDKDGDPLNLNRRMARLPRRRLGHRRERLDKLIKLLVGEGLIPGKGIFTKPPKKGFPTPDLWRLRVSALDEALSPEAWARIIYHICKHRGFHWRSKAEEAVEDKAKETGRVKAGLNATHELMEKRHYRTAAEMVVSEFPDAYRNKQGEYRKALSRSLLAEEMAMLFDRQRQFGNPYATETLERAILGSGDKKSGILWEQKPALSGDALLAMLGHCTFEKDEYRAPKASFTAERHVLLTRINNMRVIENGETRGLRPGERRIAMDLPYKRKSPVSYKQLKDAWKKSGLIDDDFVFAGLRYPSPQDNKQKNPETAEKIAPLEGWHKIRKCLESDGLNEVWQQLADTALTGKPELLDGIAWALSVYKEDDEARNALAKLDLPGGDQTIEALLNIRFDNFGRLSLKALARILPYMEEGLRYDEVCREAGYHHALPDSNATGKQFRLPPFYVLENGKLSLNSEMDLPRNPVVMRALNQARKVVNAIMDRYGSPMAVHIEMARDLSRPFKERKQIEREQTQYRERNDEDRQRFSEHFGRLPKGKEFAKWQLYREQQGKCAYSLQALDLRRLLDDGYVEIDHALPYSRSYDDSKNNKMLCLTAENRNKGNKTPYEYLDGANDSERWRRFVAFVESNKAWRPAKKARLLRKHFGQEEAEDFRERNLNDTRYICRFFKNYVERYLLLHEESDAKRCIVVSGQLTSLLRARWGLLKRREVNDRHHALDAAVVAACTQGFIKRMADYSRRRELGQVREGFVDIETGEVVDPKMYARLEEEFPLPWAHFRQELLARVNEDNPHILREQMLSFGTYSKDDLESVRPLFVSRAPKRRNSGAAHKETIYGQPPHLKDQDAVVQRISVDKLKPSDLDKLVDPDRNKKLYAEIRRWVESKSTREKEAKNIEQAARKEKRDLTLAEKQQRDRLRALPRKPGKNGMPGPVVRNVKVIVTTQPIKSKWGNFPAKTNANASDALSPCFRQVDK

SEQ ID NO: 9521 - protein, 914 aa, unidentified
  REGION 1..914: note = Description of Unknown: Cas Enzyme sequence
MGQRILGLDIGIASVGWAVVDYNKDDSTQNKIVKSGVRIFTQAEHPKDGSSLAMPRRLARGARRTLKRKRQRMKGIKRLFMERMSLSKNDLFVGEVDETIYSKKGRMDVWQLRAEALQRELNHEEFARVLTHIAKRRGYKSNRKVDEKGDSEGKKVLGAIENNLALLEKYETIGQAIYETSKDKGIFRNRDGDYSHSVSREMLLNEVHTIFEKQKALNNTLATNELRDAYIEIAFSQRDFASVDGMVGICTFEKTEPRAAKRTYSAEEFVTLTKLINTKVVLEDGSERGLNKEELEKIILLCKQSEKPSYIKIKETIGLESTSTFKNIEDYETDKETGEFLKKKPTKFVSAFKGYHQLRLTVTKALSKTHWHNLSQDTKLLDEIGTIFSIHKSDEKIKEALDKLSFSMLTVEEAEKVKEALISSISFDQFIYLSLKALDKLLPYMREGKRYDEAVALVGYKKESGTQQKFLRALNKEEQNELTNPVVKRAIAQTRKVINALIREHGQFDKVHIELTREIKKSHKDRNEIKKGQEKYQKFKEEVVQDFVSLFGREPKGNELLKFRLWKEQGGYCAYSGFMGEKAYIRPEKLIADVKYAEIDHILPYSRSLDDGLNNKVLCLAKENQEKKNMTPFEYFESIGRDWYNYEVFVNSMLKSLKRVKRQRLLKKNFDENSENEFRERNIRDTAYMARYIKSFIEDNLELTSNATKKVITINGTLTNMLRHNWGVGNKSRDTHLHHAVDAIIIAFATDSEVQKLSTLSAKRDGFAYEKSEEKSKKFRFTPPMENLRDEVQKSIDEIFVSNAPRRKVTGAAHKETIRSKKLEKVKGTFEVNGGVAENGEVKRVDVFKKEGKYHFIFLYPADFEKEKLPNNTIKGIEVDESFEFVFSLFKDELIEVKPKNKEPFRGYLKFVEG

SEQ ID NO: 9522 - protein, 1407 aa, unidentified
  REGION 1..1407: note = Description of Unknown: Cas Enzyme sequence
MKKILGLDLGTTSIGWALVNEAENKNEKSEVIRTGVRVVPLTTDESTDFAKGKAATINADRTLKRGARRSLQRYKQRRENLIEVLEKNRLITQSTILVEEGINSTHSLWKLRANAAQKKIDLTDFAKVLLAINKKRGYKSNRKAKDDGDGVAIDGMEVAIKLYDENLTSGQYVLNLLNNDKKHIPDFYRSDLQDEFDKVWKFQQQFYSEILTDELKENLRDKNKGQTYKICEEPFELVGVKRITKGKEQKKENYQWRVDGLSKQLTLEELVVVLQEVNNNKNNSSGYLGAISDRSKDLHFNKETVGQYLYKQIQKNPHIPLKNQVFYRQDYLDEFEQIWETQAKFHNELTVELKNEIRDIAIFYQRRLKSQKGLISICELEGKEIELKDKDGKFVLNAKGEPKKKTIGPRAIPKSSPLFQEFKIWQVLNNLKFVEVSTKKVFLINDLDEDMELRKALFEEVNIKGKLTSKELVKNVFNKPKEWELQNYKEVEGNITSKVLYNAYKNIAEISGHDEINYAKMTASEIKEALAAIFETIGIAKEILDFDAELDGKNFEKQASYQLWHLLYSYEGDSSKTGNDKLYHHLKGKFGFDKEYAQAIINVSFKEDYGSLSAKAIKKMMPYLKEGHEYSEAAVLAGYNHSHSVTKEENEKRVLKGALELLPKNSLRNPVVEKILNQMVNVVNAAIKKYGKPDEIRIELARELKKSAKERADMTTNINSATKAHEEIRKKLREFYPFNTGVRITKNDLIKYKLYEELSSNGYKTLYTNTYIDKGDLFTKKYDIEHIIPKATLFDDSFSNKTLAVRDFNRVKSNKTGIDAIVEKYGENSDDYNRYVETIERLHNNGKGVITKAKYKKLLMKGEDIPDGFIERDLRNSQYIAKKAKQMLLEICRTVVPTTGMITDKLRQDWQLINVLKELNWDKYHQLGLTETEKTKDGKIIQKIKGWTKRNDHRHHAMDALTVAFTKHSHIQYFNYLNARKDENHKNHKNIKGIESAETILVGENGSKKRIIKPPIPLTEFRIEAKKHLENTLISFKAKNKVTTQNKNKIKGKEKPQKTLTPRGQLHKETVYGTSNYYETKEERVGTKFDTKKIKLVAKKSHREALLKRLAAFDNDPKKAFGGKNTLAKNPIWLGENHTESVPEKVKLVWQETQYTIRKEIAPDLKIEKVVDRGVQKILQKRLEDFGGKPKEAFSNLEGNPIWLNKEKGIQLKRVTITGVSNAEPLHYKKDLYGKEILGEGGKPIPTDFVSTGNNHHIAIYKDNKGKLQEKVVSFYEAVMVKNAGLPVIDKNYNAHLGWEFLFTIKQNEMFVFSNEETGFNPNEIDLLNEKNYHLISPNLFRVQKISTRNYMFTNHLETQATTSEDLKNKKQLIGYKYHFIQTPEKLNEIIKVRFNHLGQIVKVGEY

SEQ ID NO: 9523 - protein, 1048 aa, unidentified
  REGION 1..1048: note = Description of Unknown: Cas Enzyme sequence
MNIQQKIGKLCGHFECAEYITLGLDIGIASCGWALVDFEQGQILGAGTWGFEVPEVPKTRESKAVQRRVARGQRRRLRRRRQRMREIRKLLQKNGLLETAKAPADIKSQSKPLLDPWPLRAEGLDRLLTGEEFAAILIHIAKHRGYRSNSKSEKSTNAPSEDKKVLAGLAAMEEKSARYRTIGEMFALDEEFADKKRNRDGDYSHTVARKLHEDEIKLLFKRQREVGNQFADEPLEKAYSSLAFDQLPLQGSEKLLGKCPFEPDEYRASLQAYSFEKFRFLTKLINSRIDDGSRNGRSLTKEELAKAVADFGKSSAKITWKTLVRLIGLPKGASFIGVGDKAMGSDVARNSKGCAFGSYTLYKVIGESAWNSLVQTPQILDDIIHILTFLEEVGEIEQRLKKLLLEPVIHDAIMQGIDEGAFAGFSKAGHISTKAARNIIPGLLVGKTYDKACELTGYDHARENIADLHTLTNPVAKRATIETLKQVNALVRHFGFRPGRIHIELGRDVGKGPDERGRIDKGIQDRTTTKEKARKAFCELIGKQDCSNGELERYELWKEQKHECMYCYPRATIAPDDLCDGRNASQVDHILPRSESHDNSWHNKALCCTKCNQDKKRRTPYQWFGDNDARWDEFEFRVKAMHGEKLIKGFKIRNLLMKNFEERKQGFIERSLNDTRFAARVIQNELLNLFTDEEKDGTRRILARPGAITGTLRYIWGLNRLKYLSGENGKKERIEDERHHAVDAMVLAACSENTLQRLTRAMQTQNTGYGDPIRHIDFPPPWPGFLDQVRAARKTAPVARSENRRARGAGHQATTRQIRHEDGLRIVYERVSIASMTTAKLDQIKDPDRNRDVIDALHEWIAVDKPADNLPRRNNGHLIKKVTVRAEKNPKTERSGFAVGKGLVDNGEMVRLDVFEKGKKFYLVPIYTHQVADRQNWPEPPNGALPTKTTPEHKWLHIDDSFRFKFSLHPYSWVETINSKGEIKEGYYRGAGRSTASINLSEEVSRTKYINSIGCMTLRSFKKFQVDRLGQKTEIKSEKRTWHGVVCT

SEQ ID NO: 9524 - protein, 1036 aa, unidentified
  REGION 1..1036: note = Description of Unknown: Cas Enzyme sequence
MSKKNILGLDLGTNSIGWALLEANKGKPNKIIDLGSRIFIKAVEEKTPTPKNVKRRNSRLARRVTQRRARRKQRMLNYLVKLGLLPKELQGHAQPETILNSLGDPYQLRARGLDHPLSPHEMGRVLLHLVQRRGFLSNRKTLLGDMVDDPDVLEILAELENQVETASERAKEETAFKKEINELRSKIQAEGYRTLGEYLASLDHHDCKRNRSREAGHRRTDRQMYREELDLIWQQQRNSNNILTDDVKEQIEQIIFYQRPLKLRSDRIGKCSLEPNKNRARIARLECQRFRYLQDINHLKYLYPGSEEWISINQNDREKLIQLLEKKANPTFKTDVRNTLGLDKKTEFNLDNENKKLKGNITACEIRAVYPEWDELNADKQQLLVEDLLTIQKKSVLKKRLVTHWDIDKLTAVNLCMVEFEPGHSNHSARAINKLLPYLSQGQRYDEARVSAGYGYEVKEINISARLGTPPEISNPIVQKALHELRRLINAIIAEYGKPDVIRIEMARDLEMNTKKYKAFTKQQNANTKANDEAIDRYREIGAKNSHLQLGKYPNKADKIRYRLWRDQGERCAYSNKQITLATLFSAEIDIDHILPYSESLDDSYMNKVVCYAGENRYKAQRTPIDAFSGDNDKWEQIVQSINRWHKGLRSKRDRFYQTAADVQQRDFINSQLNDTRYISKVAQGYLAQLGADITTCKGATTSWVRHQWGLNNLIGKENQKDRSDHRHHAIDAAAIACIDRAFYSALVRQAKDLECRQPAINIKDLVFDPPWDGFRDELSTRLNEIIISHTPQKKLSGALHEETGVGYIDGVGTVYRTNLDSNFKVAQLKKIVDDEVKKVVTAHVESYDNNPRLAFSEGIKVLHKDGITPIKRVRIVQSKTNLKKLEKSKFGVTNNDGKIFKWLAYGNLHHVEIIKNIKNDKYSGRFVTTMEAHQRAKGIGMAKQPITQFDHGSDNEVVMALHINDLVSINREGKRYFYRVQILDSPNKRIKLRLHTASTLNNDHETLPDRESTVPSLMKANIQLHKINAIGKLVL

SEQ ID NO: 9525 - protein, 1059 aa, unidentified
  REGION 1..1059: note = Description of Unknown: Cas Enzyme sequence
MMRLGLDIGTASIGWWLYRLENDRPAAVIDGGVRIFPDGRVAKTGQSLAVARREARAARRRRDRYLRRRVVLMERLAAAGLMPADPDEAGKLELLDPYAIRAQGLDEKLPLTHLGRALFHLNQRRGFKSNRKTDSGDNEAGKIKTGTARLEQAMMAAGARTYGEFLHKRRAKADKPHRTPSVRTRLTIAKRDSAEKEEAGYDFYPDRKHLEEEFHKLWQAQAKFHPELTDDLRDILFETIFYQRPLKAPKVGLCMLTDERRLPKAHPLTQRRVLYETVNALRITSDGRAKQPLSIEDRDRIIHALDNKKHTKNLSGMKLALKTLGKDIGLQSNQRFTLETAARDSIACDPVRASLSHPDRFGPRWSTFDIGEQWRIIQRLRDESDPDAMVNWLKEEYGLDDDHAAATAAAPLPEGYSRLGESATRNILEHLQSEVIPYSEAVARCGYHHSDERTGEVIEALPYYGEILQRHVIPGSGDAKDDDITRYGRITNPTVHIGLNQLRRLVNRIIEIHGKPDQIVVELARELKQSDQQKTEIQRIIKKNTEAAIRRSGKLAELGQRDTGANRMILRLWEDLGDDCLKRFCPYTGERISAEMLFDGSCDVDHILPYSRTMDDSFANRTLCLREANREKRNRTPYETWGHDKDRWAIIQANLKNLPANKRWRFAPDAMERFEGENNFTDRSLNDTAYLSRISKAYLETLYDGADGKSHVWVVPGRLTEMLRRVWDLNSLLPDHNRATKAKNRHDHRHHAIDAAVIAATDRGLIKQMADIARQKENEGANDKARATEPPWTGFREDIAEKVNSIIVSHRADHGLGPQRKAGQTSGQLHNDTAYGLTGEKKGKVPLVVTRKPLDSLTPAMIGKIRDPDLQNALLEATQDKTGKDFDKAVQDFARREGPYQGIRRVRIIEPIDVLEIKDKAGKPYKGYKPDSNHCYEVWRVPDGSYFAQVITTFDAHQPGPLPRPHPAAKRIMRLHKNDMVRLDNSKFGPVIATVEKFDANGGISLVPHNESNADQRYRKDKEDVYIRMNAASLMKNGARRIFVDEAGRIRDPGPHDKR

SEQ ID NO: 9526 - protein, 1435 aa, unidentified
  REGION 1..1435: note = Description of Unknown: Cas Enzyme sequence
MAKVLGLDLGTNSIGWAVVDDEKGNCPIIDKGVIIFNEGVKNEKGTEKSRAAERTGYRSARRLKFRRKIRKYQTLLVLAENKMCPLTVDEVKEWRKSNFKKYPDKPEFLDWLRTDNFGDKDNQEHKAIRRKQNNNPYFFRDKYSRNKYDWQNNQEAAYELGRAFYHIAQRRGFLSNRLDQSDKGAIEKLQPDLDNIINESETLPELSKQLNDYLIQLDIDRPSKDLNEGEKKIKTLFNAFKKIIKGKTDTKATKKELLERLFKKENLGVVKQGISDLDEAIKKTNSKTLGQHFWKLYQQNRGLKENKIRSKYTGREEHYLKEFEIICNVQGLKGIDNSKNDPSLRYSGIVKDLYKAIFYQRPLKSQKGLVGKCSLEPTKTRCPVSRPEFEEYRMYSFINNIKIKTPKDENMRPLTEDERKQIITKFQRKSKPTFEFKDLKKVLGENNEYNYKDNATVSGCPTIAALISIFGNDWKNIRYAYQTADKNGNIVQRTLNYIDIWHVWNTYTSIEKLEEFALSKLGLDKTTAEKFAKVNLKQDYAALSLNAINKILPYLKNGLLYSHAVFMANMGKVVDPERWKNENDRKLIQSEIERIIKCHQEETKIQFAINSLLKHCKDNGFQYSEEAVDGYLKDLREAFESEFGRKTWNKRADKEEVLSQAFQEFVKCLRAGTFLTIKRIDEKVIDFLSDNDLLRNPNKLYHPSDIEKFKPVTIEDKEGNKHTGLGSPITGSIKNPMAMRTLHQLRKLINTLIIEGIIDERTKINIELARELNDANKRKAIEKWQKDREELHQIYEEKIKELYKKETGNEIEPTDVDIEKFRFALEQREDNTIISKDDILKYTLWSEQNHICLYTGKTIGLTDFLGANPSFDIEHTVPRSASLDNSQMNKTLCENKFNREVKKDRIPFELDNHADILKRIEHWKKRYEELTDDIERLVRATRGGNMEKEQKDRIIQKRHYLRMERDYWKGKHDRFVLEEVKQGFKNSQFVDTGIITKYATAYMNSVFDKVYAIKGEMVDQYRKAWGLHKKVLDENGKEKLDVHGNPVYEKKDRSNHIHHCIDAVTIACIDKYRYDKLAHAWGLEDKGDYQKAREELEKMKPWKTFTEDVGKLKDEILIVHHTKDTLPKQSKKKLRKRGKIQYNKHGKPIYQQGDTVRGRLHQDTFYGTIKVNGEPKHVIRKELAKLKESDVKNIVDDNIRAIVEQAKKDKKITFNNNGAKLSSEQIWQNEDRQIPLKKVRIFTPAMKNPLPDFKKHAKPFLSKHEYKQEFKVANDENYCMAIYEGADKKGNLKRASELVNNIDAGEYYKLSSKRRRTDNSLVPNPHLQTGYPLKYILKKGMMVLLYDNSADEIWGLTNTEQLERLFEITQLDTEGAGIKLLYHQEAREKKEITKAMGLKNGMKGGKNIGKHKEYPWIKVGANSFDAIVEGYDFKI

SEQ ID NO: 9527 - protein, 1089 aa, unidentified
  REGION 1..1089: note = Description of Unknown: Cas Enzyme sequence
MSFDIPWRLGIDLGTNSLGWAAVELDGNDFAPIGMMGSSVRIFSDGRNPKSKESNAATRRVPKSARKNRDRTKRRSARLMRELVEFSLMPEDMAERKKLEGGKGIPLNDTDPWILRCRALDEKLTSYQLGRVIFHLHQRRGFKSNRTTDRADNEKGKVHDATRRTQEKLEEQGARTLGELFGKPRLEAVRYNNNAPKGQRKPQPLARVRKSGEGAKWQYDYYPTRALIMDEFDKLWTAQKKYHTEIMTDAAHARLRDTIKWQHPLKPQKVGKCTLIPEEERAAKALPSSQRARIFQEVNALRITPPGEASYALTIEQRDMVTDRLLTPTSKLGKVTFISIKKLLGLSTYDSFNTESEKRKDLQGDETAAKLMQKDRWGAAWLDLDLKTQDEIVNKLLDVEEEEELISWLCDSHGLSEDQAFRVADCPLPAGYGSLSKLALGRILPPLQADVSVYSEAVKQAGFGSHSQRGTGEVFDKVLPYYGIILERSVAFGSGEPGDTDEKRYGKIANPTVHVALNQIRAVVNDLLQRFGPPEQIVVELARDLPMSAEGKKELEKKQKANQDANDARRKTLMQRGIPDNYENRMRLRLFEDLEALGERCPFSGDKISLSNLFSDKIEIEHILPFSRTFDDSYSNKTLSTRKANRDKKNQTPYEAFSHSPPGYDWAEISKCAAELPKNKSWRFGPDAMERFEEFEGGFLARQLTDTQYISRLAKAYLEAIYGGQGYKGAKNHVRVIPGRLTADLRHIWGLNSVLRGHNEPESEAQKKNRHDHRHHAIDAIVVACTDPAMLQQAARMAKQNEQAFSDKLMTGIDTPWPGFRSDVEQSVRNIIVSHKPDHGIQAAMHNDTAYGIPKGIEGEPDKKGVRTVVTRKPLDSDSFKKPGDLEKIRDSLIKNHLLEETYGLEDKDFRQALLQAGSSLSPPVYKVRIEEKLRVIPFKDKSGKIYKAYKGDGNYCYDIWLNEKGKWTGEVISTYQAYQLARKNQHWWKKLVGQDGQRLLMRLRKNDYLQIEHKGEQMTVTVNQVTPGTVIMSEHMEANVDARTRAKYDGDDPLKYIFKSPSSLQKSQAKYVTVSPSGVINIHDGPMG

SEQ ID NO: 9528 - protein, 1093 aa, unidentified
  REGION 1..1093: note = Description of Unknown: Cas Enzyme sequence
SLDLGITSLGYAVLEEVSEHSYRVLDNAVMMRDAPYDIKSGESTQSQRRVHKSMRALNEKRKRRIREVARIFERYGLLGFQECMQVQKENSIVDKWRLRAEDALGRALSPEELFAILAHMAKHRGYKSIATDDLLYELEIDLGLIDPVAEESEGKADEKRQVYAALNRVDELKRVYPSETIAQVIHRAVKEGKLSSYRNHDNYEKMIRREDIEREIEMIIVKQCELGGIALSEEECKNLIEDLHETITDQVMPENDPELFGKCSCYPEEIAAPKYSYLFDLYRLYKILSDMRINNVALNEEQKESIIAYVQEKIAKGKNLKQLTYKDIRKILTLSSDQKIYGKEDEIVIKGKKSQRDLIKFFFISEIGKFSTLMAEVIKQDDHLDIFADMAEALQLHKTPQESFRAVDTLLKERKIAVVPDELIALIKGFKAGTQNVSHKFIIDALPHLIEGKREDEVKEILGIQTSEDYGSYPKSIKHLHLGKENLFEKHIRPDINNHAVKSLASWALRRIADLSWRYGTFDEIVIESARDALPKSIQDDIDKAMREREKELDKIIDAYKQEFPSIDRKMARKIKMLESQKFLDIYTGKTINISDLFEGRADIEHIVPRSLGGLSAQYNLVIAHRDANMQKSNRLPMDWLGEDQEYINRVEMLFAEHKIHWKKRKNLLAKGYDEIYNEVQDSKALRSTSYLEALVAQNLKMFYPFPNKERRKTGVAVRNVPGKTTSKARRILGIKSKSRDTNWHHAEDAMILATLSRGWQNRLHRMLRENYGKSEAELQVLWQKFTPHLEGMAIAEYIKESFERFMSLDEDSLWYRDMFGGRRSVSYWVNRKPLSASSHKETVYSAKHAVPTLRKSLLAAFGGLNVITDRHKLTDESFMEKYDKEIRSKLWLHHIGNDNDPVMRAIDARAKAIAEVLKAYETQDTKKDKELDETFKESLNVILSAPIEVDGKIVRKTRFVYSKLKGMDRKVRKGFVETDKNMVGIFVAKGSKKLEIVRMDVNNLNDLQKEKKGMRVYLNEMIYLFNEKKVLHYGCLRSYLENAQGAKMIALFNSRFPANPKSQPKMFSTGSKIKQVSVGSATGIIKVHLDIN

SEQ ID NO: 9529 - protein, 1029 aa, unidentified
  REGION 1..1029: note = Description of Unknown: Cas Enzyme sequence
LKGDKMGQRILGLDIGIASVGWAVVDYNKDDSTQNKIVKSGVRTFIKAETPDRGESLALKRRESRSARRTLKRKRQRMKKIKYLFIEYLGLSNQDLFTYSKKEDNTIYMQHNIEKSNRIDVWELRHKAINEKLNTIELARVLTHIAKRRGYFSNSKVQEDKQDDKGKVKEGIKNLTALVGTSLTTIGSAIYETTKQGEAKRNHPIKKIKKDGTVDIDKDTGKPKMTAGYQFVATRALLEKEIKIIFEIQRELGNKSATKEFEKKYLELFNKQLPIQFDEKMIGKCTFEPKEDKAPRFAYSSEEFIVLDSITKTSLNHNQSGETRTLLSFVTIDEIFHELQQGAKTGLKYSVLRKKFKIDDAFRFNAINYVFDPEKKKKLPNYKKIIEMEDWLTVEQKEKIERRLNTKLNKNAKLKTFLDLRYFLNLDKSREFVSVKYNQNPEDVVFIKLQGYHEIKSAFKGYENDFKTLFNNRVEFNQVANILARKKDDRLRKEELLKLSSSLEQDVIEKLLPLSFSGFIKYSFKALEKIRPLLLEGKKNYEALTIIYNHHSCGLKSTEKKKSLRALNDSEKHQITSPVARRSIAQTRKVINAIFRDKSTFGEIDRIHIELAREIKNSKKQRDKISQGQDAYKNEKEIAKKELLEHINNMSDFSMSENDKGFEKLLLKYRLYRQQDGKDVYQWRGNDYKGIEIDRLIRDENYCENDHVLPECRSFDSSLNNLVLTLTHNNQNKGDFTPFEWIANEDEDCDAWKRFKTYIDSFNNIKSAKRKKLLRKNYPKRRGDAISTDDIENEEGSFIARNLIDTQTTAKFLKNFIEQNLLIGEDDSKQKVFTRNGMLTSTLRYQWGINAKNRENNYHHAEDAIIIAFATQGEVQKLSTLSASNVKYNLKKIPLKKEPMDNFRSEVQKSIDEIFVSNAPRRKVTGAAHKETIRSKKLEKVKGTFEVNGGVAENGEVKRVDVFLKEDKYHFIFLYPADFEKEKLPNNTIKGIEVDESFEFVFSLFKDELIEVKPKNKEPFRGYLKFVEG

SEQ ID NO: 9530 - protein, 927 aa, unidentified
  REGION 1..927: note = Description of Unknown: Cas Enzyme sequence
MPSNSKSMIAPIALDVGAKNTGVFRAIYECGTSIEDISSRYGEVLTIDSGNYTLLMRDRTAKRHMRRGFDRRKMAKRLLLLVLRDCFDFPVDAHRQALGFLMNRRGFTRLEESFDAEALKNFPQTAWDELPDQVKGALKSREELYTNFNALINDDDGTLRKIDRCLLQDTIQPVKKHQDVLTHVKKLIAALEKRAKGQALAEGAKDKNKLSQTPAWIVTELSKCGVTTQQQDETSKGRVDLLAWINSLEETSTLSEQLAAAREKLETETATVWKNVKPGSFDLEKNSEKFTDESKQVEAHLNNLVFAIHKAAEELSSGSRHRRKYFEEIKADINNAAQHPHKYMQAFAAAIRASSVLDEDKLYRLIAHISNLELKPLRAYFNDKAHKQGDQWQAKKLAKIVSRWFLKQWRVNADKDDQKTVDRYCQLKAKWTAHQNKDDMIAFWLDTDPQLTIPPYQSQTNRRPPDCQSLILNGHYMDNHYPNWRNWLEQLDATGAPDLSGLVSSKGNPLLDNDERELRQLQYILDRAQSGDPCRLNLIWSQYHRYQKGGDAAEQAEKRLDEHLAASALPDALKNELKLTAFGKQGKFGHFLNKYYQCRRKARDGRYFLHPQNRGHLKPGKLNDQTKLLTLCHHRPRQKRHQMHMDFAAIVGLTPAELEQQLNKQTVAELLRSIRTFPTNAENAAKAQKEHRGELKLKLQQGKNKKLDGLRRRVEALAVKLAKCLWPELDEDAQKKKSERFNSLFSFAQIYNIVFKDRTGFSNTCPLCSSDNAGRMVEDGTGKALASRLPALSMRLIDGAVKRLLDYKAQEISRRHWDVIAAQLHAGHDVCVPLILEQNHFKFEPSLKQLKGKRDKAGKPIEAEDFDTKVARIKQASGDICPYSGNSLSDSGELDHIIPRASAYGTLNDEANLIYVSQAANRSRSNQ

SEQ ID NO: 9531 - protein, 913 aa, unidentified
  REGION 1..913: note = Description of Unknown: Cas Enzyme sequence
MNIQHKIEKLCSHFECAENITLGLDIGIASCGWALIDFEQEQILGAGTWGFEAPEVPKTRESKAVQRRVARGQRRRLRRRKQRMREIRQLLHKNGLLETAKAPTDIEGQPKPLLDPWPLRAEGLDRLLTGEEFATTLIHIAKHRGYRSNSKSEKSANAPSEDKKVLAGLAAMEEKSARYRTIGEMFALDKEFAEKKRNRDGDYSHTIARKLHEDEIKLLFKRQRELGSRFANVQMEEAYSSLAFDQLPLQGSEKLLGKCPFEPNEYRASLQAYSFEKFRYLSKLVNSRIDDGSRNGRPPSKEELAKAIAGFGKSSPKITWKTLVRLIGLPKDTTFTGVGEKAMGSDVTRNSKGCAFGSNTLYKVIGESPWNSLVQTPRILDDIIHILTFLEEVGEIEQRLETLQLESVILDAIMQGVRDGAFAGFSKAGHISTKAARNIIPGLLEGKTYDKACELTGYDHARENIADLDTLTNPVAKRATIETLKQVNALVRHFGFRPGRIHIELGRDVGKGPDERGRIDKGIKDRTSAKGKARKAFCELVRKQDCSNGELERYELWKEQKHECMYCYPRATIAPDDLCDGRNASQVDHILPRSESHDNSWHNKALCCTNCNQDKKRRTPYQWFGDNDAHWDEFEFRVKAMHGEKLIKGFKIRNLLMKNFEERKQGFIERNLNDTRFAARVIHDELQNLFTDEEKHGTRRIFARPGTITGTLRYIWGLNRLKYLSGDDGKNERIEDERHHAVDAMVLAACSESTLQRLTKAMQKREEAFGDPIRHIDFPPPWPGFPDQVRAARETAPVARSENRRARGPGHQATTRQIRHEDGLRIIYERVAVDSMTSAKLDLIKDPDRNRDVLDTLHEWIAVGKPTDNPPRRNNGHLIKKVTVRAEKNPKTERSGFEVNKGLVDNGEMVRLD

SEQ ID NO: 9532 - protein, 1015 aa, unidentified
  REGION 1..1015: note = Description of Unknown: Cas Enzyme sequence
MGKVCQRILGLDIGIASVGWAVIHYCHSDNTQNEIIKSGVRIFTQAEHPKDGSSLALPRRLARGARRTLKRKRQRMKAIKRLLMTHFNLNEKDVFVAEVDETIYSEKGRIDVWELRADAIQRELDNNEFARVLTHIAKRRGYKSNRKVDEQGDSEGKKVLGAIEHNKALLEKYETIGQAIYETSKDKGVFRNRDGDYSHSVSREMLLDEVETIFKKQQQLSNPLATDVLKEKYIEIAFFQRDFASVDGMVGKCTFEKDEPRAAKRTYSAEEFVTLTKLINTKIVLKDGKERGLTQDELEKIISLCKQSEKPSYIKIRETIELESSASFKNVEEYEIDKETGEVLKKTTKFTSAFKGYHALRKVVEKSFSKTHWHNMSQDTKLLDEIATIFSIHKSDEKIKDSLDALDFTIFDEKETQKLKNALISSISFDQFIYLSLKALNNILPEMRKGKTYDKAVDAVGYKKVLGTQQKFLRALTKEEQNELTNPVVKRAIAQTRKVINALIREYGQFDTVHIELTREIKKSHKDRNEIKKGQEKYQKFKEEVVKDFTQLFNREPKGNELLKFRLWKEQDGYCAYSGFMGERAYIKPEQLIADVKYAEIDHILPYSRSLDDSLNNKVLCLAKENQEKKNMTPFEYFQTIDRDWNSYEVHIKAMKGIHRAKRNRLLKKNFDENSEKEFRERNINDTAYMARYIKNFIEENLELTGEGKKKVTTINGTLTNMLRHNWGVGKKSRDTHLHHAVDAIIIAFATQSEVQKLSTQSAKIDGFGFKKSEEKSKRFKFILPMENFREEVQKSIDEIFVSNAPRRKVTGSAHEKTIYSPKTFMANRKKEKPSVLPLSGREKAVVLNDGKKLAKNESMPRVDIFQHKSNGKYYVVPLYVSDFVKKELPNKAIVQGKTKEGIPKEWLEMNENYEFKFSLFKDELVEIQTKKTASKEAKNIVGYFVSADSGTAKLILKSHDNSENNGFTRNSSNSCEIGLGIQNVVYVKKYQVDTLGNKNEIRQESRVMTVKKKK

SEQ ID NO: 9533 - protein, 1135 aa, unidentified
  REGION 1..1135: note = Description of Unknown: Cas Enzyme sequence
VNIYSGGRIMGRKILSLDLGITSLGFNVAKEVGENSYKVIDNGVLMRDAPFDVKSGESSQKQRSIHKGQRDLNEKRKRRIKEVARIFDKFGILNFEACMRVQKENRFIDKWRMRAEDALNHKLSEEELFAIMAHMAAHRGYKSIATDDLLYELELKLGLIEETITEEEAKDEKRQVYAALNRVEQLKKRYPSETIAQVIHRAVGEGALSSYRNHGNYEKMIRREDIEDEIAAIIQTQFEFGLFENEEKRDKLIDAFHEAITDQTMPENDPNLFGRCSFYPDEIAAPKYSYLYDMYRLYKTLGDLSIDNYQVTQEDREVIVAYVEEKIKSGKNIKEISYKEVRKILSLANECKIFGREDEQIIKGKKSQRAFVKFFFLPKIKDFPQTMKSIILHPDSLKLFARLAEIIQQEKTPKPSFERIKSLLTSHGIEVHTKEVLALIKGYTSGTLSMSHRYIQNALPHFAEGKIEVEIKELLGINTSEDYSRFPKSLKHLHLGKDNVFEQHQNSINNHAVKSLASWTLKRIADLSWQYGVFDEIIIESARDALPDTIKKEIEKGMREKEKELDKIVEAYKKEFPSVDKKMARKIRLLQSQKFMDLYTGKSINISDLFEGRADIEHIVPRSLGGLSADYNLIIAHRDANMQKSNRLPMDWLSGESEYVNRVEGLFAEHLINWKKRKNLLATSMDEIFNEVKDSKALRATSYLEALVAENLKMFYPFKEKKARKFGHEVRNVPGKTTSKSRQILGIKSKSRDTNWHHAEDALILATLSRGWQNRLHRMLKENYGKSEAELQEIWQKFTPHLEGMSIAEYIKEAYERFMSLGEESLWYKDMFGGRRSISYWVNHKPLSASSHKDTIYSGHHEVPTLRKNIIAAFEALNFISNRNKLNSDSFTKLYEKEIRSKLWYVHNGNTNDPVMRAIDERATQIAELIDSYILQDPQHDKEIDEQYKRELGDFVGKPIEVDGKIVRKVRFVYEKLNAVQIDRGLVETDKNMLGIFIEKGEKKLKISRMDVNNAYELEQNKNGMRVYLNEMVYFYNEKKSLHYGCLRSYVEGRSNIALFNPRFPANPKVQPSIFSTGSQIKQVSIGSATGIIKAQLNFNGQIKSYQKFGYIPKEFEEVFKKECGYGSMEDDTDH

SEQ ID NO: 9534 - protein, 1142 aa, unidentified
  REGION 1..1142: note = Description of Unknown: Cas Enzyme sequence
MGKKVLSLDLGITSFGYAIVEEYDNNSYKCLDNGVIMRDAPYDNDGNSQQSLRSKYASQRTLLTKKKHRVKALAKLFEKFGLLSYEQCMKVQIENKIQNKWKIRAEDALMRNLSYEELFAILAHMAKHRGYKSISTKDLLYELELELGLIEENFDNENNKKDEQRAVYAAIYKLKKLKEFYKVDTISQVLHKAIQDGQICSYRNHNDYEKMIRREDIEHEIETIIKKQCEIGSFNFQEEECLSFIEAIYEIITDQNMPENDESLFGKCSYYPDEKAAPRYSFLYDMYRLYKILADLKIDSYDITYEDREKIIDFVIQKVKNGKNIKQVYYKDIRKILGLSKEQKIFGKDDYVIIKAKTVQRTLVKFFFLSQISNFSNLMTNILSSSDALTIFTKVAETIRLHKTPKPALESLQDLLLSFGIEVEDKEVLSLIKGKSAGTLAISHRFILESLPHFKDGKSESDIKEILGINTSEDYSKYPKSLKYLHLGKNNLFEQSQNKINNHAVKSLASWSLQNIADLSWRYGVFDEIILESARDILPKTIKDAIEKSMKDREKELDKIIDTYKKEFPSINRKMAKKIKLLKSQKFLDLYSGDIINISDLFDGRADIEHIVPTSLGGLTTDYNNIIAYPNTNAQKSNRLPMDWLQEDRDYINRVEMLFNEHKINWKKRKNLLATSLDEIYTEAKDTKSLRATSYLESLVSEVLKMYYPFPDKEHQKNGISVRNIPGKTTSKTRMFLGIKSKSRETNFHHAEDALILSTLSRSWQNKMHRMLKDNYGKTEQELKILWEQYTPHIDGISIVDYIKEAYEMFMSKGENSIWYKDMFGSQRSISYWVNKKPLSASSHKDSIYSAKHKDPKNPNRILPTIRKSILEAFESLDILKNRHTFDKKTFMQKYDKDIRQKLWLYHLGNIKDPVYRAIEERADIIGNLIESYIYKDPKNDKTVDELYQDEIRTLLKTTIIAGGKPVYKTLFVDNFSAIEIKRGKNNKVLVRTDDNFLAVVFEKGEKDKLSINKVDVNSLYNLKKQNVMAVYLNEVVYLFNKKKIIHYGALRSFQIKGSGAKYIALFNPRFPSNPKAQPKNFSSGKSIKSVSIGSVTGVIKVQLDISGKMTSYQKFGSIPKELEEQFRKESGYGSLENDTNY

SEQ ID NO: 9535 - protein, 1126 aa, unidentified
  REGION 1..1126: note = Description of Unknown: Cas Enzyme sequence
MSIATKNGHIMKKILSLDLGTTSIGYSVITEKETQKYSLLDYGVSMFDKPIDADGNSKKLLHSQALSAKKLHKLRKKRKQNLAKLFEYYRLDSAVKLLKQEYENRYIHKWQLRAKKVFEEKLSIEEIFTIFYHIAKHRGYKSLDSGDLLEELCIELGIELEQKKEKKDDEKGKIKQALNTIESLRQEYPQKTVAQIIYEVELQKEQPVFRNHDNYNYMIRREYINDEIATIIRKQKEFGNFENIDSEAFISDLIAVIDDQKESTNDMSLFGKCEYYSDEYVAHQYSLLSDIFKMYQAVANITFNKEKIKITKEQIKLIAEDFLNKIKKGKSIKELKYKDVRKVLNLDDSVKIFNKEDSYQRAGKKVEHTITKFHFVDTLSKIDKSFIEDIFNADNSYALMREIFDVVHKEKSPKRIYEQLKDKVSSEAVIIDLIRYKKGSSLNISSYAMVKFLPYFEEGMTLDTIKEKLKLNRKEDYSEYKKGIKYLHISTYEKDDSLEINNHPVKYVVSAALRVVKHLHAKYGAFEEIKVESTRELSLNDKVKKEIEKANKEREKEIEKIISNKEYQKIAQEYGKNIHKYARKILMWKAQERFDIYSGKSIGLDDIFSSRVDIDHIVPQSLGGLYVQHNLVLVHRDENLQKSNQLPMNYIEDKEAYVNRVEHLFSEHKINWKKRKNLLATNLDEIYKDTFESKDLRATSYIEALTANILKRYYPFTDEKKLADGSAVRHIQGRATSNIRKVLDVKTKNRESNIHHSVDALLIGVTNHSWLQKLSNTFRENFGKIDDEARENIKKSLPYIDGAEVKDIVKEIEEKYYSFGEDSIFYKDIWGKVKTVNFWVSKKPMSSKIHKDTIYAKKGDGIFTVRESIIAKFINLKTTPTTSPEDFMKKFQKEILEKMYLYKTNPNDVICKIIKQRAEEIKELLWSFEFLDVKNKEEMQEAKVKLESLVHRELFDNNSNVIRKVKFYQTNLTGFEVRGGLATKEKTFIGFRAIKKGEKLEYERIDVSNFEKMKKSNDGSFKVYKNDIVFFIFDEENYKGGKIVSFLDDKKMAAFSNPKYPANTQSQPESFLTMFQGKPKSHKQVSIGKAKGIIKLKVDILGNIESYQVLGDARSKILDDIKKYSE

SEQ ID NO: 9536 - protein, 1142 aa, unidentified
  REGION 1..1142: note = Description of Unknown: Cas Enzyme sequence
MGRKILSLDLGITSLGCTVLEEERENSYRVLENTVIMRDAPFDNSGDSSQKQRSTYKSQRSLNEKSKKRVNALARLFDEFDLLSFDNCKQIQKENKYIDKWCMRAEDALNRKLSSEELFAIMAHMAKHRGYKSIATDDLLYELELELGLIEAIDEEDAQKDEKRQVYAALNRVEHLKKEYPSETIAQVIHRSVNEGKLSAYRNHDNYEKMIRREDIEDEIETIIETQQEFGLFDDDSKAEKFIEQLHEVITDQVMPENDPDLFGKCSFYRDEIAAPKYSYLYDMYRLYKTLGDLSIDNYEVTQDDREAVVSYVQEKIKSGKNIDKITYKEIHKILSLKDEHKIFGKEDVQNIKGKKSQRVFVKFFFLSKTKEFAQTMQAVTSHPESLHIFAELAEIIQQEKTPKPSFERIKTLLEDHNIEATPKEILSLIKGYTAGTLSMSHRYIIDALPHFAEGKREDKVKELLGISTSEDYSGFPKSLKHLHLGKENLFEQYKKPPINNHAIKSLASWALRRIADLSWCYGIFDEIIIESARDALPESIKKEIEKGMKAKEKEIDKIIESYKKEFPSIDRKMARKIRLLESQKFMDLYTGDIINISDLFEERADIEHIVPRSLGGLSADYNLIIAHRDSNMRKSNRLPMDWLGGNSEYMNRVESLFTEYLINWKKRKNLLATSMDEVFNEVKDSKALRATSYLEALVAENLKMFYPFKEEKARRFGHEVRNVPGKTTSKARQILGIKSKSRDTNWHHAEDALILAILSRGWQNRLHRMLKDNYGKSDAELQEVWQKFTPHLEGMSATEYIKESYERFMSLGEESLWYRDMFGGCRSVSYWVNRKPLSASSHKDTIYSSKHRDPNDPDKVMPTVRKSILGVFGGLDILKKRHKWNKEEFLKVYDKEIRQKLWLYRLGNINDPVYRAIDERANAIGDLIETYIYKDPQHDKAVDEVYQDEIRLLLQTPITAAEKPVYKTAFVDDTFSPIEIQRGKGNKVLVRTDDNFLAVMFEKGEKEKLHISKVDVNSLHRLKQENAMIVYLNEVIYLFNKKKIIHYGALRSFSINNQGGKYLKLFNPRYPSNPKAQPKMFTTGSSIKDVSIGSTTGVIKVQLDINGKMKSYQKFGLIPKDLEEEFLKESGYGIVEDNTDH

SEQ ID NO: 9537 - protein, 1219 aa, unidentified
  REGION 1..1219: note = Description of Unknown: Cas Enzyme sequence
MSKLSIAIDMGAKNNGVLLVTTDNNDIKEKKTFNVIVGKDINFFKKSRRENRHRVRNYARRKSAKRLLWDILDKSNFDNSQIEQINGLLNNRGYTFLSTSSEFEELQDETVEFISEFLSEIKELKTKEDFETKLSEFELEELKSFLNDITIKLNEKITKKRDIVTSDLRILRDFFNDILNEIKTGSKPRKKYLQEIKEEIEELDFIEDKNSFYNLIGNISNLQLRILRKFFDNTKRKKDDYKLLKDYFNFFHWNYNEAEKEQKKKLFKEIEKYNSLEEFLKNCDPLLTIPPYEDMNNRGTYKCNSLLINPKYITDSLKKSIDILWSQKEFEVLHLDNINYPQKLQRILDISYKMIDKQIHPREVFRKDKGDIGFYQKLLKENFKEFSSFAKEYYILEQKAINGIFEDGLLIKCDKNTPSKNNFKHILLKPLYEYDFTKEEVEKFYEKIKNIKGLQSHLKRVSEVAKDYQNSFYHYIEACYENDKCLNDKRIKDIVKNIDSDLKAFQNIFDELNIKTYLNKINKIDKDNLKRVINIFKQTYEILFKDINGFSKTCKICTIENNHRSSGDEAIAKRLLSDVAKPIDGMLDFMLDKIAFEIVKQIDNTEDEVEIILEQNRFNFEDNLALVKGKKPKKREAKDILNLNICPYSGENIIDTNGEYDHILPQSKELFNSKANLIYCSSEGNRKKSNNRYYLENLNIKHLKEIFKTDSLDEIKNIIQDGINKIDIDKFTNFENLSLKEQIALRYALFCDENSNEFKKAKEIIKKDKLKTITNGTQKRLARLIYQKLSAKFNKKFDCNVKVIDNLLISATRKDLSYDKTTGEINELWKEQIQDSHSHCIDAMVAFYLANSSIKGSYHQKRDNLASIEPDFEFSDIYIQKQNSSEITIKTKQWFDTTNPKYNIASKRLFDQNDIGVGYLQLKEIETTNKKGKIEYSYKKGIVKDSFVNSDFTKKNFDYFIQNNILQKIKVNRNKTTEILYQVNKNQLYEILFDKKEEVLSNISHYKKLTKELQYTYTKVDPFDFVDKFLEPKTSDDKKAVIKIINKSLPALDDITFNNLMAWFSRNNKLDKSGAKLGYYKSWEIFTKTLIDNKDKLFKENEKEDKKTKNKYMVIAIDKEKALEECKKTIFKQEIPKKRKVKKAYTLYTASKNDTQYIHRRKDNNGKYIYQTRIANGHNKLKGYKKAFSDDGRYFFRNSKNIIPLTIDNYKKAFGETND

SEQ ID NO: 9538 - protein, 1274 aa, unidentified
  REGION 1..1274: note = Description of Unknown: Cas Enzyme sequence
MLKLSIAVDMGAKNNGIFIAKTSGDNIEEKKAFNIVVDKDINFSKKSRRENRHRVRNYKRRKLAKRLLWDILDKSNFDNNQIEQINGLLNNRGYTFLSTASEFEELQDETVEFINEYLKELKEKRTKEDFEAFLSEFELDNLKDFIDKTTQNLDREYKKKKSEFYKEFQTKHSIIKKDLKTIKEFLNDILKEIQTGSKPRKKYLQEIKEEIEKLDFIEDKKSFYNLVGNVSNLQLRILRKFFDNTKRKKDKFELLKDYFNFFHWNYNDKEKKQKNELFSELRKYDNLEEFFKNCDPLLTIPPYEDMNNRGTYKCNSLLINPEYITESLKKSIDILWSQKEFEVLHSDNLKYPQKLQRILDISYKMIDKQIHPREVFKKDKGNIRFYQKLLKENLKEFSGFAKEYYILEQKAINGIFENGLLLKCDKNTPSKNNFKHILLKPLYEYDFTKEEAEEFYEKIKNTKGLQRHLKRVSEVAKDYQNSFYRYIEACYENSKCLDDKRVKDIVKNIDNDLKSFKHLFNELNIKTYLNKIEKIDKDNLKRVINIFKQTYEILFKDINGFSKTCKTCTIENNYRSSGDEAIAKRLLSDVAKPIDGMLDFMLDKIAFEIIEQIDSIEDKVEIILEQNRFNFEDNLVSIKGKKPKKREAKDILNLNICPYSGENITETNGEYDHILPQSKELFNSKANLIYCSSEGNRKKSNNRYYLENLNIKHLKEIFKTDSLDEIKNIIQDGIKKIDIDKFTNFENLSLKEQIALRYALFCDENSNEFKKAKEIIKKDKLKTITNGTQKRLARLIYQKLSAKFDKKFDCSVKVIDNLLISATRKDLSYDKTTGEINELWKDKNQNSHSHCIDAMVAFYLANSSIKGSYHQKRDNLASIESDFEFDNIYIKDSNIINLIKKQTFINAKDISSYKMFQDTIYSENYHHIDKNHKDINTLIKYSLLYQNKNNKKYFINSYEELQDNIIYKIDVYKTSKLLFKLFSDKNKQALNELKFLDKLRYNTTRSDIAKIFFDEKQTKLLEFEKIKNIPPNSIKTFKAVYNILKQNDIFDKLDGKKLLNKDRLHKLLEKTFKLQKRKRGKKRHIFSLAILGQNAKYRIKRGNAIQVLGGENIATKNYIIDGNIKPIPFFSKNTIPLKVADLIDCLLVDKNTPSIYEVDINIDDLKEYLLKLTYIVTEAKRVTIQATFNKKIFDFDGINFYDGAKDEKFAFFIKEFIDNKDLILSKYIGSIRDGIKAKAAILDNNNDNITLSFKSATTKDKKEIILKNLKATND

SEQ ID NO: 9539 - protein, 1125 aa, unidentified
  REGION 1..1125: note = Description of Unknown: Cas Enzyme sequence
MGAKNNGVLLVTTDNNDIKEKKTFNVIVGKDINFSKKSKRDNKHRKRNNTRHDEARRLLLEIIDINDIIIKNKNNQWNKNQIIGLLKNRGFDRFEGAFEKLHKLTQKLLENHTKLLNQDIENISNSEKLINFVNSFGIDKKKQLENKLSFFIDEIENIYTNLKIYKNKNNILADIEAIRDENFFKFSTNSKEYFKNLLNKNHISFKTKKGELKKQLINNELDLSKINFDLEVEKINKLDFYDKFIEEFETIEIDFKINKNDKENDISLLGTLKYTLESIKSGAKPRVMYLQEIEQLINKFDFLQNIDKKELLNIVGNISNLQLRVLRKYFNGKNDNKFDEKKFAIVLYRYFLSRHYKKESEKNRKEKLFKVLKKYIQLKKDKSILKKDRKHYNHYSDDGVYKAKDFLKNCSPEFTIPPFEDMNNRGTYKCNSLLINPNVISNNLKEAIKILEKNEKFKKLSLENIKEYNKKLQRILDISKRVISEDYYPRYIFSKENTNKEFYKNLLKEYFNEFDKFATQYYEAEQKAINGIVQSDIFIKCNKNTPAKNNIKHILINNIWNTNYNKKDEIDSLKKAIENQKIKGKKLTTILENISKTAKKYQNSFFKDINEAYYIKNQNNKKYKKEVPNDLIYILDLVNDILDIFKEILKEQKSCFINNHFDILKEKTTKKGMVLYPSLKRFINSLRQTYDILFVDINGHNKTCKNCTDENNIRSNEDEPIAKRLLSDVAKPINGKLDMLLDRVAWKIVSQIYDVNNINKIEILLEQNKFNFEENLKSIDIRKKSPEAEKLEYDICPYTGEKFTNGEYDHIISQSSSRNKNKQIYNSEANLILCSRTGNENKGDDEYTFDNLKIEHLKIVFGKDDKEEIKQEIRDIWENSQSLKIENYTNFKNLSFKEKLAFKYALFMVGEDVYNKAKSLLETEQKTITNGTQKRLARLIFEKIKQKFKKEINCNVKVIDNKLVSATRLDLAQYYLKYDKITGEIIDDKNITKQTYQDDFSHIVDAMVVYYLANNLDINDFSKLLENTDKEKSKIKVKTKQWYETENFKYNIASKRLFDQNDIGVGYLQLKEIETTNKKGKIEYSYKKGIVKDSFVNSNFTKKNFDYFIQNNILQKIKVNRNKTT

SEQ ID NO: 9540 - protein, 1006 aa, unidentified
  REGION 1..1006: note = Description of Unknown: Cas Enzyme sequence
MAMRRPYLVLGLDPGIASCGFCLLDLTNHKILLMGVRLFSVPKNRSGVSLAAERRAARSTRRNNHRTKSRLKRCLSILKAAGLVPEDADRGWLQARKKDKPVIKLRAVGLVRILSDRELAQALYSLCEHRGYIPHGEGKEGAADDADGKKVLSAIKKNMEDMDKGGYRTVGEMLYTQGRSRNRGGNYDRCVYNSQIQEEVSSIFAAQRSFGNPKATAELEQEYMECLTSEKSSSGHDRRSYEAVGSCVYFPELKRAAKADISSELCRAYERFGHLVIVHKDGTEQTLTSEQISRYISALFTPSAIQKKVQRITCATIRKDLDISGASVFKGVSHEQEKKEVFDPKAWRCLSKCLAGDHGELLERMWQDRSLGDAVCEALTYSSTEESLEGQLETLDLSEDECRALKAVPFNSKIFKGYGTRSIKALSLLVGAFEDPDVRTLADAEKATGLDMKRAEDRMPRSTKLPPYSVYDPTCKNPVVLRAMGQMRKIVNAIIKEHGVPDEIHIELSRDLKMSKREKDAVAKRQRTNEAANKKRATLAAGILGCEPSEVSHLVIRKLALREEQSDKDIYTGAAIDLQRLVEDDHYCEIGHILPYSRTGMGGWNNEVLVLAASNQKKRERTPYEWMQQDAGKAGVPAWDEYSSRVTATIDNPRKRRNLLCKDTGDEAMNGFLLRDLNDTRYMSVAVKNYLEDCLLFPEDGRKLHVTAVSGGATASLRRVWGLNSNGSDDEKTNSNTMRNSIDAAVIAACSVKTVQAVAKTRSLGRETFRHMRRSRLADTQPWETFADDVIVKCKTVIPTRMAEHGVTGCALNEFVYRIDGFNEKGYAILSRQVDRATRKRGIQVAGNYMPFGESSAKLVGQIAFIRLWHDPDFGKDGRWYVEPVYYNDIPALGNGVYQPKYILSKHPRMEWLPVPEAALSGTPLTLFPGDIIVAGNHIARFKKLDIACQGLGMLNILNEQLAVKNFPTINRWKNDMNIFILQEDCLGKCFNSLDIDSGSSTFTLR

SEQ ID NO: 9541 - protein, 1480 aa, unidentified
  REGION 1..1480: note = Description of Unknown: Cas Enzyme sequence
MRTILGLDLGTNSIGWALIDDENKKIIRAGCRIIPMDGQAMSNYETGNLQSSASVRTSFRGTRRLYQRAELRRERLLRVLNIMGFLPEHFKNQIDFIDHPGQFKNHSEPLLPYRKNKEGRNEFIFMDSFHEMLADFKVYHPELLANGKKIPYDWTIYFLRHKALSHPISRQELAWIILNFNTKRGYYQLRGNDETETKEGEEYKVLKVTKVEDTGADKKRNNMHWFEITYEGDIKQRRLSVAPPKSVGDTAELIVTTKTKKDGSLSVSLREPKEGDWTLMKKRTESIINHSGQTVGDYIYTTLLKQPDLKIRGNVVRTIERKYYKDELIKILETQKEFIPELQSHSLMEKCVNELYHQNEAHRNAISKDSFTRFLVDDIIFYQRPLKSKKGEIADCPFEKYRYKDGEGNIIEKGIKCTSKSDPLFQEFRLWQFIQNLKIFAREKEVDGKLRTDVDVTRDFIKGREDIVALFEWLIQQKEITQDKLLKSPIFDLGKKASQYRWNYVEGRAYPCCPTHAEILFRLSKVKGATTLSHDQEMNLWHILYSVDDAIDLEKALGHYAEKNRLDICSFKEAFKDMEPFDDDYAAYSQKAIKKLLPLMRCGKYWDGDNIDSHTRQRIDNIIDGVVDDNISDRVREKAVALRNLEDFQYLPLWMASYIVYNRHSETSDTSIWRTPEDIDNYLSTEFKQHSLRNPVVESVIGEAIRVVRDIWKTYGEISEVHIEMGRDLKQTKDQRAKTNERVLRNQNTNIRIKRMLSEFVKPQYHVENVRPQSPSQAEILKIYEDGILNSGLDVPDDIETISRNLGNLSKEVSGSDIMRYRLWLEQGYQSPYTGQPIPLSKLFTTAYEIEHVIPQSRFFDDSISNKVICESEVNKAKGKMLGYEFIRQQGGAIIDGNGGKHHKILDARQYEDFVKQHYSNNRGKLKKLLMDEIPDDFIQRQLNDSRYIARKALEIFSHLVREEDEQEAISKNVVSTNGSITTRLKKDWGMNDVWNDIVGPRFERMNRITKSEAFGSWVNKDGKRYFQTDIPLEYSRNFSKKRIDHRHHAMDAIVIACTTKDHVNYLNNSSALSSKEDMRYDLQHKLCDKIKTDDKGNYVWRFRKPWKTFTQDAHRTLDCIIASFKQNLRVINKMTNYYWKYIDGKKQLVRQTKGDGWAVRKSLHKATVSGAVRLQRKKMVRLKDALGDISTIADKDVRKAIKDVVKLYHGNIDNKTLLKYFKDRHYKAGNKDVSKVEVYYLPEKADMAATRVPVDAGFDQKAINSVTDSGIRTILTRHLQNYRDLSGKDHPELAFSPEGLDRMNENIQELNGGKLHKPIVKVRKFEPLGMKFNVGEYGTKQEKYVETDKGTNLFFAVYTDEDGSRSYDSIPFNIVVERMKNGLNPAESILPDGRKLLFTLSPYDSVVLQHDGEWNNQLFRFVSSTGNRAFFVPVNVSSPIADKLEYGKSNKIELTDDRLSIKQYCIKVRVDRLGNIINP

SEQ ID NO: 9542 - protein, 998 aa, unidentified
  REGION 1..998: note = Description of Unknown: Cas Enzyme sequence
MKKILGLDLGTNSIGWAVVNEAQNENEKSSIVKLGVRVNPLTVDELTNFEKGKSITTNADRTLKRSMRRNLQRYKLRRKNLIEILKDNAFITDDSILSEHGNKTTFETYRLRAKAATDEISLHEFARVLLQINKKRGYKSSRKAKSTEDGQLIDGMEVAKRLYNENLTPGQLSLQILNDEKKYLPDFYRSDLQNEFEKVWNFQKQFYPNILTECLKNELNGKNKSQTWAICSKPFNISGIKRQTKGHEQKIENYQWRAKALFQQLNLEELAIVLQEINGQINNASGYLGSISDRSKELYFNRQTVGQYQLSQLDKNPNYSLKNQVFYRQDYLDEFETIWETQTKFHKELTPELKKYIRDVVIFYQRPLKSQKGLISFCEFESYQKEINVDGKRKNKTIGYRVCPKSSPLFQEFKIWQRLNDIQVSNHQGKRSLYQEEKKVLFNELNYKEKLSKAEALKLLFDKPKEYDLNFKVLDGNTTQAELFKAYQTIIERSGHGTFDFSKMPAKKSLHITFEFFNGFGYNTDILKFDSSLEGHALERQPMYQLWHLLYSFEGDNSNLGNEKLIEKLTKSFGFEKEYATILAGIVFQSDYSSLSAKAIRKILPYLKDGNDYSTACEYAGYRHSKESLTKDEIDKKVLKNKLDLLPRNSLRNPVVEKILNQMINVVNGIVDEYGRPDEIRIELARELKKSAKERDEMAKAINETTKLHEEYVKELKGAPFFLTHVSRNDIIRYKLYLELKDNGYKTLYSGTYIPKEKLFSKEFDIEHIIPQAKLFDDSFSNKTLEVRQINLEKSNATAYDFVVEKYGNSYAEEYRNRINKLREAKVISQTKCEKLLMKETDIPSGFINRDLRDSQYIAKKAREILEELVKFVVPTTGAITDRLREDWQLIDTMQELNWNKYDQLGLTEIIEGRDGQKIRRIKDWTKRNDHRHHAMDALTIAFTKRSYIQYLNNLNARVQKGVEEYIDLDMVELSSLSKEERSSAIYGIEKKQLYRDM

SEQ ID NO: 9543 - protein, 1355 aa, unidentified
  REGION 1..1355: note = Description of Unknown: Cas Enzyme sequence
MSRENQRKKSKKFSEYYLGLDIGTDSIGWCVTDPQYNVLKFNGKAMWGIRLFDEAEPAAGRRAIRCSRRRLHRQKQRISLLEELLSNEVAKVDPVFFMRLRESKFYIEDKNEVVRQKYALFADENFTDVDYYKEFPTIHHLKWALMNHKEKFDIRLYYLAISHMMKHRGHFLFSGSVNEATSFETVYDSLKEYTENELGFTLECEEPEILQKLLLDKSISKIDKKKQLAGLFRKLPNPISETMKKEALNALSGSTVKLETLFGDETLKDQEIVKFSFADGIDEEKEEQLNNVLGERFEYFAKLKAVYDWATLTNILSGCSSISEAQVQSYEKHKKDLRDLKYAVKKYLPESYYEIFSADDKKDNYASYVRHAAAKKGTVAPKRITEQKDFCDYIRKKFEKVDANDKVVWRIKNETANYTFMPKQRTKSNSAIPNQVHEMELKKILEHMGEDYPELAEQQADGFSVCEKIHKMFRFRIPYYVGPLNDYHKDKGGNSWIVRKESGKVLPWNFEDKVDVKASAGAFMARLTNKCTYILGEDVLPRNSLLYSRYMVLNELNNVRIDGSRLPVDLKQRIYEEVFKKRSGKYSLKKMKEWLMKENIIGPDALLSGVDGDFQATLKSYQDFHKIIGNRVDTEPVMVEDIIKNILVFGEDKKMLRELISERYSDRLSDSEIQLISKLTYGGWGRFSKELLNGITDVNHETGELLTIIQAMWEGQENFMELMSSRHGYMREIQKINGETSGKTGNISYELVQESYASPAVKRGIWQTLLIVKELQKVTKNNPARIFVEVARSREEDPKKKASRKAKLLETYKAIKDDEKDWIPEIESRDEREFQSKKLYLYYMQMGRDMYSGQPIDLGELFTNSYDIDHIYPQSKTKDDSILNNLVLVRSEENRDKGDEYPVPDKFRQTELWRHLLDKGFITKEKYSRLIRRTPLSDEELASFIGRQLVETRQSTKVVAQILEQTLPDTKIIYSKANAVSQFRQEKGFIKSRAVNDYHHAKDAYLNIVVGNVYYTKFTDNPVRYIREEVRKSKGKEQYSLNHMFDFDVARNGKTAWKRGSEGTIATVKKQMGKNNILFTRYATEKRGGFYDQMLLRKGSGQLRPIKTEDRRYDTEKYGGYNKPSINYFMLVESDDKKGRKRTLEGVPVYLSGVSEEELIEFCRDELNLKNPDIRLREIRINALLKLDGYPMHISGKSGNSILMKNGVQLCLSSEMEGIIHHIEKVVEKIKENKNYQLDEHDKLTDTKLVEIYDCLFAKATAGIFAQRPASQVKTMKNGREKFIAASLMEKCVIINEILHLFQCNASSSNLKLIGGVGRAGVFMVSNKISSRTEAKLIAQSVTGLFEQVIDLKTV

SEQ ID NO: 9544 - protein, 1494 aa, unidentified
  REGION 1..1494: note = Description of Unknown: Cas Enzyme sequence
MGDKKKFYLGLDIGTDSVGWAVTDEHYHIVRKQGKHLWGSRLFSEAQKAEGRRAHRIARRRYVRRRQRILWLQEIFAKEMAKVDPNFFERLNNAAFVFEDKPKEVQDDYDNLKGRPLLFPWPQKDVDVTFSSDAAYHGKYPTIYHLRKDMMDHPHKKYDIRLIYLVMAHMIKYRGNFLQEGEIKEGGTDIRRLTDLLLRLENAVKDYSFDEEDDENTNDVGFSYSDTKKVEQWLLDMQNPNLRLGDLEDATMELLQIDKTHKKPINIVRLFNLIAGGNAKMKDIFAFDEEEAGDSELPDTPIQFDNEDFVDSIPQLGDAYAEVLMAAKDIYDFRVLVRTLQGENRLSNAMVKRYELHQQQLKTLKKLFRDYDAAHGTKCFAEFFEIASAKGKEPSKNYLNYVGVYKSKGNPIQHYPHSTKIDELYSALKKSAPIANDPENPIVKDILTSIDSRNYLLLQNSKDNGVLPYQLNLNEMRTILFNQSKYYAFLGEQAPEYNNPKRQDYRLVSLLEFKIPYYVGPLIVSRGENDPKGKNHWVVRKSDGKITPWNFHDVVDENASEEGFINNLKNNCTYLMNEPTLPKNSLRYTEFVALNQMNGWRIFCHGSKRPLTVDERRDLFNKVFLSKHKVTVARIQSELCLLLKAKPEDIVLCTDKKDSLDNADITLSLKPWVLMMDPRGFGPNLSSSKEDIDKAEEIIYCLTIFEDKKTAGRHIDEMPGLSDGQKKYFKSLSFKDWGRLSKKLIDGLTIPVPDQETGEVFDKTILDLMWDTGKTFMEIYRTKEPDPVTGLDTTGFQKQVEELTDAEAGTPYDLIEEQYASPSVKRSLRQSYRIIEELKKILHIDSFDAIFVEVTRSASTDQKGKRTKSRKDQILDFYKQVKKMNKSMSDEIDKLEKELGQKEDRLNDRRLFLYFAQLGHSVYTGKPIDIERLEKDYDIDHIIPRAKYEDDSFGNTVLVEQALNRNKSDVYPIEPTILTEGGRKWIQYLEQWSAANKIKFMSAEKARRLLRVEPLSEDELVGFVNRQIVATSQATTGIANLLRKTDPNSRVVFSKADRVSDFRKEFDMMKCREVNDFHHAQDAYLNIVVGDVYEQVFTKSFSVKQLREKKQELGKDYSIRTDVKTFFRRNQYRFGTKHGVCVWQAKEYASDGVENPSSVGTIDIVRKYMAHNDPLVTHMQATLVGKQGFFNKIAIIGKDEVGKTAAMPLKMSGPFAKEGFEHVYGGYNDLTAPYFMLVRSLDKKGKEIYTLEAIPTVYLKNASSKLSDEEKNKWAENYLEKKGGLNQPSILLPKLLPGTVFERVTENGCIRFTITGRSNSSFLIANSVGLLLPKHWYDYFKMMSKYLGLELSPEKKRALNFDKDAGKEEIVISEGRVISKTENIKLFNYFGDDVLNRKPYVDMPAAESIKRDVRGKRGKNLFAALTIKQQCDVLEQLLIYFSSNPSSCDLSLIGGSKREGYKTMNKQLSPSKDRIIAQSVTGFYETQRWPKGNN

SEQ ID NO: 9545 - protein, 1204 aa, unidentified
  REGION 1..1204: note = Description of Unknown: Cas Enzyme sequence
MMEKILGIDTGTNSLGWAIVEKYDDGYKLLDKGINIFQEGVKIEKGIESSKAADRTSHRSARVRYYRIKVRKIRLLKVLSDNHLCPPVTSDELSQWRLKNIYPNNELLRQWEQTDDKADKNPYTYRHRCLTEELDLTDLTQRYILGRALYHINQRRGFLSNRKSEDGDEEGKVKSGINDLTKDMENMGCHYLGEYFYRLYQKGEKIRCHYTARNEHYLSEFKAICQMQHLDKDLVKKLEDVIFFQRPLKSQKGLVGHCVFEPKKPKCPISHPLFEEFRMLSFLNNIKIQTPKDESLRPLTEEERKKILPKFYRKSKPTFDFEDIAKELSGKNKYAYYKTPKGKPYLFNYHMDTSVSGCPVTADLRDIFGDDWMNTICEVYDRAQGKTRLQVINDIWHVLFDFSEDEHLMSFGKERLQLSDEEAKKFANIKVSSEYASLSLKAICKILPYLRKGMIYSLSVFFANLGEVLPSEIWQDEANRHEIEEGILNAISDKDNNASDDRTTERCIKDYLIANWGVAEEECNKLYHPSMIESYPHVPDGVNKLGSPRIDSIRNPMAMRSLFRLRHVVNSLLAEGKIDRDTTIHIEFARELNDANKRQALATFVKENENDRKKAYAEIVKLYKEETGLTIVPTDTDILKYQLWEEQNHRCIYTDEQIGIVDFLGPNPKYDIEHTIPRSVGGDSTKMNLTLCNSKFNREVKQTLLPSQLSNHEEILLRVEGWKERYEALDKRIRKMRTSSSMSKEQKDKRIQERNLLKLRRDYWYGKYQRFVMTDVPEGFSRRQGTDISVISKYGRLYLKSFFNRVFIVKGLATSDFRKIWGIQDIYTKKERVNHVHHCIDAIVIACIGPGEYSKLAEYYHDEENHEWYGSSKGHIVAPWKTFQEDMNKIQKEIIVSHNNADNIGKSGKHRKLIKGKKVWVDGDSARASLHNDTYYGAIERDGKVKYVVRKALDDNFKDKDVDNIVDGTVRDIVKQAVQHYGSLKEAIAQGIWMNKEKGIAIRKVRCFTPSVTRPLNIRHQRDVSSKEYKQQFHVMNDTNYAMAIYVGQDKKGKERRAFEIVSNLDACNFFKESNDKKVVDNHLFPLSKNDFPLTYVLKKGTMVLLYENTPEEIAECSKEELVKRLYKVTGISSMVVDGRDYGTIVLLHSQEARPSGEVKAKNGAYKQNEEFRSSIKLLHTQFKALIAGRDFEINDLGEIKWLK

SEQ ID NO: 9546 - protein, 1006 aa, unidentified
  REGION 1..1006: note = Description of Unknown: Cas Enzyme sequence
MEANRPYLVLGLDPGIASCGFCLLDMTDHKILEMGSHLFDAPQEAKTKTSLAVTRRNARSARRNTLRTATRMKHCLALLKGADLVPEDADKAWLQSKKGDKPILKLRANGLDRKLADREFAQVLYSLCGRRGYIPHGEGRLGETDDGEGRKVLSAIKANEATMKRGNYRTVGEMLYANDGKSRNRGGDYSLCVYNSQIKDEVRALFAAQRALGNSKASEGFEKDYIDCLEWEKKTVDHDKRVYELVGACPYFPEEKRAADADISSELCRAYERLGHIAIVHEDGSEQNLTPNQIDGYLDVLFSPLPLKGNKECKVTYGTIRKDLDLSGKDVFKGVAQDGEKGEPFSPKSWRCLRTALYENHEDLLVRMLKDRELGDDICEALTFASTEASLGERLGLLDLTDDEQAALCSSVPFTGKLFKGYGNRSLKALGILLGAFEEPEIRTLTDAERATGLLDLRLADRGLRDNLLPSYSKYDPTCRNPVVLRSMGRMRRIVNAIIRIHGVPDEIHIELGRDLKMSNKEKATVSKNQRANEAANKKWAAKAANILGCSPEEVPGRIVRKLAMREEQGDKDAYTGAAIDLEHLVRDDRYCEIDHILPYSRTCDDSRANKVLVLSKSNQDKRERTPYEWMTSGEPGAPDWDEYRNRVMATVKYARKRANLLNTDLGPNVQAQFLARNLNDDRYMSVAVKNYLEDCLLFPNDGRKKHVTAVAGGATGNLRWVWGLNFGQGNTKDRDDDRHHAVDAAIIAACSESTVKKVAEASSKGRETFKHLRKSRLSDTQPWPTFAEEVAARRAFVVPTRMVNHGVTGRVFEDTLYHLEGFTNDKGKYPLVRAGEKTAKKGNVRIGPDGSVKLIDGMAFLRLWLDPNARPNGKVKGKWYAEPVYYADIPAIKAGTYVPRACTIHVARNAWEPVPESAMQREPVVLFAGDVVEVDGHIGRYSGFNIFGGRITILNLLTKAEVGDWPSLGSWGRDTQVRVLQEDCLGHCYDDIVINPDNSTFRQRE

SEQ ID NO: 9547 - protein, 1096 aa, unidentified
  REGION 1..1096: note = Description of Unknown: Cas Enzyme sequence
MAYGIGLDIGIGSVGWAILALDHEENPWGIIDLGSRIFDVAEQPKTGASLALPRRQARSMRRRLRRHRHRLERIKNLMISFKLVTQEQLDSLYEGQLEDVYELRVRALDEKLSNEELARVLLHLAKRRGFKSNRKADAASEEAGALKKAISLNQAAMDENHYRTVGEMFYKDPRYADYKRNRGGNYLNTVDRSMVEDEARKIIESQRQLGNPVMSPEFEEGYLSILLSQRQFDEGPGGKSHYGGNQIFNMVGSCTFEKGEKRAPKTCYSFEYFNLLQKVNHFRLTSSKDNRPLKDTERKQLIELAKTTADLRYSKIRKELNIDESYRFADIFYKADPDVEEKKAKFNYLPFYHQIKAKLKSAGENVAEYSVPKLDKIGEILTFYKGDDARRKNLKEAGIPDTAIEALLLLTGARKFGHLSLKALRKITPFLEQGMVYNEACDAAGYDFRAHEAEKSMYLPANSDKAPELDDITNPVVRRAIGQTIKVVNAIIRKQGASPLYVNVELAREMAKDFQERKQIEKTYKENRDNNDAIMAKIKEEDHQLNPSGLDLLKLKLWEEQDGKSPYSQKSIDRARLFETGYVDIDHIVPYSISFDDSYKNKVLVFSSENRDKGNQLPYPYILKKYGQEAADAFKVWVNNSVRDFRKKQRLLKEYLTEDEMKGFKERNLQDTKYLSRFLYNFIRDHLEFAPSETGKKKRVLAVNGLITSYLRKRWGIRKIRANGDKHHAMDAVVIGCTTDKMIRDLTLYSEERENEYDAGYRESLLVDGKTGEVLKKFPMPWEGFRQELEARCSENPAGRLAGLPFYMNKDWNSIKPIFVSRMPRRKVTGAAHKDTVRSARHIQEGITVSKVPLETLKLDKNGEIDGYYNPDSDRLLYEALKARLEKFDGKGKEAFSKPFYKPKADGSQGPLVKKVKIQTKATLAVPVNQKTGVADNDSMVRVDVFYVEGEGYYLVPIYVADTLKKELPNRAIVQAKPYENWKIMLDKDFQFSLYPNDVIYVESKRKINFKVTKDKSEDSTLKPQFDCLSVLGYYEGTDIATGAINVITHDDSYLKHGQGVKTLVSLKKYQVDILGNVHPVKKEKRQAFSIKQKAK

SEQ ID NO: 9548 - protein, 1314 aa, unidentified
  REGION 1..1314: note = Description of Unknown: Cas Enzyme sequence
SRKYRIWATLKLLISHDCCPLSEENLEKWSRYDKTKGLKREYPVDVPLFEQWVRLDFDGDGIADYSSPYQLRAELMERQLDWNSQSDRYKFGRAMYHIAQRRGFKSSKGETLKDAGDNEDLSTIEVELAMKKSEEKKSKGIAKYMKENHLATVGCAFAKLEKEGIRVRNHPEYQAVQSQYREEIDKICRHQHIDTLSPELYHGLISTKKSEGTIFYRRPLRSQKGNIGKCTLEPTKRRCPVSHPDYEEYRALTFINNIKYRISPAEEWKSLTDIERKQIFNTLFCRSKGTFKFADIRTWIEKSHNEVHLDYNNRTINYRDYATVAGCPIISRLRKILGEEWRTKKILTERERTNNKSGEIHIVTYDYEDLWHLCFSYDDYEDLYEFVQTHLGFNETQAKEMTRMWSSMQDGYTTLSLKAIRNILPFLREGMIYNNAVSLAKIPDIIGKEIWLANKENILSAIENLNNSNAHIRLVYNLTNTVISNYKALSFEEQFAYRNTNYTLTNADRKDILHCCIEYFGEKRWEQMSGTEQTALQDEIASLYQQFFASSKREYYTLPKISDAIKEYLSKLFSDINKDVWNKLYHHSQISLFPQSQPKLGTPDIGFIKNPVVLRALHVLRKTINALLTEGLVNEDTRIVVETAREMHDANWRRAIERYQKEREKENAAISEIIREFRPNYTDSDIEKGRLLFEQNIIAETNRDAKQKAERFALDLQKYKLWKEQNFQCLYTGKHISVSDLFDDGIVDIEHTIPRSLSFDDSLSNKTVCFAHFNRYTKNNQIPSELSNYNEILRRINPWEDKLEHIMSQIELWKGKARTAPTIERKNECLQQKHQWELERDYWRAKINTFTIQKDEMDLGFRNSQLVDTRIITKYAFHYLKSVFNRVDVEKGNVTATFRKILGVQSVDEKKDRSKHSHHAIDAAILTVVPTATKRDKMMELYYRLEDAPDSEKENLRIELQQEVCDCRIGSVNGLLETIERNILVNHISKDQTLAPSHKRRRTNGHIIEGQWQTGDSVRGSLHKDTFYGAIKSTTGDLYMVKRTPIKTMSEKDIETIVDERLKEMIHTQLKHKMEDEGLSASKAMESEFYMLDINGDPITQDRNGRPIAPLRHVRCYAKAGRGFLKIDTALPIKKQTYLSKQEHKNTYYAQNDDNYLCLFYEGMVKGKAQRSFRLVNYLDVAKLKLKNGNTLFHEPEFAFYEGNHSMPLRAILKKGTRVLLFANTPDEIPDLDNDALSKRLYVVRKFNVITSIYVYMHQHIDARKETEFSTEEKGTEFNPQKTYPYIKCTAPNFKALIEHYDFEFDSLGKINFK

SEQ ID NO: 9549 - protein, 1059 aa, unidentified
  REGION 1..1059: note = Description of Unknown: Cas Enzyme sequence
GRALYHINQRRGFLSNRKSEGGDDDGTVKAGISNLTKDMEAANCHYLGEYFYKLYHNGEKIRNHYTARNEHYLSEFMAICNKQHLDDELIKKLKDVIFFQRPLKSQKGLVGHCVFEPKKPKCPASHPLFEEFRMLSFLNNIKIQTPKDEVLRPLNEDERKRILPKFYRKSKPSFDFEDIAKELSGKGKYAYYKKPMGKPYLFNYHMDTSVPGCPVTAGLRDIFGDNWVDGICEVYDKGKGKTRLQIVNDIWHVLFDFTDEENLIAFGKHHLQLCDDEAKKFGNIKVSTDYASLSLKAILKILPYLRQGMIYSLSTFFANLEEVVPNEVWSVESNRPKIINGILAAIADKDNNAVDNRTTERCIKDYLIARFGIEEKVADKLYHPSMIESYPHVPENVNRLGSPRIDSVRNPMAMRSLFRLRHVVNTLLAEGKIDRNTTIHIEFARELNDANKRQALARFVKENENERKKIRAEIIKVYKDETGLTIEPTDTDILKYQLWEEQKHRCVYTDEQIGIADFLGENPKYDIEHTIPRSVGGDSTKMNLTLCNSKFNRDVKQTLLPSQLDNHEQILQRIKDWKDKYEELDKRIRKIRTSSSMSKEQKDRKIQERNLLKLRRDYWYGKYQRFVMTEVPEGFSRRQGTDISVISKYGRLYLKSFFNRVFIVKGLATSDFRKIWGIQDIYAKKERVNHVHHCIDAIVIACIGPGEYSKLAQYYHDEENHEWYGASKGHIAAPWQTFQEDMSKIQKEIVVSHSSADNIGKSGRHRIRLKGKKIWADGDSARASLHNDTYYGAIEHDGKVKYVVRKPLDGNFKESDVDKIVDDTVKSIVKEAIIKCGGLKEAVAQGIWMNKEKGIAIRKVRCFTPSVTRPLNIRHHRDVSVKEYKRQFHVMNDTNYAMAIYVGYDKKGKERSVFEIISNLDACNYFKESNDKETVGNNLFPLSKNDYPLKYVLKKGTLVLLYEDTPEEIRQCTKDELVRCLYKVTGMSSMVVGGNEYGTLVLLHSQEARPSGEVKAKNGAYKQNEEFRSSIKLLHTQFKALVAGYDFEINDLGEIKWLR

SEQ ID NO: 9550 - protein, 1442 aa, unidentified
  REGION 1..1442: note = Description of Unknown: Cas Enzyme sequence
MKAVKVSENDKTWYLGLDIGTNSVGFCASNSQYDILTKGNHLQCGARLFEDASDASNRRLKRSMRRRLARRKVRLQLLRELFAAAIDDGFFLSMDESKLLMEDKIGKSKYGLFNDDNFTDADYFKKFPTIYHLRYYLQNNKTDDIRLVYLASHHMMKYRGHFLFNQFNSSTSKDSLATMVEDINEYLAKTCESEEVELFYSKNIDSELKASKKTEKRTDFWDRIACSVNPQNNKKLKQVFEIVKGKNIKIKELWPELYESLVISGKNETIPNLSFKDSEFDNIFDDFISMGVLTDDQISLVCACKRLYDAINLNIILNGAETISEAQVKRYDQHKYDLSVLKAFVRKYLPDEYSKMFRWNTKSKFGNDATYVHYIQSSIVSNKKTVTHDKKCIDAIKKSCNSAKTASYEEFLDYIKKNIINVKSLSDDARESEEFKYIESRVGEGSFCQKLRTIDNAYIPNQLVAYELEKILRKQQSNFPCVLTDETIGKILNLITFRIPYYVGPLSDKDSDFAWVKRTEPNSHTPITPWNFDVEVDKFASGEVFISRMLSKCTYLKNETVLPKQSLLYQKFMLLQDINNLKVNGERITPELKNIIFNGICQQESSLTKKRIENYLKNDVRKLEKEDRLSKDDELDNAFNSSLSSYITCKKILGISSDQDLSPEHYDMCEKIIKWHTVFSSEKDAVRQRIKKEFGHILTDDQIEKFSRLNFSGWGRLSEKFLTGIKIKYRGREYSIMDILKEKCLNLMEILNATNFESNKECSDGDKSLFLEEVKQYNKQFEDDCSITYDDVKELYCSPIVKRSIWQTILVVKDLVKINKVFPKKVFVEVTRAEDVKKKNKLQSSRLEQIQKLYKEAKNIDKELSLQLNERVTKDQMRSDRIFLYFMQLGKCMYTGEPLDFDKVVSGSGMYDIDHIYPQSMVIDDSISNRVLVLRSANAQKKDVYPLSTDIRRNMKSYWDFLKNNKLLDSKKYDRLISSSPLSYEEISGFNNRQLVSTNQAVKSVCMLLDRMFNLKGGTEIVYSKAQHVSKFRQMYDILKCRDINDIHHAHDAYLNIVVGNVWSVMFKELPGTNENRKFENLWTKNFTKFKERVVEEKQNNGKSVDLVSLTTGCLFNSKYLHGFTKDIVWQADYIKKIKSYTINCNESYVNKFVITKMPQEITGAFYDETIHIKGNGGGSASGLIPLKKELDPNKYGGYRSETTSYLCLVEYKQKKKSSIELVREFCKVPVRLAVRQYKDEKEYLEQVCVFNGIKANLEEARIVCPKILIDHTLEIEGCRYYVRSGDLDCRTTCQWYPSPNIIKLVRAVVKNVSRLQPVKKEDEKKNIVIENITLSDTEVLFEAIVEQLKKKFYENYTFAKKIKDGNVSFDKFKSLELFKRIEVLNEMLKNINHSSSICHADAVGGAANDNCKWNKANPKRKVSLVTYSPSGLFENVIPLIN

SEQ ID NO: 9551 - protein, 1420 aa, unidentified
  REGION 1..1420: note = Description of Unknown: Cas Enzyme sequence
MSNYDNFKKYGDYYIGLDVGTGSCGWAVTDKSYNILKVSGKCLWGVRLFPTADTAAERRAHRCARRRVFRIRQRLNLLEQLFDPEISKVDVGFFQRLKNSEFKEISKSNLFGDNSYKDKDFFKEYPTIYHLRYKLMNEPVDDIRLLFLAVHHIIKHRGHFLFERLDVNNIGASLPELWEQCCSQFVDISLFSNVSDDFQEIADSLKQNLIDMRDDVINVIRTSSDKRSDLKKVFAQLKSVYDEISDPEVKKSTENKVNRWYLLLLGYKVSAAEIFTIEESDEEGLSCKIKFNSSDYDEQIQKINDEFKGVVESEKAVYDVIKLQEILKDCNSISESKVELFNKHAEELRIFKSLLRERLTENLLAEVNKKVDVAKNEKLTTEPKSFYKEIFEERNKNTEKGKICFYYDITHGDKSANKEAIKGSSIYKRLQILAQILLCSSEIYKLSEKEKVLLHRIGDLSIFETQVSADNSVIPYQINLAELDKILKVQSKNFAFLSEKDDAGVSVYDKIKALLTFRIPYYVGPLNNHSKFSWIVKKSQEKIVPWNFESVVDTEKSAEAFIKRMTSKCTYLSGEDVLPKNSIIYSKFMVLNVLNNIRINGMRLDEAQTGLTKKVFDELYCNQINVTQKQLVAYLYNNGFLTSKEELTGFDDEQKVSMSSYVKIKNALGTDNFDINFAESFIKYSTLFPNDYLMIEKRLKREFSSECAKFNENLSKLCRIKFSGWGRLSEKLLTGLLGHNKNSEFDKNSILGFMLNGKGNLMELLSSEYTFSDLISSENSTLDKNDAFSYQNLVEGLYVSPSVKRMIWQTLLVVREITKKIMGYEPSRIFVEMARGATADQKGKRTNSRKKSILALYDKCRKDFDISEIYSSLEKQDDNKLLSDKIYLYYTQLGKSMYTGNKIELEDLLNNSKQYDIDHIIPQSLTKDDSIDNRVLVERTVNEEKDNNYPLSYQIRENQTQFWKHLLDLGLISKSKFERLIRSTSLSNSEKEGFIARQLVETRQSTKAIAGLLSKLYKKAKIIYPKAGLTADFKQKFDLIKVRELNDLHHAKDAYCNIVVGNVYYEKFTSKYQYVIANNERYSFSTSDTSYIFTNQNEKRLQQSGIWDSRNGCSISVVRKNYYRNNILKTIKQEEVKGKLFDLTLYGPSKATIKKKKHLGCEYGGYDKDYNTFFSFISFISKKKKIYRFIGIPLRIVENSNNIHDSIVQYLLGEKFENPQILIEKLPFPFILKNNETGFLYKVSSYEKANKRITLQQFNSLILSIRSQKILKAIESFERKVKLNDKKVNFVYDEKKSGFSEQDLTNLFSELKSKVENTFFNCLPVVITNVLKNIDLQTYRVKEKDSDERLLTIEQKVHVVVELLKAFQSNGASSDLHDIGESKNSGIVRTTELDFEKYSIINYSVTGFYFIETKLRDFIK

SEQ ID NO: 9552 - protein, 1278 aa, unidentified
  REGION 1..1278: note = Description of Unknown: Cas Enzyme sequence
MKTLGLDIGTNSIGWGIVDENAEKIEKCGVYIFPEGVKIEKGVESSKASERTGFRSARRLKFRRKLRKYETLRILINNGMCPLTLEELEKWHKEKIYPSSKDFINWYRTDEEKNWEPYFLRKKCVEQKCEPYEIGRALYHIAQRRGFLSNRKETTKETDGKVSEGISELSQAKGNKTLGQYFYELKQAGEKVRGKYTSRKEHYEEEFNRICEIQGIPEKLKGDLYKAIFFQRKLKSQKFLVGKCTFETDKPRCPISHFEFEEFRMLSFINSIRVYRNSDNFDGPSLFDDLEEHYPKDNKLTEEEIESIKPLFFRSKGNFDFKDIAKKIRGKNDEWSFNYRDDTNVAGCPVSRDLKNIFGEDWKNIKIPNEDSASDKKYYDINDIWHVLYDFDDDEKLHEFALNKLHLDSETAEKFCAIHFQQGYANLSLKAIRKILPFLKKGYVYSHAVFLANIPTMIGEEVYNKHAEKIEKAVETITSTLKDKNNRITLANRCIEAIFKDEKHDFHSEEWDKSIVDDQIADLFGKRKFAEKPLTEQKEIRDEVIAKIEETLKIAVTKNPNDYKYKPLRTDELILEYLNQQGFEFKKNAKLYHPSGTEYNLERPRESDDGKTYLGSPRTPSVKNPVAMRALFQLRKLVNYLIKTGEIDSETRVHVELANEVNDKNWRKAIEDFQKENEKKNAEYKARIIELCKESGFEIEPTDSDIKKFRLWKEQNETCPYTGKKINITDLFGPHPKFDFEHTIPRSLSYDDSLENLTLCDSDFNRKEKKQRIPSELANFEEISRRFERMYESKIDECLSAIERNKTRGGYIDPEIKNRKIVARHKAQLELDYYKGKLRRVNAKEVTDGFKHSQLNDTRIITKFALQYLKSVFPHTFPVKGSMTDTFKKQWNLGMYAGDNKDRSNYRHHAVDALTIACVNRTKFNLLSEAVRASSDGAHLKFAKPWDSFDKDVLSAVQYIVPKHYVDDNSLRQTKKVLRDPRTGKPKLDKNGNKIYIQGNTARGSLHKDTFYGCVMTPPEKGSDPQKIFVQRVSVDTLTKDSADKIVDKGIRNTFINNLETGKQSLADIQKDGILLPYQINGKDVYVKRVRIKAKPTSPLVLKKHNNVIDHNPKDYKQNYYVVNDENYLIALYRGKDAKGKSQSDYIVLNLLDAVHKKQNGERLYPPTKEKKDTNLKLYKVLKNGQIIILQNSVNENVFELSSKELFSRVYRISTLESDGRVNLSHVTIAEAKNKDNKSQCFYEGIDKYKRLSNSGLNCLVEGTNFTISPTGEIIPKN

SEQ ID NO: 9553 - protein, 1491 aa, unidentified
  REGION 1..1491: note = Description of Unknown: Cas Enzyme sequence
MTIENLEGKTNVLHANVGIDLGAKNTGVFIECHRPSEPDKFSSAAFTVVMPPDQTDFTYRLTTRTQARHRVRGGQRFSLARRLLKVLIEEMLRRKNETVPAQQKTQLWDALYGLLKRRGYSRVDSETDLSSLTEISDTDAFLKIFAEVFGIDSSSQLFSHLQAGSRDDQGNDVSPEAFWNSFKQNIADVEEFSAAFAKLPDRTALKKAVTSCVKNDFPDLDPKLYLNAVISVVDDTGSLLLEKKHGHKSRREYIEVVLKEIEKDRRLWKIAELAGGKERLANLVCNVSNLQLRALRWYFNDERFKDTDFYDGEKLKSILVSAYRYFHPDDDRRQDMKDVISEYSGSGSILDTMSDLDPIKSIPPYEDQNNRRPPADATLLLNPAVLNTKAPEWMEWVNKIYSKYPIYFSETEYFAEKVDRVSRGKEDKSGILSGNFYQASYVLQRIFDRNKKTDPFCLRNNVDAYKDSEPHSFDKNNSGFKELSLVLGGDQYAVEFLNLASGYYDETNAAKDGCWQSEFNMNSDNPPLLEKSGIHPPMKKGVLDILIGNILGADKDTGRAFISLRIMDEPVGKRLKVKSICGKAADLNKKYGNGFKYAIEAAKAKNLQSKLTHDEQELVNIDVNASKAAEVISKKLNLSQEQQRKFSNPFSLSQIYNILNNDPDGFNGTCLPVTFENSYRMRPADDQKSIAAEFSRLPADCVRPFDGILRRSLERVSFETAKRVATEIKNASNAGIPVDVTIVVESNSFTFSADLAEIKKASKQKITQLAEKGETENKRWADKDERIKRASKGICPYTGQILLPTDQSGEIDHIIPRALSGKNQGMIFNSEANLIFVSRMGNQTKKDQLYTLGNLNGNYLRKQFSTDDINLIEREIKSKIKDLKEKGRLKRFELMSEDEQKYVRHALFLKPGDDARREVERSLGRRNQTLVNGTQQWFAGTLVENIKKILNDNGYSRINFSVRRMPAEGTSDCRRRLSEIDSQFAKPASSEQPFASHAIDALCVYAGACDVPEIRSLMGGAVWDDESDESIPSQLVNNIFPRNVDCIHVERKPLAGKSNFWSRKVFNDGIYQLNFIPILRKADDVRLGFNITSVNSKKQNGVKGKTPLKMLELLTDVLSQPVDAGGGWTKYEILPDTAFEKVSKAMHSYVSEDELNAVKVILSLSYITQKTSVVGKLYDSQKHKLKPLEEKSFHIKPAFSSKTLGFSYGCDLVIPVFNDWQRIAELDEIRKLFGQEKVDQNTVEKVIKKYWPDRKVQSNVRVTSRPHSAYRQAISLPMKAATGACYAVRRKNLDGTPIYQVIATLQNSSGFAADQGRKVDWKSPVLLDGLKAENIIPLKEERLYREDSVIVPLTEFRKVFVYKTQKHETSGSDQFSISIAPGTEGRRYLKISCPFSIFREAAGLKSEDGFTQLKNEMKSPEFFIQKLAGSLKNTITNSGANVAEADKIPSLLGKPRSNLFILSTGSQVSFWYIVESSNEVMNSMFNDQTKS

SEQ ID NO: 9554 - protein, 1549 aa, unidentified
  REGION 1..1549: note = Description of Unknown: Cas Enzyme sequence
MKKILGLDLGTNSIGWAVVNAEEVTRDNNTNYLVPNSISSAGSRIIPMSQDILGKFESGNSISQTAERTRIRMVRRLHERNLLRRERLLRVLSVLGFLPEHFAKQINRYGKFIDDSEPMLAWRKNEDGKMEFLFQDSFNEMLADFAKNQPQLVENGKKIPYDWTIYYLRKKALTTEISKEELAWILLQFNQKRGYYQLRGEEEEEKENETTEIISARILSVERKEKDKKYDRFWYEMKLDNGLVYRAAFYNDVSTWEGETKDFILKRTTLKDGSVKNELSFLPTTDEIERMDSAKKARMYAKIKLRTEKDIENSNETIGSYIYDALLHKFDQKIIGKLVRTVDRKFYKDELLSILKAQKEFIPELKDDSLYKECIEELYSKDEAHKKLIGKPDFAKLFINDILFYQRPLKSKKSLIDNCPYEFYKEKDGKEYPVKCIAKSNPLFQEFRLWQFVQNLRICQRERDVDVTKELFLKSEEDYVNLFEWLNDRSSIKQDTLLRSYFKIKKEKGKDNYPYCWNYVEDKEYPCNETRAIMLSGLAKCGITSDFLTHDREIGLWHILYSVEDKTEIEKALRSFAKKNNTTDNFAEVFSKLKPFKKDYGAYSKKAIGKLLPLMRMGKYWKEENIDEGTRKRIDKIITGEYDESIKNRVREKAINLTEVEHFKGLPLWLACYIVYDRHSEAKEIEKWENPEDIDSYLRHFKQHSLRNPIVEQVITETLRTVRDIWKQEGNIDEIHVELGRDMKNPADKRKKMSERIQQNENTNLRIKAMLMEFKNPELGIENVRPYSPSQQDILRIYEENALDNLKKEDEDYEFISKISRTAQPSHNDIVRYKCWLEQKYRSPYTGKPIPLAKLFTTAYEIEHVIPQSRYFDDSFSNKVICEAEVNKLKDRQLGYEFIKNCAGQTVQLNQGGSVRILSVEEYENLVKDQYACNPLKMKKLLLDDIPNEFIERQLNDNRYISKVVKGLLSNIVREKTANGEYEQEAVSKNVISCNGSITDRLKKDWGINDVWNRIVLPRFQRLNKLTGNDFFTTRNKEGHEIPNMPLVLQKGFNKKRIDHRHHAMDAIVIACTTRDHVNLLNNESALTKHQDMKYALSRKLRKREEVVIDGQKRNVYKEFLTPWPSFTNDTLQTLQNIIVSFKQNQRIITKTTNNYQHYDNTGKKVFRKQIKGDSWAVRKSLHKDTVFGEVNLRKKKTVSLNQAIKNPNSIVNKDFKKKVIELLKEGHDVKYIKKYLGENKDVWSDVNVDKIEIYYFTKDEKKRNGEPKERYFATRKPLDTTFDEKKIESSVTDTGIQKILLAHLKSKDNSPEQAFSPDGIEEMNRNIVTLNNGKFHQPILKVRVYEKADKFAIGQTGNKTKKFVEAAKGTNLFWAILGGKKRNKETGKDEVVRSYLTIPLNIMIEYQKKYSAKCDDKLEQYLKERELIPSEYNILFILSPNDLVYLPNKGDSDININTIDKNRIYKFIDTNSDKGNFVPFTVAKTIFSTKFSDQKKLGINIPIQDEYGLGSQGSKSPRAITGEMIKETCVPIKVDRLGNIIELNGIKL

SEQ ID NO: 9555 - protein, 1443 aa, unidentified
  REGION 1..1443: note = Description of Unknown: Cas Enzyme sequence
MSKNILGIDLGTNSIGLAIRDIDGQSLNEQLVYFSSVIFPSGVGKGKTGEFSYAAERTKHRSSRNLRKSRRYRIWSTLKLLIENGYCPLTMEDLEKWSRYDKAKGLKRQYPIHATQFEQWVRLDFDGDGKADYSSPFELRAELMERQFDFTNQIEKYKLGRALYHIAQRRGFKSSKGETIKEQEENESFEDFDISDELKKSEVKKSGELEKYMDAHNLPTVGCAFAHLEKNGIRVRNSKYQAVRSQYKKEIEKIFKFQSGLDKDGDFYRRLVSEKKGEGTIFYKNPLRSQKGQVGTCTLEPSKSRCPISHPDFENFRAWCLINNIKFGEGMKETLTIEQKNKLFKERFLLTRSSFKFQDIREWIQKEIGRNLDYRAKTINYKDKTNVSGCPISGRLKNLLGDDWENWTYQSNEEKTNKKTGEVRRITYDVYDLWHVCFSFDEPEYVEDFAKNKLLFDDEKTKQLVRIFGAIQQGYGMLSLKAIRNINRFLHEGLIYTDAVLLAKLPDIFKDKWEGAKEEVVSQIDTIINKNRELKQLYNIANALIANYKSLGYDEETQTHERFADHDFEYKLQDSDLRDVEKAVIGAIGEKSWEKKNEEEQQQIINNVAQLYQEFFASEKRDYYKLPKVSDALADFLREKFTFLSEKDLKQLYHPSMIEFYAPAKEQKLDDGRWMKLLGSPVIGALKNPMAMRVLHTLRKQVNALLKDSLIDEETRIVVETAKELNDANMRWAIEAYQREREAENKEYEKLIGEFHPNREIKEEDIEQVRILCEQHDIPEKGKSIEKKEKTKEKESKKVPIYKKDITKYRLWLEQGCRCIYTGKIINITNLFDENAFDIEHTIPRSVSFDDSLANLTVCDAHFNRTVKKNQIPTQLANYEEIKLRLQPWFEKVEQLKDNVAFWKSQSKKAQTKERKDQCIRQRHLWQMELNYWSNKVERFTMTEVTSGFRNSQLNDTRIITKYAYHYLKTVFNKVDVQKGSVTANFRKMLGIQSIDEKKSRDKHSHHAIDATVLTLIPTAAQRDKMLELFYKIQEEEWLGHNTSILRKELEKERKKCGLTANISNIVPFIEENILVNHISKDQTLTPSRKRKRIRGKIVPKRDNNGNVLYELNEDGTFKLDKFGDKIPQAKEWITGDSIRGQLHGETFYGAITQGQKDEKGTLLRNEDGSIATDGNVRYVVRRILKYKSSNVDSGFKNWDDLKEVIVDKDLFSIMIGQFPEGTSFKVACERGIYMFKKNKDGKIDYSDDCKVNKIRHIRCFTSVKNPLEIKQQTYLSDKPYKQNYYAEMGDLYVMCKYEDIDKTEKEYRIYSLFDISENRKIDIEDIPFCIDNKKKNKTLLLSHQLKRGDMLLLYTDSIDELKEMDNEILSQRLYVIRGFENPSLIKLVKHSNAQPEKDLGKGESIKDYGKIPEKIRCGINTLKYLIHGVDFWMTPKGLVFKN
